United States Patent Application Publication US 2013/0096032 A1 - sequence listing, part 33

SEQ ID NO: 1157 - DNA, 56310 bp, Arabidopsis thaliana
actatttgaaccgtaccgtacttctcccacatcacaaaatgcagtcactattcggaccttaattttcttatatcgattattaaactgaacattcttaaatcttaaccaaacaaaagtagctgattttatccctatttttcaaacctaataatttatgtgataaggttcaagggaatattaaaaagaaatagtaatgtggtagtttttgtgtctagattgaatatgctgttactgatttatattcttcaaccaaattgttacatatttctctactcggttgaatagactatagtggatttaatacactagacaagttttttctttgtaatttacatttaaaatacaagtaaagagaatgtatatgtatggtttaacaaaaacaattatatatatttatatatatgtgtgtcagtgtgtgaatgtataatttatgtgtatgagagtatattttggtgtgtttgtaggtatgtaatttggctgtttatttaatacggaagggagagaaagagggaggcgttggttcccgcgagaatttcgccttattatccgttgtcctcttagagaataatttatttttgttatatttgtcttctccacttttctgcattattcttttctttttctcttgtttttttctttatacaaaaaaaactctacagaaattttatacacctactaaactatcatcagttcattacattaattaaagaaacaatgtctctacgtcaaatattagtaaattgattgacattactgaattaatttattaatattctgcaaaaattatatataccatagtttcatgaaatcttttcacacattgacgtttgaattaacgttgataggacccacaacacagcttcttcccatgcaaaaagttcctcgagctactcaattaaacactgcaaacttcatgaaaatagtctcttcctttgctctttaattttcacttttttttgttttgttttacacttcttggttaaaagtttgtttttacatttagtttcatagttcctatcttcttctactgtatagcataagattatacatgtgttgacaatagatataatgatactgtacatgtaggaagaaagtgttcaaaaaattcaaaatgcaaactcataatagtcttgtttttgtactttttggaattacaggctatatattgaaaagaaaatagagaaaggaataagaaagagatgtctcttgaagggtgaaaacaaggagcgtcaactttactggtcactttcttgtttatcagtataacacctttgcaacatttggcaatatcggatctgacggctgacagagcagcagagagccaacaatcgaaccgttatgattacgacacgtggatgagtgagtgtttgtacgaaagatccaaagttgaaatgataatgtaatgatggtttaataatatatgcttttgacattctgtggacttcgtgctcttctgttcgtacgacagtaaataatttcgaccagtgtttcagtctttgcctcaaacgcagagaagaaagagagagagtgacagaagcaagctcaaaatataattatactattacaatttacatatatgaaaaatgttttatttcttttagctttttaacaaaaatatatagctcatgtaactattacttcatgtcaagggaaaaaagagtttacttaaatatacataaatttggttatctctagctatcaaagggagatgatttcgatttttaggcaacattgttactagtcattgagttgctaaatataattgcaaactttcttttttgactcaaaaagtataatttcaaactttagtagtacactttattttatgaaattgtatgattaaagtgataataatttaagaggaaagtcaataaattttggggtagcccaatgagaaaggacagatgaaagacttttagctagggagagagaataagaccaattgttctctttttcccataattctccttctgattcttatggatctactaatttgtgccatctctctttatgtcattaacatatgcatacatattatcataagatgattcatcatcttagcaccaaaaactttgaacgtttatatacatgtaaaagaaactaatcaaagtttgtgttgactatatgattagctagtttttagaatgtaaatctattgcagcttatataaatataagttttgtttgcaaaataagtatatgtgatagcatttaatagttttgatgagtgggtgggtgtatgttgcaattattggtgaatgattactaccttttgcatgccttttatattctgttttgctttcggaacttgaaaacgataataataattttaaatatataatgtttgggatgtttcacgttgcacgtgacatgacaatgacacaaggccgtgtttcaattgtcaaatgcgactacccatacaatgtgaagacaaccatactttcaattgtcaaattcttagttattttcttcaagaatttgaatgattttgagttttccaatctatattttggtttatgaatagttcgtagatcatttgtcgagtacatattagttgcccaatgatagttaaatcttacatagtaactaaggaagtaaatggtgtcccaaaaatttattttcgccaaattcatttagatagaagctaaattttgttgaattctattaaattcatctagatttaagaattataataataccaactgatacggagatatattcatgtcaattctatatacacaaaatatcatataatagataatattagaattcttaaacatcgatcacattttaaaatgtccccccaaaaaaaaatgtcataaacatcgatccggcaagaggccttggcacggtggagtttagctcaaatttgattatgacattgtaaattgtgtttgcttttttttcactggcgataggtttaggtcattccggtcagcatttgtaagagttatcttaaattctcacttaaagttattactatgatcttatgtaccggctacaccttcacgagagcttatttagacacgaactcgatcgggtttgtcataggttaggttaacccagtccaaagtttttcctattttaagcaagtttttagtcatttttaaccaaagttttcctctcaccatgttgcttcttgttagatcatttatttaagttgtgattaatggtagttttgatttgttcactcaaactttaaaccttatgcatttcatgctttgaaaatattactgaaaatggttaaatcaaacattcatgagctttacaaaactaactaatgagaattgatgatgatgtttagtactgaactaattggagttgtattgcaatgctcattgattatctaattgcaaataaaatgtctaataattatgtgataacggttagtactatgtaagtagattaatcatatttgtgatattgagctctgatacaatcctcacttggccaagttttcaaaacctttctttgatgacttgttctccgatcatctatcaaatttaaacttagtctatcattcgatcagatttctcctagtttgaagttcgattcaattattattttctcagtctattcgattagcccaaaacttttaaaaacaaattaacccagtattcgatcattcttttgaacatgacttagttgtcctaaccaaaccaacctgatatctttattgcaggatgcaaatgttaaacattttcggtctagttgtatgaaaaacataaattttccatttaattttgttgaaaagtgcttttttactctttttaaaaaataacagaaacgctctttactctttgtaaatattattttctaataaaatttatatcaaccaaaataatattattatccaattaacctagacttaaattagtcatatatattttcgaatatcagtgagtgaaaaacatataaggagcccaaaatataaaatatataggcacaaatcatcatcattttagttttgtttgaatatttaactatggaatttctatttccaattttagtatttgtatcgaaatgataaaattacacatagtaaactttatttagataatgaaaactttgaaaacaaacgtctaccgtcaattcaaatctaacaccatatcaatttagcaattattttatctctatttactcagctaggtgttggtcattttcactgtcgcatatggatggcaatcgtcatgcttaatataattatgtgtgctcgaggaagacaaaatgctgagaatagagtgttgacgactaaggaaacatcaaaaacctaagtgaaagcaatgaactaaatattctttggtgggaatctaccttatacattagaattattctatttttctctttaatgtcttttactttttccctatcatatattcaatgaacttttgtggtacgtcgtccatatagtatatttcaagaacaagtcccaaaatttatactttggacctaaaaacatatacaagatttgttttacgagaataaagagatatggtttgctttattgtataagttaattatcttttcgaaaagcttatggtgatagacagttcatatgctttctacctactctaaaaccttaaggccaatcataaaggtaatcattaatcatatattatctatcattcacgtccatttcttttcttaacaaaactgattaacatttctttttgtataaaaaaagtagatattcttcttacaactttacccattcctttaatatgtttgctttctttcattcatgtcctcttttgtcattctttcttttacacctttttctctcttttctttttttctttctacttttttttctttctcttttacgtctttcctttttctctattattattctttatctatatatatttttttttggcaaatctttatctatatttatatatctttattatcagattgtaaaataaaagttcaaccaaagagtactgaacatttattgtgcctctaatagttgattctttcactagctcttctcaatagagaaggaaaaagaacagtgtgtgtcaaagttccaagaccaagataggacattaagattttaagctaaaaaaaaaaaaaaacttattcaattgatatgaatatcgaaactagtcagtagccaaaatataagttaattgatactaattaattactacctagctacaacaataaatttagtgagatcgacccagagtaaactcaagatttggcttgaaagggcttgttcccgagatgcttgatgagctcatctcttctgatgatattctctcataacttgagcactttccatctagttccttctgttgaaattaaaccccaaaaagaaatcattaaccaactagctaaattttctattgtataaatggtttgcatttttttatatgtacttgtatatgatatcagcatgtgaatgtaaataatttataaataaaatattaagtgcagaaattcacgcaacattaagtaagagtgatctcaacatttaactagggtttaaggttgatattgtatcatccataattaagacattagttctaattagatgtaagcttaccctatttattgtcctatggactaatgtttgacattgacacaaatatatatacataattatatttcttattgttcaatggaagctgccatggttttgcttttgcccatatttgcttataagccaaacatagataaccgcacctcacggcttaagctttcacaagtcacaatatatgcgtgtcaaaggtcaaaacaaaaactcatcctggtcaatgtcaatgagattagtttttttttttttttttcgaatagtgtctaaatagcgaaaataccttttgcttttgaaaattcctaaagcaaactttaatgaaagccctttttgtggcagccctttttaggatttcgggtgacttagcaatgaaatgatttcgacaatgcataactaaattgataatagttcatatgctacacacaaaacatattcgcgtatatatagttatatttgtagaaagggatgtatcgtacctcagaaggtagcataatttctgcaacattatcgattaacttcccatgcaaacgtgcttctctgcaaaagcaaacaaaagtttgttatatgagatatatttatgatatccgctttacataaatgaataaatgaaaataaactaaccaaagaaataaacaaaaagaggaagaaagtgaaaaggaagataagaaattacaagacgaaagaaaacaaagtgttttccttttggtaataacaaagttatttttatctctgtcgactggcatggctgtttgtttaacgtaagcaaaattgataacgatttaatattatagtctgacatatatattactttattttagtataaagttgagaaatcaatcttttcctcctgtccatgtgtttgcccatttgttcatgtgttaaccattttaaaagagctttaatttacttaaatatctctagataatttgaagtctaaagtagtatatctatttttgttttcgttttgttattgttaagttaggaaaataaactcactttatatatatacattagatttatgcatacaaattttaggattttactaagattttcatgtaatgaatcactttggaaattagctttttatttggggaaaagtttcttccactaattcgacatattcataatatatataagtaagatcattatatatatatatatatatatatgtgtgtgtgtgtgttgttgtgactgtggagagagagcaacacatgatgattaacccatcatgtgttttgtctcaactcggatctattgggtttgtggctgagaaagagacaaaacaggactacaaagcagaaacataaacattacccagttcttaactacgctaatatagatatagaagcatgcacatgcttagcgagattccacattccatatagttagttatatatagtaacgatggaaaaatcatctatatctagctagggaagtatgtatagatagaccgtacatatatgtacgtacccggaagaattggtccatagaccatttgatttctctagaggattcgtcaattcctcgctatctctcgattttctattcatatcgaacatccagtcgtctgagttattatctcctgatgatccattttcatagacatcagattgtcctgaataacattaagaagaaagaaaaaaacaaattagggttctatcagaatcacatttcaattaattattaaatcatatatatccaataatttgacccataaagaatctgaattatttctctaacactaacctgacgaagctgctgctttgtcggttgtcttcactgttctgtacatctgatattataaaaaaaaaatgtgcatcaatatataattaagaagagaccaaagtaaatgataattcgtctaaatccgtatataaagattagagagatgcatgtatcgaattatatggaaaaggaagaagagaccaaagcaaggagaccattgtactgttgtcttccgacacagttgaatagtaccaaccaattttcaaaataagaaacatatatacacacacatttttattctatatatataattatatatgcacagacacattggaagataaaaaaaaaaacgagaagaaaaatataaaactgttcggacacagaagcattaattgacattattaatgaagtttgcgattttcatgtacccatgcatgaatttatgtgtctaaccatggttaaattctagcccattcaacatatggagaagtggaaccatggttaagttaataaaccctctctctctctctctctcactgtgactctgtgtaagaccaaaaccatttcatcattgagaaatgatggtgtttcttgtactctccctttctgtctatatttattattattaaaaaaaaatcctactacctatatattcatttaaactaagaaataatccctaattagattgtcctaagattttgtgttcttataggcatatacaatatctacatatacattacagaaactataatcaggtaatccttaatagatgataaatatataaaacatatgattacgcagaaacaaagtctaaattttggtttataacccaagaaacaatggatgataagaaaccaaaagtactaatgttttgattgatattcttaggagatttttgtttttctaataattagcacaatcacttacgtaatttccccatctctctatttctctctctacctttctattctatgtgtgtcagtaatagtaatattgagtaatttttggtttacttgtaacaggacaagtttattcttccaagacgaaattttttttttagacttgcaaaaagaagactgtctatcgtctatctatgaggaccatcagatctaacacgaagaaacgaagaagaggattttgaaaaatgtttttttttttttttttttttttgttgtataaaatatgtatggaatgtttatatgcatttttcttttgtctgtaacgcaaccaaggaatgcattattggtatgcaaaattggatttaattaagataagaataaaaaaaggaaggttcagaagaaaacaagattcgatctcttctgactcgagtggaactctgatttaaggaagtcaccgagtcaaatgcatcgatacccgagaagaagattattattattaactaattacatacttattatgtacatttatctttttcttcccatctaattatgtacttaatatggatgaatttgtaacaatactgttaatcaatttacctgtaaatgggacttaacatgagccaaggttagatctttgacatccatgagctcaagaactgatttaggtgttgctcctaattagcaagtgaataaaacaaaaacatgtttagttaaaaagggtaattaagaaatggaaaaaagagataagctttaaggttaaagggacatactttcatggccaccgagtaattcaacggcgtgaacgaaccgggcatgaagagtggtggtccatcgcatcctaggagctctcatgcttcgtttagctgggaatcttggcatgaatctggctctgtttagagtctggtgatgatgattgtggtaattagggttactaacgctactagtattaaagctattgttgtttccggttagagccggcgaggaagtggaggaagagggtattagagacgacgggtcgaaagggaaacatggcggtggcggacggtgaggatgatgatgtggaggagggttgtggtaaagtggtattcctcttattggtcttaagtgagtattaaggtcgtgagcaagaaacccttgtaagtgttgttgttgctgctgtgtcggaaattggaaagaggtcaagatgttagagctgttgcaattagggagaagttgtggatgatgatgttgttgttgttgttgatgatgagagatgttagagagcgagaggtcttggaatggatgattgattgtttttgaggtggaattagagacgagagaagatgttcttgaatcaagagctcttctccaaaaccctaaatcgagttcttcatgatcttcttgatctgttgttgatcttcttctctgccatgtcgatgatggtttactgtttggtggacttatttgtaaggataaatcgggctgagcaggaaacagctccatgaaagagacctttaacttcttcttgaagagattcttcagtcggtttccacagatgatgaaccctagttcttgttttcttgaattaggacaaagaagataaaaagagaaagatatccttttttattaagggtatagggaggaaaatagaaaagggtattgaggatttgaggaagagatttctgggttttgttgagaatgttgtttatattgtttgaggttaagaagattttgcaaagatttttgagagatatagagggagagagaaaatcaatgacaaggtagtatgtagtgaatggttgtttcttttgtgtgaagtatatgtgagaaaatgacacttgagtgtgtgtgagagagaggagagagaaggtgtttgtgtggacatggggggctagaggaacttaggttaagaaagggggaagaaaagcaaagggataaagaaaatgaaaagagaaaagagaaagaaattgaaaataaaaaaacaaaagtggtaaatggtaaataaggctttcttttttctttctttctttgcactcttttgttttctttggaggagaaaagtaaatcctttatttgtgttttcaaaccatttttattgttcttttcttagtctacattccaccttttattttatcttttcactcccttttttttgtttcttcactataaccaataaatttgaataaatggaatttttaaaaatatattggtctcataattagtggattgcttaaattgaggttaggcacttctatatggttttctgattttgttctaatcatttctttagcgatggccgtaagaggttaagcaaattagtgacctacgaagttctaagaaaagtcgaaatgttcattttgtaataaagtgattttcatatgaaaattccttcgaatgtctttttctaaacataaattaagtaaaatattcatcacatgaagaagaatagaaaggtgaaaactttggaatggtttatctttagcatcccacacgctctctatcctttgcttttaactgaaacccaaggttgatttctcctttttatacaccctatattcattccaaaaagaagaataaaattttaataaaggttaaatcacaaatattaaaaagtaggaacaaagaaaaagatgaaaagtgagagtgagaaaaaggaaaaaaagaggaacaaaacaaagtttgcttattttagcttgtatgactctctttcacatgattatcacttttctcttctccctatgttttttttccttgaattataccttaatgattaaaaacccttaccacatgttttttgaataatctgtttcctcagagtgatgttcaaatcaagtccaacataaactctgcaactgctacagtgaatatctcaatgaacgatagcgaccaatgtgaattactcgagtacaattaataactgattccaaagtctcatatatatatatatacggtataaaccagtgtttgaaccaatccatttattactaaatactgctgaattgaaaatctaaaatattaataatgtatgaaataattcaattgatttattattatggtcatttaccgaaacaaatattatgtattacacgtgttttatattatttacttcaacacgttataattgaaattttaatttctcattaaaaaactacctaatataaaaataaatataaataaaaagtaaaaaatagagtgaagaaagtctctcaagtgagaaactatgagaaacctacgaagacacttgtttattctccattgatcaaattttattttataagtaaaatctatttatataactaatatttattaaaatactattttttttttgagaaatccaaagagtatctcactgatggaaatgcttttatagaatatagacgattaaaaaaaaaattgtttgtttggtgtcacatttgacaaaatgcatgcaaaacaatcaaactatatacaaatgaagtttacattcgaaacttcaaattaattagtagaaatttgtatcatgttcataaaaccaaatttaatagcatgtcatacaaaaaggattgaaaccttctaattacagccaatattgttgttctttgtcaaaaggacaatcaaaatatttaaagaaaaaagtccaaacccaatcaaatgcctaattttaaacaatagtaatttagctatattgatttacaaaaaagtatgaagaaaccaataatcacatcactcactacatggaataaaagagaggttcattgaataacaaaatttgaatgcttcaatatttgattgactctaaaatattgtcgaaaagttatttgaaggatacctgcaaatttattactagagattaaaataagggatgtgttcagtttaacccatatattaaatcatcgtgacataatggttagtagtgccgatgacttaggcatagagatcggcaagatacctccatagggaatagaaatctccataagaaaacgacatttgatcttaattttcttgaaattcacaaagatgtttctatagctgattttcattttgattaatcaaagcaatattactataagcattctacattaatgacaaattattaaactattactattagattcttgattttgggtagggttcccaacaaacccaaaaaccggtgtacttttaatatcgaaccatatatgcatgtttgatagttcatgttattttatgaaccatgtttaaatgaactttagagagacataaaccatgtttaatagtattgattttattttaaaattggaatcaaatttattttttaaataatgtcgcgagtcttatatataaataaaagattgtagctgcactaattatttagtctgttatgtggtaagtagagagagcttagaaatctcacaacattatttagtctgttatgtggtaattatttagtctgttatgtggttttacttacaaaatcgttaggcgaaagcaaatagagagagcttagaaatctcacaacattaaatgtggcagaacctccctcacttttaaaattatgaaacattaatggcagcagcaaccattacggagaatcaaattcttacaaaaataataaactttagtagtgcatgtgaaattgcgaatatgtatatagagtcgtattacatgaatatataggtaagttaggtacggatttggctattgaatagtcaatgcggcaattagaactacggtctaataaaacacacacatgcttcgaggatgtatataactagatacttgtctagaaaagcacacattatttaagtctattaaccttgtggctcttgtatgatgataaatttttaaaatatagaaaataaatctatacatacatataaatataatttctacatttgaatacaaaacaataaaaaatttataggagaccttggatatcaatccaactgtaataagtatgtaaccatcccgtcgaaatctttaacaaaacattaagctggagacgaacttaaaatggtgatctcaaacaccatgaccaacaaaacataggttatgacttatgagaaatacgatagatgaatcacctttctaaaagattatgtagggttggttttgagcaaagttagtgaaacatttgttttgagcgtccaaaatattctaaaatctacatcatcaaattatttgcaatcaggcttccaaattaattaattctatagtaaaaagcttcaaattttccaaatcattggaaataacgtcaactgtttttacatttgcccccaaaatttcagagccgtcctgcaattatggaagacaaaccacaatctatgtcacatagaacttaccatacatcaaattatgtatgcacattaggttttagtttataagttaaaccaccaatgctcaacttttgaccttcttggagcttcaatccttttctgaagcaatttgacccctttcatttacacaggaaactcagtatggagacaggaatgtttctaacatcgaacatccaaaatcacactttaatattctctacatgctagaagaccataattttcatattatttgatttctagtttttctttttttttctttcaaataactaggacaccacacatcttgggctttgtcacagttatgtcacaagatgtggtgtgtcctatatatcaacagagcattcaagtgagagccctctatcaaaatttgtttggtgcttagatcaagggttgttattgatgtatgaatgaactcaaggaattaattaagttaatgaataaatatgattctagtgaattctatgacaagagttcccgacgtgataagtgcttcacatcgaagctcgaacattttaaaacttacggtgatgacaattgacaatatcaaacaaaccattatagtttgggaagtataattttaaatattcaatagtcaatataccatcatttcactatttaagcatatttaggatatttcaatcacaacattcgttaattcattttatacttatattttggtggattgtgaaaaagcaaatagcttttaaataaaatttcgatatataagtaccactaccactacgaaccattcaaattttcatattttcaaatatttgaatatggaataataaaacaaacatacactatttttattttctaacttcaactctcgactgttcatatcaaattattccaattcattagctgtaattagattaaatattgaaaaaaacaatttatattcaacgtttccaatacattgatctttttttcgcaagttcacatgataaatatcagttttttgaattttctaacaacgtacgttgatatacacaaagattttagccatgtagatttgaaaatatgattaccaacaaataaagtagactatcatagataattataaaaagtttgattggtaagagttacgaaaactatttttcttttcttttcaaatataaaccaggtaacttagagtgtgtttactaagaatcatttaaagaaatatttttatcaacattttttggtacttataaaacaataatacaactctgatatcttctatatacaaccttctatttgtttaacaagtttaactgtttaagactacctcaaccactatgccacatatgtatgtaaatatattttattttttcttcgaataaaggaattatcaagatggttgttaggtaatactatcttatacaaaataaaataaaataattgatttcattctttggtgtgatcatacctcacaaaaaaaaaacattctggtaatgttctttgaatttcaacctttatagtacattcaacaaaagattttgttcccattgaatggtggctcttttcaggtggaatattatttttctttaattttatttatacaattataaatgtgcattttgaattttggtatccatttaataatattttaagtaaatgagaatatcttttcccaaacattattctttgattaggttaatctgtctacatcatgatacatatacctctcttcttcccgcataattgtttagtaacttaacttttgtttcacatcaacacttttctcacaatattttttcacaaaggacttgtgataaaaggtttaaagaaaaccaacttataaaaacaaaacataattattacctagatgaaaaaaaaagttaggcatcgctatcattttccccccaagaaaattataatctacacaactttaacataatattgaagtgcaaatattcaattcactactgataaaacaaactacactacacaggtttttttccaattagtaaaaacaattcagatatcattttcctactttcgaaaataagaattatttaatttcacatattaaaattatttaactaattttaattttaatttagttcgtaggaaaatcataggtaccaaaatagttgtagaaaattagtaggagagatttggtaggataatagtagaaaatattctcttatgaatcttttggtaagaacatggtgaaaaaatacctttcatttttctacaaaaatttttacgagattttctacgaaaagttttagtaggagattttctacgaaatttctatcaatattgatttcctaagaaatattttttataaattattttcgtagaaaaacggtagaaaaatatgttttctatgaattttatacgattttggccgtagaaaaacttgtttttttaataaaagatgtttaagatattttagtagagatatctcatgatatttgcagctataaaggtaaacgtaagtgataaaattttgaaacaaaaaaattacaaaattgaaataattaagttaacaaatatatatagtaaaaatgtattagtttctaataattattatgtaattttattatggtagttttctatgtaaagtcaaaccattaattttttgaaatcattgttgatttggaaaaccaaatggaagaaaataattagaaaacaagttagtcaaaaattacaaatatgtaatgttatacatgaattgttaaaacataatgtattattataacttataacttataagttatatatagagttaccatcaggaatttctttcttacaacacgttatcgatttttttgttctttgtttatgttttgatatataatagtgattactaggatcaattatgggatcgtcacaaaaaactttgtgtcattgtctcccatatcatttttcaatattctcataggattaggtacttttttctcatttgaatgaccattttaccccttttctctctcttttgtctccattttcactattgttacagataagatgcaacactccaagcaagccatgatcttcattttcctttaaagaaatcaatagtgcaatttgtcgttggtttgtatctggattcgaatttgattttgcaattagggttcttatgaaattaagatcaacttttaagtgtaatttccaaaataatcccaaattaattgttacgagagataagagtttgggtgagaaagaaaaggccgtctctgttgataagatgttgtcatctttaagggattcaaataactccttggatcaagtttatccaagtaactccctatccaaagttctcaaaataatttagattcttaattaaaattcataattgattcaatatatgtctatgattgaagcatttgggttccttatattctcggtagggtttagattttactcatcaaaacgaatttaattgggatttattgggtttaattattttgtttgggttccttttgtactatccttacggtatagattttattattattgggtgtgtgataaaaaacaaaaaaaaataaagacgaaactgaaaatttctgggaaaattaagaagagaaagaagcaaagaagaagtaagaagaagaaagaagaagaggaaaatcgagagcaaaaccgttatttcttacaggagaatgtgtccaactccattaacccaacaaagtgctatttttagagtttttgaacttaaatgtacctaaatatgtaaaagccttgcggttactatccacacataaaataaaaacaccatgggattgtaagttttctattccaaattaatgatttagtaataacatatgcacgtatacctttaaaaaaaatgcatatatactttattggtgattacaagatattattctaagatcaatattattcctcacatatgaaaattctaaacgatgaatttcttttttattagtgtgtcaaaagtacaaatttagtggacgattgaattgattctcttccaaatattgatgacattagtaacttagttaaattaagagggaaaaaatatcatgacaacgagcatattacctatttgtaatgactccgtttaataaatcaaattgttttgttgaaaaaaaaaaaccctctttgtttcacaagaattcaattttctaattccacaacgaaaactcatcacatcaaaaaaaatttcattccaattttatcaccatgtatatacgaaatcaaacatatatgctggttttggaaagttagtacgaaaaaggtatcatctaacgtaagtgaattatgctggttgtattaatcttttatcaaatttattatttacgttttttttcatgttactttttggagccataaatatatgtggatttcaaagtggaaaatgcgttgttactcgaatgtttcaaaggtaaattatgcttttaacaaaatagattttttttttaaaaggggaaacaaaatgaatctttccagtgactttgagcaaagacaggtttttttcttcttctaattgccctacaaaatctgttcaaagactactaatcactcactccactcatataaatatgatattagcaaaaacgagttaatttaaatagtatacatgcataattgacaaaaaccattaacattgctgaattcttcttcttcttaaattttgttctatcgtctttatatattctttgcccatatgtaaatataataaacaagtagtcgttggttaaactccgttaaatattcagatattgtctaatattttttggaactattaagtcttaatgaaaacagtgtataatatttcgacaaacaataaaatccattaaaaaaaaaactctataaatgattgtttacattttttttgtatatataaatgctgtagaagagtccatgtatttaggattacatgtctataaaatcggatttctattatttttaccgctgcacgacaaaagtaaaattaagtgcataaataaaaattaagtgaaaagtccaactctccaaatccgtctctaaataaaaatcttgagaaaggtccatgcatcatgttaaagaataaaacatgtctaaattataaatgaaatctagttttatccggtttggtttgattgaattgatgtgtttattattctctctatctcatatcaattgatgtttaaggttgttacacataaactatttttttttgtttttaaaattaaaacatcatttataatttattttaaaacattttaactagtagaaaaacaatctaccaaatgcaaatgatcaattttttggaaatgcaaatgatcaattttttggaaatgcaaatgatcaatctaccaaatgcaaatgatcaatgtaagttccttcttcttcttttcatctaatatcatcaaatacttaaaaacctattaaaactcaagtaatataaaaatatacaattaaacacatctccctgaagtccaattagtgtcagtaaaaaactttcaaagttagttgttttgcttatagacccattaaacaactttctgtttctatttgggggtataaaacaagtttaagtgtaagccctagtaaaaaggaagatccaccaaaaatggaggaaccaaagaacaagcccttgcctttggggttgaatattatcttacttcccaaaatctgaaatttatttggtcacatttcttgatcttttgatgagataactacatctactacaaagaagtttccttttgtgtgtttctcaaagttagacataagaaaacgtgtagatcaagcaagtgactatgagtcacaaagtctccaaaaagttagacgaggagcaaatcaatgagctccgggagattttccggtcatttgatcggaacaaagacggaagcttaactcagctcgagctcggatcacttctccgagcactaggggttaaaccaagtccagaccaattcgaaacgctaatagacaaagccgacactaaaagcaacggactcgtagagttcccggagttcgtagctttggtctctccggagcttctttcgccggcgaagaggacaactccttacacggaggagcagcttctccgattgtttaggatattcgacacggatggcaacgggtttatcactgcggcggaattggctcactctatggctaagcttggccacgccttgacggtggcggaattgacggggatgataaaggaggcggatagcgatggcgatggccggattaacttccaggagttcgcaaaggctattaactctgctgcatttgatgatatatggggttgagtctttttcactggactcttccttaattttcccttaacttttttttagttactatgtttagttttcactattctacaagaaattatgtactcaaattcaaaataattacttctcaagtcgaaattcgggttctttttgttcattttagattcttgataacagttttggttattgatctcttacttgtggcgatttcatatgttatactagtaatgataatgatgtatagtaatgatctctcaaagtatatgaaactttattcaagcgttagaaagaaaaagacattgtcatgtttactacatagttgcttcaggatctatcaacaatcacattaatttctgcaattaaaagttaaaaaaagaaaagagagaggctcaattatgtcagagaaagatgggacttagctgcatcatctttcatctttgtgccatccactgcaaaatgtctttcctgactacaccattgaacccgccacctgtaacatagctcggttgaatcagacttgctgctagaccgccactgtagtaatgtctgtactgagtcgtagttccattgggtctcggcggttggatcatcatagagacagacgggaatggcttgtgccggaagtgtttcaacgaggtaaacaaatgcctatcggattcacggttttgtggagtctgcgtcgtgttcgtgtgcgatttgggacgggacaattccgttagtctctttgccttgtccatgttggaattgctgttgtgtggtagttctggccgagtacggatctgagctgctggtttcatcttatcgagccaacgaagaatccaatttccgagattcctaccaacttctatgtctctttcttgtatgttcttgtgaaccgaaatcgccacatcgaagattttacgagtcctcctgaaaacaaatcaaaaagaatgcacaagagaaagagaagcatagtcaatgcataaccctaaatgaatgaatctaagcttctgtcaaatctcacaaaacacaatcatgatactaattttctaatcacaacgattcgaaatcatcaaacacaacactagaatcaacataagcttttgttcttgattctaattcctaaaaatcaatcacatcaaaactgctacaatttctaaagatgaatcgatttcaagtctcattgattggtttgagtaaacgattcgaaaacctaaaccgaatcagcaatttcaacaacagagcgacgcaatttcacattctggaaaaaccaaatttctcaaatgcgatttcgtatccaacgacatatttatcagaatcgaaacgatctcgattagaaatctaaccgatgaagaaattgacggattttgggatgtttcggagtaacaagccgacgctggatcttcagagcgagcctataagtccgtctcagtcccaagaagtaagctgttcctagagttatctcccaaaacaccatcttctttcttcttcttcttcttcttcttcggctacacgattatcgcatgatcgccattttcgtcagtcactgaccttttggctggttaacggtgatgcgatcctcaccgtctatttccttgttcgaagaagtcattgtgggccgtctgttggcccactttaacggagtagatatatgggccgtctgttttttcataattttgtaaagtttcccaaacaatatctttgttttgatgatacaactttattttgtgaagaaaaatgtagaaaatcataaactaataacataataattaaatttattaataatcacagattttttctataaattaactcaaatttaaatttacataataaattaacataataattaaatttatttaaatgtttctaatattctaataacaaagcttatgaaagtctcattaaaaagatagtccagagttaaaatttacatggattgttggaactaataaggagataactacggaaactaatgaaacataacctaaataaaagatcaacacttataatctaggagaataatttttcaaaacataagattaattaactaaatcaaaccgttcgtttgattttttttttcacttgaaaaaagcagaggccaacgagtgttataattttttttataaattactagtgattgttacttcgttttcacaaatcattctcttaacatgacagacaaatctagccttggatactatttatgttggccttgtacttgtctgataaatttctgtgtatcactgttatttctcatctgctttgcgtcattcattgcttggatcatggttagatccaacgatgtgaaattccaagtctacgacgctgagctgacacatttcgatctcgaaagcaacaataacctccagtacagtctctctttgaatctctccatccgaaactcgaagagtagtatcggaatccattacgataggtttgaagcaaccgtttactacatgaatcagcggttaggagctgttcccatgccgttgttctaccttggaagcaagaacacgatgcttctcagagcattgtttgaaggccaaactctagttttactaaagggtaatgaacgcaaaaagtttgaagatgatcagaagactggtgtttatagaattgacgtgaagctgagtattaattttagggttatggttttgcatttagtcacgtggccgatgaaaccagttgttcgttgtcatcttaagataccattagcattaggttcctctaactcaaccggagggtttgatttccagtcaaccagatgccacgttggcttctgaagttttaaatatttttaagtatttaatctacttttgagtaaatttgagtaaaagatattcaaaatatttagatattttgtgtattttcgagtagtttggataaatttggttataaaaattgattttggggaatttcgggtaattcgaatccgaaatatccgacccgaatccgatttgaacccaaaattttgcaatacccaactatggcgacataaattttgcaatacccaactatggcgacagaaagatttttgccttttcttcaaaatgcctaaagtaagtgctattctatgttggtgtaattatctattgattgatcaggcacaagaaaatgttacttattggtcaactggtaaaagatacttctgcaaatcttagggaagctagtgaaaccgatcatcgtcgagatgttgctgtaagtgtgtgtttctcaataggaataacttagaaagatgtgagatttgttttcatgaaaacatcacattctgtgaaatttatttactattgatggttctcttttatgaattggtatttgctgatgcagcaaagtaagaagattgcagatgctaaacttgcaaaggattttgaagcagcgttgaaagagtttcagaaagcacagcatattacagttgaaagagaaacttcttatattccttttgatccaaaaggtagcttttcttcaaggtatgaaaaacctagttacggttacttcatcagtagagataaccactatgttctttgttacatgattgctatacttgtgtggttggaaacaaactggttcaagcacataagttgttgactttgagtccaattaaactatagttttatcttgacttgattttactttgatgcctcttttttcttatataccagtgaggtagacattggctatgatagatcacaagagcagcgtgtcctcatggaatctagaaggtaagtaagttctatatatgccgcatatctcggtaaataactaccaccttcatactggtgaactctctctttcttcatttgtaggcaagaaattgtgttgcttgacaacgaaatttccttaaacgaagcacggatagaggcaagggaacaggggatacaggaagttaagcatcaaatcagtgaagtaatggagatgttcaaagatctggcggtgatggtagaccatcaaggaacgatcggtaaatctctgaaacgaaaaaagcaacagtcaagacctagaataaaaaaaacagtcaagacctagaatgctttgagtccaattctcaatcctctttactttttatttttttattttttatttttttatttttttattattattattcttttaatactagtaggttcatgaccgaattctataatccctcttaggcccgaaagtacagcatgtaatattagtttcgtcctaacgtcgaaccgacgacctctaagcttcacctaatatctttatcaattgagctaacgacacttgagttaaattttattttattgcagatgatatagatgagaagatcgacaatttacgttcagcagcagctcagggaaagtcccatctcgtgaaagcatccaatacacaaggatcaaactcatccctggtaagaaaataaaaagaataatctgttatttggttagttgttttcatgttccttacttctctttttctttctttctggtgatttatgcagatgtgtttgtgttggaagtgagaatcctagattaaatcctacaagaagaaaagcttggtgtgaagaagaagatgaagaacaaaggaagaagcaacagaagaagaagacgatgtcggagaagagacgtcgtgaagagaagaaagtcaacaaaccaaatgggtttgtgttttgtgtgttgggccataagtgatgagataaggcccatacgaataagtgttttgttgttgtctagttaaggtccaacaagatgagtgttgtgttgttagtctaagatagagtcatgttgtgtaagagtgaattaaggagttgagagttccaacatagtagagtggctgatgtaagtcttaggacaatgatgtggtctagactctaagtgtgtagtgtagcaagtggagcaaaaccactatatgtatgagtgtctttatgttgtgtaagaacatccaagtaattaacaatgtagtctttggaggaaaacgcttttgtgtctctctagaacaaagaacaaaatctgtgtgagagacaagagagcaagagatctaactaaagtggttagatatgtgagaattacaacagtttgctaatggtgatatttgggattattctcctcgtcattctcgtagtaatcgcagagattgtgatggcaagaaacacaagacattgaagagaagttcggtttttggacatagaagtctgagtgtgcgaagccatacttgttgtgtctgtatattcacttctatcataatcggccttccgtcgccgactctttgttggtacggtttggtttggttttgaccaaaattgtattcgtttacgttaggtccagagaaaaataaccaaagactagtgacaagaattctcaaaaattgacaaggcactttttaagatttaaggttttggatttattgaaggttcaaagtttcgctttagttttgttgtctttcggaaaaatgatattttaatggtatttttggaaatagtgatggtatttttgagaaaagagcttgtttttgtggtattattgagaatctcattatattaaaatatatacatcatctaacatagtagtatattctttatatatttttgtggtattaatgttttaaaaagtatgtttatgatttaaattataaagtcaacaaaaatcatgtaaaatgtaaaagttccattttaattatatttgaaatattaatgtccctataaatttatagacatattctttatatattttcttgttgttttctataaataaggattcctatcctaatattcatacaatagatatccataaataagactttatctattttaattgatgtactaccaaaataagcaaaaggtaataatctcatttatttattactatatataagatatctttacatatacatatgtatgtgtaagatctagatagtgagagatcagaacaagagagagattaaaaaaaaaaatggagaagcaaatattttgtcaattcttagtcgtaatgatgttattgtcatcatctcaaattcagggagatttgaggaaaggatgttatgatttagggatcacagttttgatgggttgtccagattctattgacaagaagcttccagctcctccgacaccatccgaaggttgttgcactcttgtccgaaccatcggaatgaaatgtgtatgtgaaatcgtcaacaagaaaatcgaagacaccattgatatgcaaaagctcgtcaatgtcgccgcagcttgtggtcgtccccttgctcctggttcacaatgcggaagtgagtcttgtttattttattttttcatttatccattaattaggaatctaagacattttaaccatgcaaaagatactttttaaccctttagaagtatatttataagtatgtaattcaatcaatagttcatcatagtttctttttgtttagggttactaaatagttacataatataaacattcctacgaacgttcaagtttaattttttattcgttcatagagatgtttatgctctacttgtgattcttctatttccaggttaccgagttcctggtgcatgatgggatcaatgcgaatatgcaataacttagatgtcaatttctttgttcacaaaataagagcatatagatgcaagagtaatatgataaccgtcctattttctacatgattgttggcgttgcttagtcaattagtcattttttttttgaccggcaaatcaattatattaatatcatattcaaagttacaatatcatagtcaattagtcattaattgttaaaatatgttgccaaaaacatatgttcgcaaatcaaaagaaattttattattttttttaaaaaccatacgttacaaacttacaattggcgatgcagtaacggttataaaatctgaaataaattggcaatatcccacaagttgcatttaatttttagttctacttactagaccttcgtaaaccgagttatggagtaggaatggataggaattatctcgtgatcctccctatacggttcgtttgagacaccgttacttttggttaaaaagactttgattgtaaaagatgtgaccgttactttaaatattaataacagtctgatatgctgtagaactctcacaatgttactaaaactttgatatgctatagaactctgactgttttttaatgttagaatatttattttttacgaataatgagtatgatcaaattcaaaatcaacttgtagtataatgacgaaaaatcactgaaaatactaaactgcatctttgattaaacttgagtttattaataattattcaaataatacgaaaacatataataaattgttcataaagaactgaatatataaaattatcttaaaatgaatatatatatatatatagatagatatatacatatagttttccctccatctaggctatccatataaacatccacattagcgtccacctaagcgtccatttatgtattaaaatatatttaaagaacaaaaaagtaaccttcaaaagaaaattaaattaaatttatatacaactatgaaatctctcccaccatattatatagagcaatgtttatggctaatatttttttatgtctaagtttgttacaaatacaatataaattaggtagtaatagcaacacattcatataatacaaatattatatatataaaagttggtcatctctcttcatatgaatgacacattatcacacaagaaaataacatgtgtcattttatattaattaaataaaaaaattaacaaaactatttgaagaaaaatcaaaagtcttttgttgtgttaaatcctctattaatctcattcttatataatttttctaaaaatatttaataaataaaaaaacataataatatatcaagtacaactttcattctactcaatttgttttattaaattttgtttatcaatagtcattacaccagaatgactaataatttacttatgttgtagatttacttttgttgttgtttataatgtttgctacctaacctcataataatttcgtaattttacttgaatattttttaattattacgttttgtaaatttgatttatcatatgaccttctttctttttatttttgtgcgttttaataatttggtaacattgacatataatttgtttaacgtaatggtctttcgagaagttaaaaataccaaaaaacaaacaaacacgagactctatatggctatatgtaagggatgagatctaaagtgttgacttaaattactagtatattaggatagtgtacaagatgacgaaaaaatatatgaaataaagaattgtttgttacaattaagttagacaagtttgaaataacataagtaacataactacatacattgtatcaatatatcatatattgttatcgtatgtgtttatgataatgaaaacttaagataatagcctaataggtatataaatattcatattatagtaaaagtgtaaaactgatatttcgagttataaaaaaatttcatcataaacaattataattatataaaatagatatgaatttattaattacacaataacacaaacataaaataaacatcaaaatcaacaaaaaaaactatagtcataatttttccgacaattttaaaaacaaaaactcatgcgtagcatgggtgttgatatagtaaagttaaaaattaattacagatcaaggctaggatgcaacacttcacctctttgctatatatcgatttgatactctcacttatatcttgctttggttagttttccaaacaatcatctattgaaaaatacaaaataatagaagacataacgctatataacatctaactagttatctcatacgtaatattgaaaaattgatactggtttttattatttttgtataaaaacatattattcttatccatcaatttagcatttcatataattattgaatttaaaaaataattaaaaatcattcatatatactcatgtttattagaaacataatagaaaaagtaagaatttaaaatcttattatataaagtacggttttgaaagttactaactcacgagatcatgacacgtgtcaggtctatcattgagatgttgacatatgtcaaaaaaaattctttaaaaagaaaaaataaacatatttacatatattaatttatatttctatatctaaaaaatttaacttataattttcttcattaaaaaagaaaactaacaataagatggagtatatagaattaaattgtatttatattgcaaaattggattgtatttgaattgtatacaatcaaattaaattgtattatattatgataaatagatatttaaattgtattgtaatatcgaatttgtaagattgaaatttagtttaaggaaatactaaattaaatactgaaaaaatatgagttactatttaaaattcaaatatcatcaataagttggagtgtatagatttaaaaggcagtttattatgatgaaagagatacttaaaatgtatagtaaaattgaatatgtatgattaaaattttatttaattcaaaaattactaaattaaatattagaaaaatgtgtaaatcactatttaccattcaaattttaaatattatcgataaatatttgaataaatttatattttatacctacctatttaggcggaccttatctagtattgtatacaaatagagaacaagtagaagtgaaagagagataaggttttcgtagaagaaacctttagaagcgtttctcaacaagtagtgacagttgtcataacactattgattcagttaccaataacaattaatattttttataattaaaatattacttttttttttttgaaaacttcccttgtttttgtcaatggactattaaaacactgggaaatttgcaaacaaaaaaactataatcattaacttactattctgacttgaaatataatattctttgtattatatgtaatattaccaaatttgtccttattgtctcaataccaccacctgccacactaccgccggccaccatcgactctggtcatcaccgccaccggccaccaccaacaccggccaccaacaccggccaccaccaccaccaactccactcaccaccaacatcggtaatcaccaacaccggccaccaccaccaattccggccaccaccgactccggccaccaccaccaccaccggccaccaccgactccgaccattatcaactccggccactaccaccgccggacaccaccaacaccgaccatcactaccgtcggccgtcaccgattccgaccaccaccgactccggccaccaccactgccggtcaccaccatctccagcctcttccactctatcaaatagatcaatttagtcaatttactaccctctattattagtttctacattttaaaaatgatagtgttagtttcttaattagtttatcaaaaacaattcaccaaacattattgtcacattttgtttttcgaaaagtagccaaacaaaagtttattgtgagcatgagatgtttatatggtgtgtttcaattttataatattgtagccaaacaaaaaaccatcttattatcttacccataaaaccccggaaattaatggaggtctacacacctaaatttcgaaaaataaatttgcatttttaaggcgcatatgagatgtttatggcaaaagttcaatttcagaagataatagccagacgagaaaccgtgttagagaatttcctctttatttaaccaatgagaaccccgaacaattaatactggtctacaaaaggctcctagtttttttattaactcgtacttttaaatgcttagacgagatatttatggcaactcaaatctcatcgtatcattttgtaaagagtaactatgctatgtaaagttacccctaaaaagctaggtccagcgtccacagaagttctctgaattttatttaatgatttgatttcttttgatttgtaaaattatttgaaaatgtgatgttatcgttcttaattgtatttaatattacatgtggtgaacctataagtaatatataaacgagagtacgaggaaacatttcccttgcaatttgttttgaaaagtttcttacaaaatggcattttggttaagtttgatatttttctgcttttgcacatttgcatcctcaactccaccggatgatccggtcaagtgtgagtcaggaaacaacatgtgcactgtgacgaactcgtacggagccttccccgaccgttctatatgtgaagcggcaaaggtggagtaccccaagaccgaggctgagttagtctctatagtggctgcagccactagagccggccaaaaagtgcgggttgtgactcggtacgttcacagcatcccaaagctcgtttgtactgatggaaaggacggtgttctcataagcaccaagtttttaaacaacgtggtgggaaccaatcccgaagccaagactttgacagttgagagcggtgtgacgttaaggcagcttatcggagaagcggctgaattggagctggctttgccacacgcaccatattggtggggactcacggttggaggattgatggggacaggtgctcatggaagttcgttgtggggtaaaggaagtgcggttcatgattatgtgagtgagataagaatggtgagtcccggtttggcttctgatgggtatgttaaggttcgggttcttagcgagacaatagatcctgatgaatttcgtgcagccaaagtttctctaggcgttctaggtgttatctctcaagtaactttccagttgcaaccaatgttcaagagatcgttaacctttgttatgcaaaacgattcggatttcggagatcaagccgtgactttcggggaaaaacatgagtttgcagatttcttatggttaccaagccaaggcaaagtggtgtatcgaatggacgaccgagttccggtcaacacttcaggcaatggcttgttcgactttttcccattccgtccacaactctctgtagcgttagccatcattagatccttaggtaaatttattctttgtttctcaagataactaatacaaaatatatttgatcatttgcatagtttttttggtaaaaaatatttgatttgcatagttataatgtttcttataaacaactgcttcatgatatgaagaggagagtgaagagtcatccggagatgcaaacgacaagtgtgcgagagcagagcaaataacgtcgtttttgttttccatctcctacggtgtgactaacaatggtaaaaatattcgttcacttacttatgcatctttctattgtttccatatgtatgagactttacaactttctatcacatattcatttgtaatttccacgggcaggtatggaattcacaggctatccggtgatcggaaagcaaaaccatatgatgtcgtcgggtacatgtctagacagccatcaggacggactgatcacgtcttgtccttgggatccacggataaaaggccaattctttcaccaaacagcattcagtatccctctcacacgtgtcaaaggtttcatcaacgacatcaaagcactcgtaaagattgaaccgaaatctctctgcgcccttgaacgcagcaatggtatcctcatccgttatgtgacatcctctcctgcttttcttgggaaagaagaaaaagctttagattttgacctaacttactaccgaagcaaagatgatcccttagcaccacgtctctacgaggatttcatcgaagagatcgaacaaatggcgatatttaaatacaatgcattgccacattgggggaagaataggaacctagcgtttgatggcgtgattagaaagtacaagaacgcaaacacgtttttgaaagtaaaagagagatttgatcctttagggttgttttcgacggaatggaccaaccaaattctaggtttaaaaggaaacgtgacgattgtgaaagaaggatgtgccttggaaggactttgtgtttgttcggatgatgctcattgtgctcccaagaaaggttatttgtgtcgaccaggtaaagtttatacaaaggctagagtttgtactcatgtaaaatcagtaaatggctatgacgatcataccaaatttaatttgatgtttaatcgtatatgagaaaagtgaaaacagaacattttacagaacaacgtcttttgttcattatgacaagcttaacaagttttatggtcggtcacacgggcctttgttgttgggctttagccggtttatttggttcaattcggtttacatggttagtcctcgaataaaataatttcggtttaagatttgttacggctcctccgtcaatgtatcgtcgttgatcccaaatttcttctgaacaatttcgattttgaattcgcgctgagtgatgaacggcgcttctccggctcattcattggtttcgacgaccgccgtagctggtggaggtggaagcagtggcgccgccgctggtctagacgatttccattttccaccggatattccctcaatgcaagagcgaaaagacgaagctatgcgtggtcagttcttactcttttcccttttcgtttcatgatttcgaatcttagggtttcaaattagaggttttctataagattcggtaatcaaatttctcagtgatcagagatttgagtatcacatctccaaatttagggtttttgatactatctgaaaatcccaattttgtttccctgagttttttttatttggttgattgatttgttgatttaacagtaacttctttagataattagtattgctaattaattactaataaatgattaaggacatgagtagattaagaaaaagcttgcttcagtttcaagtgtttgtttgagatatgttatgtaataggtttggtttttgttttgatggtgtagttttgaaagctgatttgatgactgaacttgacaaagaggttaagtctttggaagaagatagttggatgttcgaaggtcctcgttctcgaatccatcttatatccagaagaggttagttttcttcttcttcaatcctatttttctgtatgtcacaaagctgttttcatgtgtacgtttatatcaatcttgaataagttttaacagcagtaatgatcccaatggttcaaaatttcatgtatttgccattctctagattaggcaagtcggtatggtgagaacatttgatcgaatctgcgggtttgtgtgtgtgttttcggtgtttcgtcatcactaagacactctactgaagtatatttgtttctgattaggtaattttctaaagaaaggaggtgaagtgaagctatggtgaaattaagctttgttcagcttcctagatgatcggattcattcaagtaagaaatatcagaaatggtcgtatacgctttgtttcgtgttcttcacaaatgtcactaaaacgttaactttatattttcccattgtaagggacaaaatagtatttctatggtgttaatatacaagtgaggaaatcattattcggctaatgagtctattactcgaaaatgaaatttcaatattctcaagaatatagataatcaactttcatcaaagacaatttttaagtttgaataattaatttaaaatccagatatttttcttgattttttgtctaacttggtactttttattagttcctttaaaaaaattaggttattatcatcttcccaaaacaaagattctactatatgtacggaaaaagaagtaccaaaaggtcattattaaatcccaaaacttgtttacctatttttatcaggaatcaattgatcaccactacctaaaaaccacaaattgcttaagtttgttaacactgattgacaagtgtcatacaagtaatcccatttgccacgtgtcatgtcctttttatgtaacctaggacttgaaaaccacaagtgcaagcaaataacctagatgacacttgttagagaacgacgtcaccaagaacctctcacactctctattccaccacttatttaccacggcaccgccttctccgtggcatcttcttcatcgtcaagccctgaaacatcgccgattcaaaccttaaacgatctcgagaaactctccgttttaggacaaggaagcggtgggacagtctacaaaacccgtcaccggagaaccaaaacgctttacgccttaaaagtcctccggccaaatctcaacaccacggtcaccgtcgaagccgacatcctcaagcgaatcgaatcgagttttatcattaaatgctatgccgtttttgttagtttatacgatctctgtttcgtgatggagcttatggagaaaggatctctccatgacgcgttacttgctcaacaagttttctccgagccaatggtatcgagtctcgctaacagaatcctccaagggttacgttatctgcaaaaaatgggaatagttcatggagacataaagccttcaaatctccttattaataagaaaggagaggtcaagattgcggattttggagcaagtaggatagtagccggaggagactatggatcgaatgggacatgtgcttatatgagtcctgaacgtgtagatctagagaaatggggttttggaggagaagttggatttgcaggagatgtgtggtcattaggagttgtggttcttgagtgttacattggaagatatccattgaccaaagttggggataaaccggattgggcgacattattttgtgcaatttgctgcaatgagaaggtggatattccagtgagttgttcgttggagtttagagattttgttgggagatgtttggagaaggattggaggaagagagacactgtggaagagcttcttcgtcattcttttgtgaaaaacagatagcattagtctcggtttggttttcagggttgagaaaagcaagtcataaactaaggaaccgaactttagtttcagtttgatccggtttaatttgaatttttgggttcggttttcctttgaaattctttggttcggtttagtttgaactttttggtttgattcgagttcagttttgaaatttttattacttttgactaggcttaaaaatttaataacttttttaaaaatacttgatttattttttcttacaaattttctgtttacagtaaaacctatataaattaataatattgggacaaaaaaaatttattactttgaaaggtattaattaataaaattgtataaattttgttaattctaacaaaaaatttgatataaaaagtttttttttctttataatcaatagtatttctgaaacacaattacaagtagaaaacaattattaaatttaaaaaataaaaatagaaatttgatgttgtaaaatattagaattcaacactacaaaaaattaataaaaactgaagaaaaacataactagtcattttttacatatgatatttataatattatatatagatatatattggtaaatttatacaattattaatttatattattgatgagaccatttatttatataagattttcataaaaaaaatattattttactaatttatccgagttgtatcaatttttacattggtttcaaatcgggaccgaaataatttactaatttataaagattattaatttattgaatattaatttatagaggttttacggtatttgaaatagttcggtttagtttacactaaacatagactcggttcaatatgttttgtatgaaatttttggtattgtgaagttatgaattttagtttagtttggatttattcggcattcatgaaggattaataatgtcaaaaaaagagaacagatgaatagttatgttgacttaataagttcgcattgctcttcttcaagcaaaataagcgaaaagttcaaacaagagactgaaacatgacacagattctcatattgatagagaatttgtgtaaaattgagagttgtatgaagcagtaatgttaaaccactttgatacaagaaagaagaaataaaagatcagcgtatgaaaaatgaatatgctgctctcagggactgtgttacctcaaaagactttaaaaactcccaaaatcaaggattttgcctgagtgaaataaacataatataaataactaagcaattaaacttgaatagttagagtttgatagacaactactaaagttgatctttagttaccttgagagatctaaggtttcaggagagaggagacccatctgttgagtcagattatccatatgcttagttttgtcccatccattttgttcctgctctgtttcattgtccactggtgttgaatccatattatctggaaccgggcttgacatgagtaagcgttcgagtaaaccgtaatcaacagggtctatatcagaatccattggaaagtcgtcaatgtcgaaggacaaagaatcatcgatcaacagatctggatctagtaatggactagaacctcccaggtttggttccatgaaactctctggaggcttctctgaattattttccggtagcatatgagtgaagtcgggaagagttagatcatcaggtgaaggaatacagttctcggttgcttctgatgctgccgaaacattttcaggagttgtttcaattggtgatgatgactgtatctcagaagctgtaggcatttccttaagagttatacccgatacttggtttgatgaagtctccatctctgttccctcggtagtagacgtaccattacctagaaggaaaccatcatcgccggttttgtaaggttccatcttcataagctgtttaaacattgctttggcttgctcgtgcattggaggttgatacttcactatctgtccatcaggagtagcagaatcattattacggacaatgccgtctcgcttgaatctccgcttcttactggtatcactgatgcgcctattactctcgttttgctgattctgctgctgtaagaattgagatagaaaatgagggctttgtactgcctttgcaaggaatgacattaattgttgttgccgattctccatgccctggagacgctgaaccatcgtttgaagttggttatcagtggactgttgctgctgtcttaatctgacgagttcttgcataaggacgttcttatctcttttaagcctttcaacttcttcttcgagaccaaatttgccaacttcaacacatgcgctaacagatgagttctgtccattcgagtgctgagatcgctgatgtccctgtccctgtccatgggcaggttttcgcctagttattgattgtagcaagtgcttctgacctcttaaaaaaccttcattcgcaaattcccatctatctgggtcaaccttcctgaaaccctgtatcaagaaaagacacgcaaaatggaatgaaaatggattccaccaagaccaatgagaaagaattcatccgacagctttagaagtgcaaatctaaaaccttcaacacatagtcttttaactgccaactatccacagattgaaacagccatatacaggacgtaactgatcagttggcacatgcatcaagagcaattttaattcagaagtcaagtaaatgaccaatcatggtcaatttaatatatgaatcatgaaaactactttatttatgttcctattatgggtcttacctaccacccaaaccgaggaaaaaccaaaatatctaatagggataactgaaaactaagagggtgaaaagtatctatgatctaccagtgtaatctttatgtcaaagtctgcatggtataaactcataaagattgaattttgcttcaaatagtgcccaacatgtaagacatcatgtaccacacagacagtaactaaggaataactggcaaacaagaactgtcagcagaaaattcaagctcctttaagtgcattcaccatcttgcagcatcacgagcatcctgctctaaatattatgcagtacaagctccattcaccatgacctttagagcaaagcttatatagttatctacttatatacacaataaaatctccatccagcctatatgaataaaaagtatttaatctaagtgcaaccgtacagagcaaacctatggttcccgtaactgacatgccagataaagatttaaagtcacactaataacaatatagatattccaacactaaacacccatatatctacttaagatctagtttctattccaggcactcctgatcacattggccttttaaggttttcaaagacgtgagatatctccactaaaccttgactcatctacaacaaaatgatagattagtaaaacagaaagttgataaccttgcactcaggtcatgatcaacatgagacttgctctcttattccaaatttcttctttcttctcctttataatgaatgctgagaaaattcaggaaggtttattactatcttacgactattactaaacctgattacagagagtcaaacagacaacaaagacaaaaaaaaaagggtatacatctctattctcatccccctaagtttgtatgtacagtcagcttcatcaacgctctcacatatctatcatttcaaagccgtgaggttctaaactaaacaatcacaagatatcaagtattgcaaataaagtagtctctaaaaagcatactcatgaaactaactatcgattctaatggatacaaaactcctctgctcagaaacataaagcaaccatgggaacaacattaatggaacaaaatccataaaatcgagaaatgatgaagtaaaaaaaaaaggcgaagggaaagggaagaagattacataggtattaagctgtctaacgaagctggagaaattattatgcttaaagttcttaggaagaagatcgcgagcgaactccggtggtttccaaacgataaaactgttgttattagcactccaagagacaatcgaatctgtattgtgatcatcaaccatatcataggtcttgctcagaaacggaggaggcgcgtttgaacttagaatcgccgcaggctgaggttgaggagatggcttagtctccattgaatctcctccgccgtcgcttgtggttactttgctcacatccattcggatttttgattccaagtcaatatttgggaattttgagaaaattagggttttatatacgaaactggtgatttttacaataggtgagagagagagataacttttgattgaagatctagagaattctcagagaacattcacgagagatatgggcggagagagatatagatcagaagagagattttgaaatcgatggagaggacgaaagagagacgacgggagactcatgaacacttacgaaattacggaattagacatttcgctttttctcttaaaagcggatgatttattacgtgtcactatattattcgctattacgctctgttttttctttttgggctgactagcctgacacgagtatcgattttaattcgttaaaataataaattgaaattttattttgtcttacaatcttttcaaattccatcagagatttatgtattagtaactaacaaagttttttcaaatcttttaaaaataataataattaaatctacaaactattttgaataataataaaagtagatttttaaatcattagtttaataacactaaattttattaaaaaattttaacttcataattaaataatatatgatttgtaaattttacacaaatcacttaaaatactatattaaatacatcgtctaaaaaataaagtcatggttttatttcctctatgtggatctctactttcatatctgtattttatttcaattcatatttagattttgtactttatttatgagttctttagttatgaggttgagaagtttttgtttagttttaatgttttcctttattctaggttttttccatttgtatctatttttgtttacggaaaatatgtttgtttgtcggtttagcttatagaaatgtatttttttttgccggcatatgtattgtaataggaaaacggtctattttcccatgataactatgacatcatgccagatagagcccgaacaatgaccacaatccagatgtccacgaaaagatacttctcgatctatatctcccaaaatcgatagtttcatctatttccccatatatttgggtttaatcggtttgctgaccagaccctataaaatccactcaaaccgataccaaaccactttatatgtcaaaccttcttaaaaaaaaataaaaaaaataaaaaaaaacaaaattgttgtcggtcaaacggtctatttctccatgataactatgacatcatgccagatagagccctaagtatgaccacaatccagatgtccccgaaaagatacttctcgatttatatttcccaaaatcgatagttttcatctatttccccatatatttgggtttaatcggttttctgaccaaacccgataaaaatccattcaaactgataccaaatcactttatatgtcataccttcttaaaaaaaaaaaaaaaaaaaaaaaaaaaaaaaacaaaattgctgtcggtcttgtcttctccattcttcccatagaattccagattatgtttatttgaaaaaatagtttatctctctctttgattgttacgatgggtgttagatttactttgaatccacatacaaatttgtcgtaactaatgaagagatattcaacaaagcattttaaacgcattctaattgctaataacgttaacatcgacattgacctgaaaactggaatcgttgctaagaatatggctaagaaagagaagatcaaggtgagcttccgcatgaattttacaattcacaaaagaacaacccaattaaacaaaatcaacatctcaattattaaataagttttatccaattctattactgttctttcaattgctcatcttaaaatcaatctgggaattataaacaccagaaaacaatcaacacaatccatcaagtcgacaatggctgattcagtgttatcaatcttctacaaaatgaatcaagtgatttcaatgggtggaataatgtgggaaggtctcaattcgagtttaatcaaaatcgatgaagctttgcttaagcagcagatccgagcggagatgaggaataaaaagagagaaaaaaaaaagatataggaagaagaagtaaaaaaaggttatatttatgattaaaaaaaaaagaagaggaagaaaagtaatactgcatatgtaattagtaatttactttgtaatttcctaaattagagctaaatagctttacccgaaaaggaaacaacaaaatacaggaagtgttccttttttgtgtgttaccgtaacattataaaataacctcccattattttctcacaattactctactacacatcgaagagtttacaattctcagatcgaataatcaaaatctctctttgaagatgtcgataatgataacacaccgttacatggtcagaaacgtttatgccgttccgtttcatacaaaatacggatttggtttccattacttctcttgtctctttggtttacatgatgtaaagttggttcctttcttcggcttgaaacgtttttattacccacaaaaagttctgtataactcgaaaccttcaaattctaaaccggttaatgagaagccgattcaagaaccgagtcaagaaggagaattgtttggtggttcggttacaatgggtgctgctccgtcaccgagacacttgccaattccaactttttgcatgtcttctaagctaataaagacttgaatgagacagaactgtggacttttgtagtagttgctaattgtaatagatcctggccacaattagataattgtttcgttttttatttatttttctgctagtgttttatgctattgttacctttcgagtcgtttgttatcatcacttacgaaaactttaaagagtcaaaataaaatctaaagtatacgatgtatattggtaaacatgacagtttatataatacaacactaccactgctttgaatctccatcactctctgtggttgctgacatctcaatcctatctggacaagacttgtggttcaagtagtggatgagataatcaaaaatcaagatacgaagagaatctaggaaacctaagaacatttaggttacctttctttccgaaaaatgaaccaaacccatcaatgtttttatacctcaagcaaatgagaagacacgataatgaccaagtataataaatattgaaacctgaatcgaagaatgtatcaaacttatcaatgtttctttggactttaaaacaaacgacaacaacctctatgttgatctttgcagacatgcctttacccatctgtgtgctgcttgcagccctttggtccataatgctgagcagatttcttcaccactttcttacaaagataacagaaatgtgcttgacatgcccaacaaaacaagtgattgttgtttcccgcctacacaataacaaactccagaatcatctcatgaacctcaaaaacctataattctctgcctttgttaaaaccaaatttttttattttcttacctttccattgaactggcggcaattaggacataactgaccgcgctgtggaaactgaccgccttgtgcaaacagttgcgcttgaatctgtccaatgacttgtctctcattcatcatctcattccattcttggatcgcctcttgtgggaacagttcacattttccctcactttttcccaaaaaaaagacggagcttacttagttccaagatttatatacatatgtatctgttcttttatatatgtaacatcactaacctgaaatgttcataaccagtgatagcttcgttgcaacggtaacaaaagtattgaccacagttattgcataccattttgttacaacctccggttcttgagatggctattttgcacgacggacattgtttagcgcttttcattatcaccttcacactcataatctcattgatcatttctttctctttccgcctttgttcctctccaagacgagaagaatcttgacgctcctgtatagagatttacatgtaagaaagagtcaacggtttaacaaagagaagatcaaaggcacaataatgatacctgcaagatttgaagcctaagttccgggctcatgcaagccacacccacatgtctcttttccttacaaagtgtacagaaactgaagtagcatttgaagcataaagcaagctgttcctcgtcctctatgcaaggggtttcacatctaggacagtaagcaacgtcagtcatggattccagtgttttctgtaacataagagtttcccaccgttcatacgcttcatcgcccaacaatctcttcaatatccctggcggaacagtttctccacatttcgagtccggacacttgagcttgttaactgtgccttcagtgacatgtatgtctgtataggtcttcatacatttcaaacaaaagaaatgctggcatggtaacttaacaaagtcgatacctgtagagggtgtaaaacaactgtaaaccaacccacattactaaagaaaacagctatgaagaagaacaagatatacctgcagattcagagaagcatatgcagcactcatgcaagctctgaaggaagctatcatgacgtttctcatcgtcataactcctaatataaggaatatctgaatccggagaacgacttccagacacagcacgcttatctctggaacatgtaacaccataaggaccaagaacaatctcattatcaaaaccaagatgagaaatcgacgagttctgtagccaatctgtccactggtacaagacttcttgccctggctgttcactccataacgagtccagcttagagcagagacttgaaatcttatcaggattcatccactgaacacttattaagaaataaggcggtaagtggctcggataagcttttggtaataaacatttcaacacaatcggtggaaggtgttgcgccttgaaagagtacaagaaatcctctgactctttgcttgaatcagcttgtaagttaagctttgtagagatagtatattcactagtagcttcaacgtttacatgaacctgcacaaatcaatactattagaatatattgttatgtcacattaccgatacgaaacatgtcagtactaagcagcttatttctgacctgaaagtatcgcatatcgttataccgatcaaagatgaacatgtttcctccatatatgtaccccaatgccaaaagctgttgaaacatcacaaaggtcaaaacttgatatgaataaatgtcctaaagctattgaaacatcacaaaggtcaaaactttatagctcagtttacctcatcttcctgtaattgatcattcatctttagttgctcctctgttagctctggctcactgacactagatcgcaaatctttcagaattgtcaacataatatcttccttcgtctcatattcatcaacaccatcagcaatttcttcactttcagctctctttaactccgattcctcacaattcgaatgatcactagaactgtgatgaaacttctcctccatattcaccgaatgcgaattctgtttcacctttaacctactcaattcatcagccaagcaatcaacaacatcggattcagcaaaattcacctccggtttctccacgggacgaggttttgaatttgatccacggctgcgtcgattccggtgagactttgaaggttttgtagaatgatcgaggttttggattggctgagaagtagacggaaaagctgctgcagatgataaatccgtcgaagtcgtgtcttctttctgatgctctgattttggatgatcgttgactggattcacaatcccagcgtcacggcggatgtagcggcggtcgtgatttcttccactgcctccgtgtgttcctctcatggcggtcttgcagccaagtttgggtccagagagacaaacaaactctgttaaatgttaatgcactttctctacttgacgaaaacaaaaaaaaatgtacttttttctacttatgttttttgggtttttatggattgtgtccgaaaaattccaagtttggtttatttaccggttcgatagaggaaaccgaatcttaaataccatgattgaaccggagaagacttggtcaaagagaaaagaataattacgtttcatgttcacatttgcataattatggttccatatttttagtatcattgatcgattgctggacaaaatattcgttcgatccactttgactcggtattcgatttgattcgatttgaaaaatccgaacatccgtaagattttggagcaaagcaaataagaaaatatggtattcataaaaatcgaagcaaataacaaatattgttttttaaaaaatcgaatatccgcttcgatccgtatttatatatatatatatatatatatatatatatatatatatatattagaatatataattatgtctatatataaatatcataaatagtttgtgtattgttgttatcttctgtttttatgttaagatgtttgtttgatcatttttcttttatgttatgttttgattaatggcatcttaaactatcggtttttgtttttgttttaattaatttgataacattttgttgactggtgataacaacaacagttatgtttggtatttagaacttattttgaaaggatgttaaataaaaacattgaatatttgatatgcttgtatagtttacagattttttttattatttatatgtatcaaagcagatatccgcaaatatcacaaaaaaaatcggatattcgaatttccggatatccggaaattttcgaatcgaagcaaatcacaaaatcaagtattcggttaaaacgaatcaaaaaacaaatattataatttttccggatatccgcttcgtgtccaggcagtatgatcttttacacacacatgagtagtactatgttcataaatcgtaacaaaataatatggtttaaatatccatattgagctaataaaaacgaataacagttttaaataaatcgaaaacataaaataaaaatatcatggagatccacaacaacatatgttcatagatgtatacacagctttgtgactttgtcacataatctttaatgatatccaataggagccggagcttccttgagttcatgtcctttgaattgtatatcctgcacacataaaattccatattgtaacgaaatttacattttataccaatatcacattgttttatcattttgacaaataaactatacaactccttaccgaagcatagtggttaatatcacggtggtgagcttcgtcagctcgtataacataaaccacatccctaagcgttgcatctttaggcaaccgccagtaatcgattgcgatggctggagctggcgagttttcgaattttccggcatcaatgtctttgagaaattcagtgtaagaatttacagcctcttcttctaagtatccagtgatacgatgagcaagtttgggtgaaattacataagccaggaaatatgcgttgaagaaaacgccttggaccgtgaacacaatcgctcgttcgtaccttcaaacaccggttcaaatgataaatgaattacacaattccaaaagttttaggttagaactgtttctattagataaccgatctaggtcaaaccaaacttgattagaaatgtaatacaagttacgtgttatttagaaaaggtaataaactaaaaaggtacatgcatgcatatatacataccatttgggttgtgaaagttcgatgaaagtcatgagatgcatacgctcgttctcagcctcttcgagcaaagctttgatccatcccccgctatgttcgaacctccggagagatttcaagtgcaaaagcatccccccgaccattcccggcaccgcagccaccgtctctagcaacatcgcatggcacatgtgcttcctctatactcaaaaatcaaattattcaatttttgaaaaaacaaaatcatgttaaaaataaaagaacaaatgaagaagatttaaaatttctgattaaattacctgaaaaaatagttgaaccggtattttcagagtttgaacggtccaatatgcgaatttgtcagtgaaattggagggtttatgatgtttagttacatcaatggacacatccggtttgtatgaatcccatggctgaaaacaattccacttccaagctgaaccgtccggtttagtgatcttagtaggaggtataccccaataagtggatataactttaccatcggccgttcggataggattttctggctggttattcccacttaccggagatgacgtgtcagagctcaatagccgaacattgggcaagtggctaatgagatgtcccctgaatcctccaattcctaaaccggaggattgtaccgaagatgatagtaccggtcgaagagtgcggtaaatcgatctgtaggacatgagtaacaacagttggggtgtgatgtatcaacgagttttggtggtgagaatagaaatactaaaattatgagagatggtttaaggttatgattgatcttcagattgggttatgttcatatgtggcagataaattatgaagagatgaatttatatacacgagtgattattactaatctcggtcaagttcaaagtttcttggaggatgaataagaatggaggaaatgtttgacacgttttgttacattttatgtttgtggaaaagtaaaagaacatgtgaaattacttaaggattgtgtttgtcaccatcatattatattattatcttattgttcaataattcatatattcaaaaaagtactacagtttatcacgagatagacacaccaactatattattacacatcatgaaattacaaactcagatcatgttactatcataatatacaaagacgcttaaatttttcctatatttcgtatataccttgttatattttcttaaacaaatgttaatttagaatctatactatatttgataaatagaaaaattaagaagagtttataatatagaaaaaaatgtggttctctcgaatcagaatgaattgctacttttaccactcaaacacacacacacacacacaaaaaaaaaaaaaaaagaaagatagaaagaaagaatgaattgctactgtgttaaaaaatgataagttgttttaagtttgttttggttttgatccaaaaaagatgttgagatagaaaaggactattgtatatttttctgaaattatgttgtactagattttatcccgcggtataccgcggtgacaatttaactttttaaagttagtataattttttttttgcaaattgaatctatatataatatatttttattttatagtttacaattgttattaagtaacgtcctgccaaacccgtcccgccaaacccgtcccgtaaaaaaactatttatttatattaatgttgatcttatttatgatatgtttataaatcattgtctaaatatttttgtcgatgcgggacgttgaacccacacattttttgctaatttgttaatatatgtttatttttaaaattttgaattataaaatatgacggaaaaaattaagatttttttaaaattctatatattatataatgatgttaaaaaattgtaatatatcgaactttttataagtttaaatattaataatgttttataaattttaaatatataaataataatatttaaaaaaattaatatttttgcttataaggtaatgacataataactctaaaagcaaggatttagaagatttaaatctttaattaaatattttcattaataaataattaatgtcagtgacatgacatattaaataagttcaaatacaaaatttatttatttaaacaaaaaacgttcagtaaaaataatatttatttaacaaaaaaatttgttttaaaatattgttagcaaatatgtttatgctaattttaaaggattgatttgaagtttggtgggattaaatttgattgataatgtgattgacaatttaaatcaaaaatttaaaataaaattaattatttttaaaaaaagatttaatgctaatgacattagattgtaaataagtccaagttcatgatttatttgctaaaatagctgtaaaaatgtatatatagatttgttcatctatttctttaatatttttgtaaagataagtgactcataaatcgcactagtagattacgttaattgagcaaatacaaatatttggcgatgtccatatactagcacctaagaagtaaagtccttgtattcgtattacgttaatatttcaatttttaatgttaatttgaaatcatcccgaagaatccagagatcttgaacgttgagtatgtggtttttaatttttaatcagtggtaaatatttgtgaaccacaaaaagtaaaaagtccatgtctagtttttgaattgttaactgttcatattacgaagttgtttatataaaataccaaaaaaaggagatattttagaatatctcatatggtttttgttcacatacattttctttgtttttgcttgttctatctctctgtctttaatgccgttctcgactctcgaaccgatcaagcgttgcactaacatgtgccttcgctgaccgatagagctacaagagttaggcaccacaatctcatcttttaacactaaactaacaatacaagataaagtaacatatatctgaataaagacaatttatatgtataataaactagtgtactggaaagaaacgtttaacataagtacataacatatgattatatttaatgatgctgagaacaaaagatacttaggaataaatctaatgttcatcgttataagttataacacaaagcattaaaaaaaaacgttatacttaagtcccaaattttggatctaaccattaaggttgctcttagaacacataatattctctgttgttaccttgttctctatctgctttgatcaagcttcgtcatcacgttgcgcactaatgtgcaatcgtagaccaacgggctacaaaagccaggtgcctcaattgctaaattagatgaatctgaacatttttgtcaaggaatttaggaaaagtgacaagaaaagcaatattaaatcctatccatatccattgaattgaatgcatttaaaaatttagaagttttaagatttcaattctccaatgacgaatctataaactatctcctttctttatatgtaatgtttataaactatcttctttattttattactttgtttttgttaaagatatattaccaattttagttattattgtctgcttctcagctacaaaattgttttcctaataaagaattaaagatcttatccaatgtccacacgtttagtatttttctccatctacacaaaaaaaagaaaagaaaagaaaaagatattttagaatatctcacatgtgaaatgatcatgatcaacttctctctctgtctcttccatgccttgctcgagcatcgaacctaccaagcgttgcacattaatgtgccttcgctggccaggagagctacaagagcttggcgctgtctctgcagcacatagctaatttaaagttgattcgtcaaatccagcaaacttagttatagaataaaacattttttggcgttttgccaagaaaaaaaaaggggattagttggcttcaaataaaccaaaattagctaaatgttcatagagtaaataagtgaatgatcaacagataatatcattatgcatggagtatgatcaagaatacagactgaaaatttatatttactcaaaatgaaacaataaataatactgtcgaaatgaaatttgatgctaaactaagaagtatataatgaagaaaacaagtattatcgctagttaatttttatatgattatggtgttaaaaaataaaaataaaagtatataaacacaaatattgtatattttcgtgaaaattttaaaagaaaaatgttctaaattctagatttcttaggttgtctgctaaaataatgttagcaggtttcttaaaaccaaaaaaaaattcataaaatttacttgaaagcatgatgatagctactaaaaaaaattcataaaaagatatttaaaaataccttaaatgtttatctttatataacaacaagacctctgctgctgctatgctttcactggctctctcttttctcttttcgcccagctcgagcttcgaactaatcacacgttgcacattaatgtaccatcgcagaccagtgcgctacaagagccgggcgccaaagttacaactttttactaacttaaaaacctttggtcacctatataataacttcaataattcttttctatttttgagtcaaaaacataattcactccaacagtagtagtaattactagagtttctttgagttttttttaataatacaacaattaactttaccattttatctttttgaaaaaaggtttaccattttttacttcttgtagagttgtagtagtattatcatagtatggtgcatgtgtgttactgtgttaggtgtgtattgttttgtatatacgaaataaatgtttggaggcttggaaaatttttcaaggaaaaaaaaatcacatccatatgaccatatctattaatgagcaacactcatttcatcatatagatgccgagtgatcatttaatacactgtaagaaaatttaaagctttctgattccaaaattctcaaatctttttattacagtgtctttcatattcactttcttacaaagattattattaccaaatttagttacatgtctgctgctgagtttcaaataaattattgtcttaataaagatcttatcctatctccacacacgtttcctcctttttatttctcactttcaagcttagaaagaatattcttgttcgattttttttctcccgaacatgatctttcaatctcaacgacgatttctcagtgactaatactacatttgtatacattcttcatcatcatcatcatcatcatctgtgtttttgttcatattcatttttcagttatcgttttcaatttttaaaactttttttcttgggtttcacaaaatttgtcgttaatcgatgaatttgattgttttcaagatcacccatctctcgaattcacgaaatctctcagcttttccgtgattcttggtaaaaattcacaaaatcgaaattggagaaagaaagaaaaaattagggtttgaggaaaagcttcgatttttcacacgatgagtcatcaccggcgagattccggcggagatgtagttcacgtgattcccacaaacaatcctccgccggataattggtttccgaatctcggcgatagtgctgtttgggcgacggaagatgattacaatagagcttgggctatgaatcccgataacacctccggcgacaacaatggtccaccgaacaagaagactcgaggctctccgtcgtcttcatcagccacgactacttctgctgcgagcaatcgtactaaagcgattgggaaaatgttcttcaagacgaagctttgttgcaagtttcgtgctgggacttgtccgtatataacgaattgtaactttgctcatacggtggaggagcttcgtcgtccaccgccgaattggcaggagattgtggcggctcatgaggaggagagatctggtggtatgggaactcctacagtttctgtggttgagattccacgggaggagtttcagatcccgtctttggtgtcatcgacggctgagagtgggagatcttttaaaggaagacattgtaagaagttttatactgaagaaggatgtccttatggagaaagttgtacgtttctgcatgatgaggcttcgaggaatagagagagtgttgctattagcttaggacctggtggttatggaagtggtggtggtggtggaagtggcggtggttctgttggtggtggtggtagtagtagcaatgtagtagtgcttggtggtggtggtggaagtggaagtggaagtgggattcagattttgaagccttcaaattggaagacaaggatttgcaacaaatgggagattactgggtattgtccatttggtgctaagtgtcattttgctcatggagctgcaggtaaagattctgccttttgttcgatttcgtttgctttatgaatggaatggttaggcctgaagataaggacgggattgagttcataggtctctagtggttagccaagtttttagtgacttctcgtatgttagtttaaactttaaaccaatgttgcttgatgaatgggttaaaggtgactagagattggacgctgaagctccaagctgagtaaaatggttattcgcttattcgctgaccctgtcgggttctgtatcttatgacaccgctatctttgggtttttgttggtctgtggttaccatttagtctgttaggttatttgttagaagttttagtcaacggtgcttcatggttagactagtgagaatggtactaaaggttatataggagactaactaatggattgagtgcttatatcagttgagctcgccgcaggagtactgataaacattcatttttggtctggtattgtaatgaatctgacgagttgttgaatcttaggatagagttataggtttctcgaattctcaaaattttgatagataatctgtcttacatttgtgaaaaatgttgaatctttgatagtttcttatgggaaacaatttcttagaattgttgaacgatatgaccttagaaagttccgtagtcgtgtagctttaaagttttgagtctttatgatttgcagagttacatagatttggcggaggactcgtggaagaagaaggcaaagatggagtatcacccaatccggacacaaagcaaacagtacaaaaccccaaaggactatcagacacaacaacacttctatctccaggagtacctcataatgcagatgccagttaccacactggagttgcattgcaacgagcgtctagtgcggttacacaaaagcctggaattagaactcatcagaagtggaaaggaccggcgaaaatcagtcggatatacggtgattggatcgacgatattgaatgatgttacctctttcttttttctacacatttagataactgctaagaaaattacaatctccctttttttgcatggtacattttgtagagtttgtatatgtgtaatccttgtatctgttgttgttgttgtttgttgttgtagattatgacttatgttatattatcatctttcttttgtatcttttccatatttgattttttaaaaatttcataatttgattataaagccacaattttttttaatcataactagaagatcgatcaccgtaaaactagaatgtagaattagattagagcaaattaattggccacgaagataacacgtagcttttgtcaccaaagactcgctcaaaactctaaaagctttggcatatgtatgaccttacctttctcctcatttctctcttccccattgacattacccttcccacacggcaacctcagaataaaccctttcttcttcctcaagctacctatgaaaccagtcacaatatttctgatccggccgtttcactgcacggtctcaaaatgtctatatccacgaccgagacagacaatttcaaaccagtccataccctcgtttcctccccggtcaccatagtcttgaccggtagtcttctcttcatcattttcacggggttcttctccttcttcttctgtggatgtttatttaggaaactcatgaggatttggaataaccatcgaaaccgaaaccgtcctagtaacctaatccaaccgtctaatccacctgaaaacctcggtctcgactccaagatcattgaatcattccctgagtatccttattcggtgaaagatcatgggacggatcaatgttccatttgtttaacagagtttatggatgatgacactattaggctcatttctacttgtaatcactccttccacacgatttgcattgatctttggtttgaaggacacaagacttgccctgtatgcaggcgtgagcttgatgtagaagaccggacatcgctagaaaagccgctagaagttcctgaaatcgatctagttagatctgaaatccacgacgagcctttgccccgtgacacagtgacaatcatcgttcacgaggagcatcctagtactactattggtagtttagagcatacagatgaaatcgaaagctatgaaagacgaatgaaagcatcgaatttgcggttttggaggtcacattctactggacactctatagtagttaagaccgaaaacgaacaagaagaagaagaagaagaagaaaaagatgagattaagatacgtattgagatctctggagaatgtcagtttgaagatcacaagatgactttaccaaacagaaagttgtattgcgttaggggaacttactctgtaggatagagcctgagaatgtgaattgtcttggttgatatatcatctataatagatccaagaccggaattagattctaggttttgatatattctttgtttcggccgttccatttttgtaattttttgacactataggttatagttatacatatagaagatgttgaagattgttgtaatgtttgtacttaaattctcattattcagtaccaatcatactttccttttttcatttgtggacttcataaaattctaaaaatatttttaaatatatgtcttatatatataacataaaaaattaagttgcattttatcgttccggtttgatatgggaggtgtcaatttgatagaaatagaaatattgggaataacgtgatataaatcaatagaataggggaacgactaagagtttataatattacaatgtaagacctatattttaccatttgttaaaaaaagagaaccaaccaaacttggagagagaaatggcgacggcatcggaa

SEQ ID NO: 1158 - DNA, 33913 bp, Arabidopsis thaliana
aagctttcttacaattacattggccctgtcattttgactgcaagcttttctgagttcaatttccttgtcagtaaatcttttcgcagttgattcttcaacagcctgtttcccctttttcagcagttggattccttctctttcactactcaatgttttaagctcagctaattcctcgctgaccttttgtgcggcttgcattgcgttcttctgagcccactctttcctttcctttactttcttctcgaaatccttaacctgatgaagcagatcgactatcacacaatccttatcatccacacccaccgattccagattatcatcaaggttcagatcacgaaatttctccaacaccgtactaacactttcttcactccctgacttacgtggttgctgcccacaactcttcacaattgcaggatcattacaagctttgctatcaccaatagtatcagacgactgtatttgcttctgcttcatactagcacgatacccagcagcaaacgctgcaacattccgcttcaacaaggacttcatggatggcgaaagattaaaccttttaggacaatcaatctctctctgcaacttcaactcagcacctttcatagaaaacccattaccagaaaactcaggtcctcccccattcccaaaaccccaacctccatggaatcgacacaacgctggtgccataaaaccagcaatatctagagtaccacccgtaccaacatcttctacattgctatcttccttagtacaacaactagacctattcgttgggacatccagagtacttgccctaccaacatggagctcactcattaacaaacaccacattgcatcacctttactcaaattaggcttaacttgttgcaacaagtaaatcatacccgcaagcgaatactcctccaaatctctcaaatccgtaaaaccagtctccgttcgatcctcaccgttcccattactcccacctccacctccaccactattcaaataagataatgaattattcactatattagtcaacacatccaattcaccataacagtgtccattactcaaaaccgctttcaacgcaacacgttcctcatagcccaattcaagaagcttagaaacagcttgattatacaaaaactccaaatgtttcagcaaaatctcttccaaatgctcctctgtacaatatgcccaaaaattctcctcaggattctcagtaacggaattcaaattgacagaaccggaatcagtaagaccaggatgataaacaaggttctcaacaattgattgtgacatagcaatcttctcgacccaacataacggtgggtcggatctaaatgcagcggctttgatcctacgggtcggtttcacgtgcttctccctcacagtacaacccatgccaaaatctgaaactgaaagagagattgaaaaacagagagacgataaaaatgaaaactttaccaaccaaaaaacatgggtttgaagaaatggaattaatttattgaataaataatgattcgatgatagagacggaggaatacgaagaacttactgatcggtggtggtggctgaattttctcggctaagagaagatgagagtttcggcgaaaaggttatgcgagagagagagagagagagagaaactttgtttcggtttcttccatttctggcggcgccagagaatatatttatgggctttgagcccattacttgactgaacttatttgggcccatatatccgaattcaaaccgacagcgttttattataggtatgggttaaaatccgatctgtttgtttggtttcggttatatagaatgtgaaaacagattagtttggttcagtttgattatggttttgattcggtttggttttagttaggaaattaactttatattatataaatataatgtttgaactaataatattttaatatagttatactaacatctattgtattaataaattaaaatgtacattatgattatatttatctcaattagtttagtccgatcgactggttacattaaactcggtttcaaattcttattctttttataaaaccaattggttaagaagcaaattttgtttttggtataaacatttatttcagtttggtttacagttttgtgatcccttcgatgcttatctattctagaaaccctaatctataacttcttagattttggcaaagcaatggacacatatatataacttcttgctttttgaaatttcttagattttggattttggtgatattcgcttatatgtttggatgcccagtggtacgtaaatgttgttcctttgggtaattaaccaatgtccatcagtccatgcatctgcgttttggatgtagagttttttttttgctataaagctttttttatgtagagttgggataccattggcattaataaacaaatagtgtgctaattccagttgtaattatatacattctctatagcttgtgttacatcgtctatagaatttaccacattctcatataagaaaaaacgaatggaaacaaaagaggtttttgtatgcatcttcttaagctgagccatcatagtttgaagtaagacgtggacaactccatagccgcactttaatggctatccaagcgtctctagagacgtcaatgtccaaaatgttcttacatgactctttcctttgtccttttattctttctctcccattcctccaaatcccacacacatacatgcacatacatatacacgcatacgttacgtagatgcatacatacatgtattggcttagtggtcatgatggaacgagattgagaaactcaactctgtttgcttgcttctggaaggcatcttctgttgaagtgtcttttacaatttctttagacaagatgtttggattttaaaacccttttaacaaaaaaataaataaataaaaataaagatatttggattttgcattgtgacctcaaatctctttgttccctaagaacttcgaccattttgtcaaatcgacatacccatattgcctccttttgaatcagagcatttgttcatgatggtatgaatggcatagtgtttctttttgtattcatagcattcgtcaaactttcacatttttattccgctaaatccattacatgctagcctctattcaaataacatgggtagtaaaatttaaatgttagtagcctctattcaaatcagttttttttttacattttagtaatctattaaaatcaagtttttaacgtatcatattgaatattctgaataaataaataaaaaatatatattctgaataaattatattcatttcaaacgtttttgatgtttcatcactttataactattcatatcgaatcactttttgtaatatgtattatttttactatgacaattaatgttttatttcccaatatacattgcctttttgtatagggatattaaggcattaccaagttatatcgttttatccagccgacttttggatttttatgttggatccgaaaaaaaaatcttctttttagcattttcaatttaatacgttttataggggtgtattcaatcaaacatttttgtttgttttaactagttctatattattaaataataaatttttcgatattttttctcttgattgtctttgtttggatgcttcttggttgagcttgttagctccctattatcatgcatcctttgagttattttggttgttttagctttaccatttgctcgtccattatggtggtcattggattggtttgtgtgcctcatagtagttctttgtgtcttttctttgcggaggcaaaacatgtttaaatttaaaattatttttaaatttgtccaagaacagtattcttgataacttcaagagatttttaaaaaatgttcccaagtaaaaaacacacaaaactaaatcccataattttaagtggaattttgtaggattttataataaattataaatcatatcaactttcctaattcatccaaaatcatataaaaaaataaaactcaaataatttaaaatacgggattgaacatgccccttactacattttccactaccaatattgattgacaatgcagaagaaataattcaattaattagaaaaaacaaaattaaccactcaagcgttaagatccatgccgaacaatctaaagcttcaatattcggatatcttgatttggtttagaacatcaaaaattttggttttacaaaagctttgccgaattagactgaattagaattttgattatattcaatttgaaagccaatatttgaactggaactaaaacttccttctatgtatacacaaagataaaactaatttccaaataatttcagttaatttaaaataagataaattaatttccatatatttcacttatattataaaatcagttttgacatagaaataactcaatgcctactccacctcgaaccatacacagtttatgtaaatttaaactccacataactaatcagcttacacacctcaatccaacatcagcttaaaccacaccatactcgattcggattcagatcacaacaaaatcaaattgaaaaatgaacacatataagttataacatagatatacctgtaagatcacggtcaagataatttgagtccaaatttatatatagaagctcatatagtaaatgagttgagcttagctagttcatgaaatatctgaattcattacgagctaagttgaattgagcgagatagagtattttgatacttcgtagattatatacatgcatccataagaaaacaaaagaagattttacgatggagatcgtgactcacaccatgtcacatgtgaagtgtagttgacataacaaaataataaagaagaataagaaaaaagaaagacaatatagaaattggcattatagaaattggccccatcaaataattagacaaccgcaaaccaaaactaaagctgctctcgatatgaaatccaacctaataatcacagttattgttacccttacccatgtttatatctttcatatgtgtatatgcacataaaagttcacgtttatgatttagcctatagaattgagtgaactgccaaacaataaattgtcggtttggtacaacaacaaaagagagagaaactaaatttcccctgattgggtaactgaatttcctgtgtgcatgacccatagtaagttttattttatttgttgcctcagtctggcccttgataatttggatttatggcaaatattgttttttttattaacttagcatacctatttcttctttgatcaaaaaaaaaaaaaagcatacctatttcttacgtgagatagtttaacaaatgtgatgtatttgataagagaaaaaatattgaatatgataactgaaaaatattgtactaatttgatcagagtttacagtatttttatatatatattaacaaacatgtctattaaactcaacttttgcagaaaggtgaaagtttaacttccgtgctcatcttttttgtcgacgagcgattatcgtttatagtatattaaattaaaatatcatcgtaacatatccatttacatgtaagagtcccatggatcaataatatgcattaaaaagcaatacttaattttcaagatatctttaaaaataaaaagataactcacgtttaaatcgtgaaaaaatacttctcataattcagaaaaataatatttctagagttttttttgttacttaaagatagattttgtaagttttctatgtattttataatttttagtatttaccaattgtctgtcgtccaaaacaaaagtaataaaaaattgttgactttcaaaaatatagattgaaaaatgaatttataaacttactattagtttagagttataggaagttatttagaacagaaaatgattcatttataattaagtttttatataatattggtaaaaactctaagaaataatttattttcttattataaagttaattcaagacttttaaataataataagcaatttttttctagcaataattaataagtaagttaaaattgttttttttttttttattctaatatgtgtttttctatactatattagtttagtttaagtgcaaccccttctaattaagtggtgtatatttgtataataaacatgtctagaagaccaattctacatattcactatgcggatatgaacctgagtaatgacaaagcgacaccgttatcacatatatgataaaactatattacatataaattattaagtttaaatgtgatttctgtaaatatttttgtctacaaacaaaatttaaggaagatttaaaaaaaaatcatatcagtatttgtttattacaaggaaaaagtataaccttttacaagaaaatatactttttctcaagaaatttgcctattttgccactagaacttcagattctcaaaaaaaaaacttgtttttttgtttttctttttttttatttcaatttttcattaatataccctctatttaactgataaaggcaagttgcaaaagagggtgtgtgtttgccccactcctcacataatgtcataataatacaatcttcgaagttttcgcaattcacattccttttttccaagtcccaatacatacacatatacaaacacacacatatacacccaaacgttatgtaactgcaaaaaaaatatcgaaacgagattctacaattagtctctagtcaaagagcttcatggcaatggtgtgaccccaaagttagtcttcacatgtttcttaagtttcaaacattgaatttttttccttttataaatagttaagacttatcttcattttctaaaatagtcaagatttatattcctcttaaaaaataatttatttccttcctaagaagaattattagatttattttctttgctagtatagattgatgaaagtgaggaaatgggagaagaaatgaagaacacaggatgtgtcttcttcttctaagtcactaacaaaatcaacaaagaggagaagccattattatataatagagagattgagagaagagatttatccaaaaaaatattgcaattcttcttggagtgaataatgccagtccctcttgcaccatatccaacacctccggcaccggcactggctccgtcgtacaacactcctccggcaaatggtaaaatctttcttaaatggacaagctatttttaatccaaaaagatcctctgttttcatattcttttacaaaagttttagtttcttataagattgattttttggctttattaaacaagattgtttttggtcatgcatacttggaaaaatcaaatattttcagattcccaatttgttttactcttcatgggaaaaaattgctcaattattttcccagaaccacatttatttatttcacatgtgttcataatccatttgaatgtactttttttggttaaaaaaataaataaaaacaacttgagatttgtaggaagtacaagtgggcagagccagttagtgtgttcaggttgcagaaaccttctgatgtatcccgtcggagcaacctccgtctgttgcgccgtctgtaacgccgtcacggccgttcctccgcccggtaaaatcctttaaaccataacaaaagagtttggttaaagtcttaaagagatctttgagttttgtaataactgattgggcaatgcaggaacggagatggcacagttggtatgtggaggatgtcatacactcttaatgtacattcgtggagctacaagtgttcaatgttcttgttgtcacactgttaatctcgccctcgaaggtttacatgcatattgatctttatatattacttattaaacaaaaaacatcgatctttatatttggtgtttaatcagatttttattgactgtttttgtttgggttgtggtttagggaatatatacaagaaaccaaatccaaaatgaaaatatttttaatttttacgatcgaggtcgttatatattacaaatttattacatgttgtcgtttatcgacaatatgtattgtaaggatttaaactcagattatattgcaaactaggaaaaaatattttattatatgttctgcttagtttattatgtgtttttattcaaaaatactttttacaataaattatattgagttttggtttttatgataaaacaataaaactaggtttgtttatatatgtgtgggtctagtttagtttcgattttgagatataagataattaaaccgaattttggatttattttgcaggtcttgtttatgtttaggtttaggttgttaaaacatttcggttttaagtgtattaataactttcatgtcttgcaaatgtaatcagcaaaccaagtagcgcatgtgaattgcggaaactgcatgatgctactaatgtatcaatatggagcaagatcagtgaaatgtgccgtttgtaactttgtcacatctgttggggttagttctctttctttatccaaaaagatcggttttaaatcagtcgcaaactaacaaaattacttctcttttttttttaacatcagaacgtttctttatataatgttttatttttggttgctattgttttgataattgcttgtagggttcaacgagcacgactgattcgaagtttaacaattaaaacttggatctatctacctatcaatacatattgagttatgagcaatatagaggaagcatcaaatctttttcactctctcttcgatcaagaatccggcagtgatgagtttgaaaccattttcggaagtaaatgaaatatgtaattcgtcgaaatttctgactttggtctctttgtccgtttgtatagagctatctctcttctttggtttttgttttgttctcttaagaaaaatttgattcaccagtttgtaagagtgattcagaaatcaaagctagactttttatgcatgaaaaaaatagattgttttaaatgcttatgcatactccgatccttttcaagcattttaaagcacaaaggacgtcggtgacaattttcatttgtaagttcatcaaaatatatatgctaagaaaatttggaaatgtaaagtgaacttacaaatgaaaatacatgtaagaaacctttatacttgatagtctcaaaaataaattgttgaaccaaaaaaactataaagtattattagaatgtggtttggaatgaagagatcaataaaccttatatattagagtagaattatagatgtgggacattctaataagtatataaaccaaacaaaacttaatcgtgatacaacaaaacaatgggacgaatatgtaataaataaaacagaacccgaaaaggttttgtccctcgatattgactaaagtctgaataattccacgcaatctgtctatggataattggggtagacttcactcacgggttcatctatgatttgatctttggttggtttaagtgtctttcgcatgtcttttcgtttctttggatcacggcaagattcttgacatagatatatttgaacattttgcttggagatttatttaaggataagatttaatttcgttttctttgtctgatgttctacgtagaagaagatccatgtgactttgaaatagatatctcttgatttactttggactagtcaattaatctgaattaaccaaaatgctactaagcttatagataaaggtgaaaaatatttcaagaatttcggcagccaaatctatcgatacacatttgacatttcctgtcattgtcacgtcacttaccaaaaactaatggctaaaatctctgaccatatcaaatactccaacttttgttccataccaatctggcatacaaaaaatgtcaatagaatggtacaccaaaacgatatttataacacaacctaacaaaattattgctaacacaaacatgcttttattttatattttattttgtgtaaaaactcatctcaagattttcaacaaatgatattataaaaaaacgaaaagaatttcaatataaaaatgccgatttatatttttctcatagattagaaaagataaatgtttaacattttgtaaaaagaaaaatttcaagtaaccttttttgtctttatatttctgtaattcattttgacaaggaacacattctatatttatttttttcctgaaaatcgacattaatatttgaaatgtcatttattttgaaaatcatgaaaaatgtaatattttgcttcaaagaaaaagtaagtaaagcaaatgaactttaaaacaaacacagaacaatcacaagcgaaaaaaaaaaaaaaaaccggaacccaattactctaagatgaaatatgtatcatactcaaaaagtacatcaaacatggagtagtccattgaaaatctgacagcttttagcaactgccaaactaaatcagacccaaaattatcgggttttttcacacacaggttgagacaggaacatatcactacagaaatgtcagaaaaggttggtgagtgtttttcaatcggttttcaacttcagtgtcgttttgtcaaaacagaccaattctaagaaaatatcaaagaggcatattctatgcaatgttctagaccttcttagtaatcttatacatgcataagaataaagtttggtagataacaaaggaacaaagcattatataccaaaagcatttcatatgcccacattgttatcatcatctcttacggtcacaaaagcattacctttccttctcacatggaccactaatatgtgttccatgtccaaaaatgaattattgacaccattacttaggaccaaaggttagaattaactagaggctacaggtatgcagacaaaactgttttcggatttggagtttattgttaaatgattgtaaagtttttcatgaaatgttgaattgttgagaagtttaatcggaatatcgttgagttcagtaagagatttacgaggatgcaccacgatattcaggactaagaaagttgaactcactagtcacctctaatacagaaagtctgccactttacagtttacatgcttcttttggtttctattcatctcccatggcgagttcaagagcgtaatcgtctctttcctgcaatgtaacatcgataaaactgttaaaagcccaatgccaaggaaaacttaaaagaactttaaatcattttgaatcctgataagaataatggtaagtttgatctctttgacaacatcaagtccattactagtcctagtgaacggcctataattaaaattaataaatcactaagtttcttaacggattacagtctatccatcgattgagttagatacacttcaccactagtcttttgaaatatatgtagttgcatgttatgttcatatctggagtaccaaaggccctaagtttcttaacggattccagtgtctatctatttatctagatatacttcaccattagtggtcttactcattgttgatttatatgatttagaggacttgtaacaataaattgaactaagaaattgcttgctctgaaaacttacaattggtccacgagcaaagtatcttccaaattgtagccagtagacctgtgtatgccatacgatttagaacagcgtaactagaattaaatgagagaatacaagtattgttgcagcaattcttggattttcagaagattatttcttataatgagttacctcgtcctcgtcttgtgtttctacttcaaggtcagatgtggggaaacccacacaaagaagtgcatacccctgcatgtataagccacagaacttaaatgcaaaataaagttgaaatcaagatttaagtgccaaaatcactatactttgctaatgattagcacacttattactatcctcagagttaaaacctttgcttcaatataattgatttctaagaagaggaagttgctccccctataatacataaaaacattctctaaacgctaacagttaggtaagtcttttgacactgtataaggtcaagcgatgagattcgcttaggataataaaaccttgcaattgagagattagttaaaacattcacattggttttgttgattcaataagagttggtcctagttttccaacagacactgactatcatcatcacaaattgtctatgtagttccagcctacttgtgtttctggccatatcacaaacctacctccctaaagcctaaggtaaagggatattattacctgggacttcagttctgctgatattcccaatgcttgaggctgcctcagctctccagattttacacgtacagcacaactagtacaacaacctgcccacataagattgtaaatctcaaattgtagagtagacacatcactaagttgagcgcttagccaaagcatactttcaacatgtaaatctcagaggaacatttttttcatgcatatagctctaacatagctccattagtgattggcttatcctaatcatctactgatctacatcacatttaaagcttcaaatatatgatacgagtaggtgacaagaaaacatatacaaccaactgaaatggatcaagagaacaataccatgcctgcaagcaaacggaagactaatgttctgagattcagctgaatgcaatatatactgatcctgcatttcaaatagatttccacatatcaacgaacggaaaccagtgataagccagacaacacgattatatcaaccacactacacaatgtccagacgtaagaatagttacaaaactacaacaagctaattcatatttgcttaaaccaaaagagccacaagcagcaaattccttctaatttcctcctctaaggcgcaacgaacatcgaaatggaagcaagagagaaacaaaaactaagtagaatcaaaattaactatagccaacgaatcctagatccaaagccataaaatatatttgaatctcgaaactacagagcatacattgcaaatctagagtataacttatccaatctaacctctggaacctcgaattcgtgaaccactcctcgttgtcgatcgtgaacagtgactttgtgcgaaggaacaaccaacgatcctctatctgatggagtggaaacttctacaggaatccggaactcacacgtcgcagtcgtagctcctcgacggaaattcgtaatatatctccgattaatcggaaaattcttcttctgaagcgaagtacaaaatgtacagggcaaaatcagagccatagttttggaggattttgattttcgcggcttttactagtcgagaggttgaagaagataagagagtgtttctgagaaaagagaccaatcaaccattccactgctaaatcataaaccggaaatacaaaccaaaaacttttccggtttacaaaattcggccaattaaaccaccaaaatccggtagaggcggtgcgtggatatcagattaggccagcgaagcatctctacgtggcaactagatagaaagctgggaattgaaacaagacacgtggcgacattaataacacgtggaattaatgtgacccatttggaccgacgaagccatgcatacatttccttatttaaatcgaataagaatcattcaagagtaattagttagagtttagagaaacagaaaactaaagaaaaaaaatatgcaatcggcgaaacagaagataagcgatatggctagtacagccaaggagaagatggtgatatgtcaagcaaaagctgatgagaaggttctaaatttagaattatgctaatgatttcgtttaacatcattgatatgattaaatagttatggattgtttgattgattcaaatattaatgacgtgcaggcagagcgggcgatggcgaggacgaaagaggagaaagagatagcgcaccaacggagaaaggcgaaggaagcagaagcgaatatggatatgcacatggctaaagcggctcatgcggaagacaagcttatggctaagcaatctcactaccatgttactgatcatggtccccacgtgcctcaacaagcgcctgtaccggctcccgcaccggttatgggacacggttacgggcataatcctaccggagttacctcagtgcctcctcagacctatcatccgacttatcctccgacgggacatcataatcatcatcactactaatccgacctactatctttttaaaataaaaaaaaataacctgattatacgtgtggggcctttagtggttttcttagttcttaggcatgtgcttaaaattaagtgattaagcgttgagttgatgtttgcaactttgcgtacacgtttgttgataaatattttggttattccatgcactatcttgtatgtcaagagcgtgcgcgactcacgacatcacttccatttgactttctgagtatatcattcatttaatagaaagtttgcacttataaacctgggaaaaccagtacaatcccttagcaccggatcccattcttgacaagtttttcctccggccaaaattatttagaaaaatgcgttttcagaacctaaatactaaattggtgtcagctgatttatattgtaaagttgtgttgagtgtttaaattaaagtaatatgattatactttttggtttttaagatataatccgtaaaaatatgttatttagtaatttaattatacatttagagattgatttgtggaatattagtgaaatcagaattttacaaatttagtaaaaaattggccattgagacattagtgaaatcagaatttagactcgttacattaacgaaaattcagattttagatataaaattagtgaaaaccaaaacatatataaaaacaaaatcagaaaacattaaacattaaacataaatttcaaaatatataaaaatatggtgtgatttactaacaaaatttaatcatataaaaccctgttattgataaagcttaattgatttaaaaacaataatattagaataatggaaattacgaatgagaatcttattttatttataaaaagaaattattatttttcttatcttaaagacagaagaagaaaatgaataaatctgttactcttaaaaaaaaccatttccaaacattatgatgaagaagaaacatgaaaacgtttgtaaaacaaaacttgaaatttgaaacaaaaatcaaaagtcaaatgataagaagtactccgaagtccaaactaatcttttagtgcaaggtggaacataaaaaaatattaggcaaccactgattatttaaaagaacagcaacatgaaaatgatcattttttggtttggaatgaaaaaaatcaaagtgtttgcttatggtgatgaatgagaaactgcgtgaaataaactatggtgttcgtttcttctgattatgttgcatacccatatactacctcaagctcggttctatatataaaagaatctcattgttcagttcaactatttgtttgtcctactgtaagaaaaaagtactcaaatatgtttctttgtaaattgcttatggatttcgtttcgtatatgcagtcatcaaatgtttgtcgttttggtattgcaaaagaggatttaacgacacgttgtttataagattctctgcgaacttagaacaaaggtcaaaccacactgaaccagtctaaaattgttcatgggatcaacggtggttaagctttaaccaaaaagatttcaggtctttactaaaccaaaatatgaaaatcctggatttatttgttacttaaccaaactttgtgcacatcacaattgtggcgtaacgtaaacaaagatggaattcgaattagatgaagaaaaaaaaaaatggaattcgaattttcaatttcgaaatgggcggtcttttctttcattttgaattttgaaatttctatataacagaaataaaattggaatttagagcaaaggaaattaaaaagccgtttaaagaagaaaagcttctactacaagtttctctctaatatctcgtatttgaaaaccccaaattctcatttttgaaaagtctgtcgaagagtaacggtggttttgcggcggcgtttcttgggtcaccggcgatgatgatctaggaaggttgttctctgagttcggctaggctaatcgattctaaggtcagttataagcggtctcccaaattccagattcagtcgagccgattccgatgaatctgtttccgatgtatgtttctctgttacttgattcgattacgattacttttatttttcccaatttggtacgttaaatcttcttgaattttatgagtcttgttcgagtgattatgtggttttacgctttcaatacattctccggtagtttttttttctgattcgtgatttggttttgacagatcatcaacgatctcgagactgggaaatagaaatggattaggattcgtgactttcaaagatgataaatctttgagggatgttaatgaatagatggatggaaaaacgctcgatggccttagtagcatcactgtgaatgaagaagcggcggtagaggaggcggtggttgatatgaaaaggcatataccggaggccgctgtgaggagcggtggtagtgactggtaaagtggcaatcggagataaactggttttgtgcatcgctgtgcctccggttcagtgttctaatcttttggtttagttttttttcaagtatgttctcttcaatctctttcttatgctggttcttttgattttttcttggatttgatgctctttcagttttctttttgcagcagcaaatttcagagaattctatatgggttgttcacaatcacttaacgaacgcattgatatacatgcacacatacataacatacattacatacatgattctttgttaacttatttgcttgcttcctcattttcttactccattccttggttagtcatttacttcgtcagtcccttacgtgtgcttacttgtctccttatttttcttctgtaattctttgcttatgtacttgtatgcattcatatatgcatacattcatacatgcatatatacatatattcatctatgcatacacacatatgtattcttgcatacttccttgtacacattcattattgcttctctgtttctttgattcgttgtttacttctttgcttccttgattctttgtccgattctttgcttacttgtttttctgccttcatgaattgcttgctttatttccagtgtccttggtttatctttttacttcattgtgtgtttgcttccttccttgtacacattcattattgcttctctgtttctttgattcgttgtttacttctttgcttccttgattctttgtccgattctttgcttacttgtttttctgccttcatgaattgcttgcattatttccagtgttccttggtttatctttttacttcattgtgtgtttgcttccttccttgtgtccttgcttgcttccttgattccttgcttacttgtttgcttctttatttttctatcctcagtaactgtctcattttatcttccattaaaatatgcattttgcttacatagttcattatttggttcattgagcgtctgtcaagaaaaattcctttcgatcgcgaatgtcgctacctcatagaatatctctttagtgtatgtggaataactgttatcaaataaccttactatcaagttctatgatcattattctctccaattaattgttggttctaattgtcagggtttgagtgagacctcgcatttacttgccaccatcttctgaactgcctcatggattctctggcacaaggtttgaattccgtgttttttccccaaagttcaacagtttgatgcgatgccgcagatatggattaatataaagtcagaccaaccgacaaaggtattctagatatgaaactcgtttgatatagatattctttcttttgttcctctgaatcattcagttgatttctatcattaattttggtatctagacagatgattttgtcatttattgtcccagatgaacagaaaatcatccaacgattgtgaccatattcttgcttttgttccagaagaagatgaaacaaacttcatggttctcggtaagttgagttagttttatagctgaatcttacaatcttgtatatctttctggcactgtgtattgtagaccaaaattttgtcatgggctaatttttgatagcttcatccttacaaggtattctgacactgcaaatatggatcacgtcagctccttgtacctttctgaagactaaaaagtgacatatcaaaaattaaagttatctacaagtacctttctcatatcgcttagtgttctcatactcttaagatcagtagtgtgtttggtgtctaattaaagttttctttcattttcttaatgaaactaatgaacatgtgtttctgcttggtcgacactaatttagagtttgaggaggacatggagaggtctatatgcgatatgagaagctaggtaagccaacaatcccctaatgagactactgttaatgagacgttccttcttgtaaattaacatgtagggaaaaggagaagacaatgatagccaaacaggagagataatatacacaacaacttgctcaattggaagaacactgaagaaaaaagaagcgggtaaataatagccttacatttttacaccttctctatttctcttgttgtatgacagaatgtgaaatctcggggtgtaggatgacaaaatttcagcatattgaagaaaattctcgggctataacctggatgagtaaaagattaacttctcttcatttgactctaaaggtaaagaaacctcttacgatttttttaagtttgtctgaaagtatgtagtctatgactttgctatcttactagcttatcacttgtctacattcttttggaagcctatgactttgctatcttactagcttttccctttcatccagtcgctttcattgtcctttatgaatggttgtctaggtgtatatcaccattcaccaaagtatcttacatgcttattctgcttgttggtcactacatatagtttatcctcctatcgcctctttggatcagtgtttttcgtttcaaagtaaagacaaattgctaacaaaatagtgttaaaatttcagcagactagtggctcactttacagtgtatatggctcaattgtggttgttagcattctcacattgtatatggctcaattgtggtagacagaaatatatagcacaatttcagtgagaaagaaattaaagtttgtgatttactaaattttgcaaggaagaagaaaggagctgattatggctgcattcttgttttgttagagcccttgtgactgtactagcaccaatctattccgtctgataattggacatgttacttatatggggtggttaaactggtaagtaagattgatcatgcatttgtagtgtttaataccattttcacacaaatagtttgtcttccttaaaactgtaaaagtgagaatttacttgattttcatttttgttttgtttgattgtgaaataagattttgaaaggtccagttatctccaagaaaaaatatctatgaaattggttctgcttcctggcatccatatttctcaaaatttgtcgttgtttctgagataaacatggtgatgatattatgttgtttcaattggatttccttagttaagtaggtagtggggaatggggatcaatatagcagcagagagtgatgtggttttagtatgaggaacatgaaggcatcaaggtatctaaatttaatactcttgtttctactatgatctttcatatttttgtatatcggatctagttaataaatgtgatttcaacagggaagatgcttgaaaattacttaaagagaagcaaattttccattaagttcatgctcagaacatatgcagtttcaggtatattattccactacagtcacagaagttatcgtctcttttgttcatagctaatagacttctcaaaattctatagtgattgaacatgttttcttctttgtttctttgtttctttgattcttggattctttgatctttgtttacttagttgcttcattggttgcttaacttgtttgtatgtttccttctttatcaccttacttgtttcattgtttaattacatgctaaacttgttttctcagtttttccttcattgctagcttctttacacaacttgcttgcttccatgatttgtttacttacacaattagagtaatagtgatgaaaatttgtgttgaactcggaaaattacaactatttgcaacctaagagttgacaacaaatccttctaagacttccacaaatgaataatgttagatttcattacttctctcgcaaatccattcgcctctaaaacatctcttcattggttgtttaacttatttgtatgtttccttctttatcaccttactcgtttcattgtttaatcacatgctaaacttgttttctcacttttttccttcattgctagcttctttacacaacttgcttgcttccatgatttgtttacttacacaattagagtaataagtgatgaaaatttgtgttgaactcggaaaattacaactacttgcaacctaagagttgacaaccaatccttctaaaacttccacaaatgaataatgttagattccatcgcttctctcgcaaatccattcgcctctaaaacaattctggaagaactcaacttctcctctatattcttcagctcttggttgtagttttcaaaataaatggtggcacaccatttacgagaatcaaaacaatgcgctccaaattcctgatcccgtaagcgaaatgataggtagacacgttgatcagctgagtggatttcccatcataccgacagactccattcttaggtttgatatatgtttcaaacacgtataaacatcataacattaatcaatatttttttcacttgtgttggattctttctttctttgttccctgtatacttcaatattatcttaagagtaacatagaatatatgtcatcagatagtaggaagattgcttcagccactaaaagcgagagctcaacccctagtccttcagcctcatctttctgcttctcattggtgagatcagtctctttagtgtaaggaatattattgactgacctaaaaggtaaagagaatatctagattgtagtaatctcttattgttacggataacaccgtgagccattgacattgatttcatcttttttgagatggtcgagatgtctgaaggattcatcgaatatggctctagatgcagtttttttttgggggagatttcaaatctatgaatcaacatataacgaaacaaaaatcagattaaatatatcacaaaacgttcgattcaatcgggcaagtgagagaagacgaaccctagattaatagaaagaaaataaacgatgcagtcaccttgttgttgtagtgttctctgaaaacttaatcttagacgaataatatctatttgtatataggaaaaaggctttaatgctttgtggattaaaaggatatatatagaggaaagtaaggaaataaatatttatgaggaaatttggtagaagataagtttttatcttaactaatgatattattttatatattttaaaaacaaacccccgcgggagttatagattgctttaatactaacattagtaatgcaaaaatactatactactaggatttaacctgtggtataccacggggcaaatattttatttatatatagtaatcttaaattttacggttttaaatttagtattaaaattatataattttatattaatattgtaaaaaaaaattagtgatgatagaataataaataaagatttaacccgtgttatatcaatgcaaacccgtcccactatataactcgtctcataatattttaatatctttttataaggataaatattaataatgttttataaagttaaaatatatcaataataatataccattaatgctaatagatccccttaaaaaagaatattagtgtgtagtacattttagatttgaaaagatttaaatgattgttgtgatatatttattttaattctaaattttagtaacaaaattgatttatatttagatttgagaagaaatttgttaaaatattaaatgctaatggcattggatggtaaataaatcccaacttgaggatttatttcataaaagtgctgcaaaaatgtatatgtagataaatctattttaacataatttttcttttatttatatatttagtattattaattttatttaaaaaaattaaaacataagacaaatatgatgtgttattttcccttacttgtattttattgttcaaattttttctattaataaagctatttaaaaatattttgactaattattagaaataaaactgccaaaatatgtacatgtttagcatatctattagtaaaaaagtttttctattaatcaaacaattatagagaaatataatttgactaaaaatccgggttgacacttcccatttatacccttgatctgagttttttgtgataatttcatagatttgttggttctgggaaataacttctaaaaagttgtatgtgtcatatgctgcaaaaatctaatcgtgaatggtgaattctaaacaaagacgtaaaattttaaggaaaacataaatcttaccgtgaaactttgagtcagtcgagataccatatatattagaaaaataaaagacatatataaagagaattgtggttgttaatgagagacacatttctcttaactcaaatccatctatttcatactaatgccaaaattccaaacatctaatccaacttctctctctgatcaatctccaaatcttcatatgcaaatcccctaatcgaatgtcttactcacaattgtatgttcacctctccattattgattttttttatttaacatatatagagatttgttgtaattgcactcgaaccaaaacaataaaacatttgttatttcaaaacccttttccaagacgaaaaagaaaacccatttccatagctaacctagtgtgaattttgttttctcagatttaacctcctcaaacggtgaaatggtaggattaatttatcaaaaacttacctatacgggttttatttcacttatgataaaacgattcggcccattaacccattttgtttttctgctaacccattggcccatttagaattaaagaatcatctgatttagtcatttcgatggttttcacttaaaccctagtctagtcatttctcagactctgacctcactgatctccaatggcgaaaaccctagctcgctccacagcgtcacgcatcaccaagcgcttaatctccacctccggagccaccactccttccccttcttatatcctctcccgtcgatcaaccccggtgttctcccatgccgtcggattcatctcttccttgaatcgtttcacaacgattcgaactcgaatggataggtccggtggatcgtactctcctctaaaatccggttcgaatttcagcgaccgagcacccactgagatggcgccgttgtttcctggctgcgattatgagcattggttgattgtaatggacaaacctggaggcgaaaacgctactaagcagcaaatgattgattgttatgttcaaaccctagctaaaattatcggcaggttagggtttctttcaatttcgttgattcattagttagaagaagcatttagttattgtaattaataatctcttgttgtttgtttaatcagtgaggaagaagctaagaagaagatttataatgtatcgtgtgaaaggtattttggatttggttgtgagattgatgaagagacatcaaacaaacttgaaggtatgtcttgttgttgttgttgttgttgttgtaatgttggcgatgtaatggatggttgttgattattgtgtgtgtgtttcaggacttcctggtgttctcttcattttaccagactcttatgttgatcaagagaacaaagattacggaggtgagttttatgttaatactgttgttagtgattgctttaacacagtctatgtttcgtagttctctgtgtgttctgttttgtgtcataatcgatcaagactaagcttagaactagaattttcatatatctactctcaattaagcacaaaatctcaggcgttgttaatgttaagactgtggagtgtggaagtagaatccgtttcctgcactcaactagacataagactcttctgtgtcacttttgtgtgttccatgagttgttccctgtagagaagccaaaacattttgattccagccttaagtgtcatctttgacaccgatctttagtctgtttgtttgatagagaagctgtttgtttgatagctgaagctcgagggtcaaatctttaaactagcgtctctgttttggtttacttgttaagttcactgcgtaatcaaactcttcttctaacgtattgtgcagctgagctgtttgtgaatggagaaatagttcaacgtcctccagagagacagagaaagatcattgagttaacgacccagagaaccaatgataaaccaaagtaccacgacaagaccagatatgtccgaagaagagagaacatgcgttgaatccaaatctgatatcagaccatacagaagttgttgttcaatgttcatgtgtctgcaagcaacagatgttttctgttttgaggtctctctctccttatgtaatggctttgtagtttggattttagaacttggaattggctaaaactattatcattgcatatacataatttggcctttgaactatggttttctcgaattatgaaaataaaaccaaatcattgaattggtgaggcccattggtgagtatatttaggtaacaccggttatttccaattatttgactaaaccgggttgagaagtttaaaccgtgacttaaccggtttcgttacctagactataaataactctcttctcctccactcaacaaattctattagggcacgccgtacagagtttactcactaaacagaggattttgattccaatccgaatcagcttgaagcaaaaatcgatccatggcgattctttggtgtcaacaacaaaagggtaaattctttaactgttctgaggattgtttatgagagtattataagtcactacatttggtaagcaaagtgttgtttctcaaacgaagtgacttatgataatctcatgaatggattttgcaactcttaaagagagcatagttcttgtggtgcggcttcttgatattaggatctagagcattttggtagatggttaatgtgattatggtaaggtagagaaaacattagttgatatgcagcagctaaagcgtgaaatggattcttggtttttagtatattatcatctttttgtgtgtttgtaatgcaggaattctcagccttatagtcccactgtcttcttgtgtcatggattagagaaagtgaaagggaaacaactaaataaatcccaacatcttccaccttaccggccttgaacattgatagctgttaaaatggaagatgctttgggatttattttgtagtctttccttctaaatagtgttgtatggtgatacagcacacgaaaatggtttcaggtttgtgtattacagatgcaaatgtttcaagcttctcacatcctaccttatattggaaggtggaaccctatgattcactatccatttctataccaaaacttgaccaaagaagctgtaactgtgttgatacttgttacaattgagtctttactcccactatatgtatctatgaaataagattgctttccaccgtagattgatcttcttatagacaaagtgatcaaacatagtataggtgaggtgaggtaggaaagatatgtgtgagaccttatcttgttgtagctgactttgaattttctttattctctaatgtattgataagtgtggaagaaacatttttttgataatcgaaacaaagtgatagagtactagagaatcatcattatccaaaccaaagcttatacatctctctaaacctttctagttctaacaagctcttttcttgctccacagtcattttttctctttggactagacttagactacttattgtatatacttacgataagattgctttggttgacttgttacttatcaaagtgttataattctctactttttgtaagcaaggttgctttccaaatgaagtgacttgtgatactctctcatttgttgataggtcttattatggttctgtttatttaattaatgacaaccactttttgtcagctcttttttcaaaactttaacaaaattttggtagtagttatgtttatctgaatctcgaggtagatagattttgagattgaaaaagggtattggtccatacccttatggaaacagcagacatgcatgcaatcacaaacttccatttcttaagtttcttctcatctctccaccatgcatgtgtattatacctctataaaaaactctatatctactagaacagagaagaagcctccacatcttttggcctgtgcatgagaatggaacatatctacaaattccaacattggctcttcttcataggtcttggagtgttgctgtctctttctctgtgtaagttcttgtctagaatttccctctttttctctctctttttcttcttcttatactatacaccaattccatatttgaatattgtcaatgttgcagctgtgaaggccaatgacttcgaaggttccaatgatagaagaagcattgctctcaaggctagaagcttcgtttccataaacgaaaaccgcaccgctctttccagaaagctactactctctcccggtaattcatagacactgttagtgtttggcttcacatgttctattaacactcttttatgttttaggatcaatctctttgtttttttatgtattaagaaccttaaagacaaaatttcagacattggcgatgggaccaacagaatcggacaagattgctcaaaagatgatattgttctctttcaaggctcaacaaatccacttcctagtggagttccttcatatacagttgagatcttcaactcttgtgtctcggattgcaatatagcagagatccacgtcagttgtggctggttcagctcagtcagactggttaaccctcgagttttcaggcgactcgactacgacgattgtctggttaacgatggtcaacctcttggtcctggacagtcactctcctttcaatatgctaacagcttctcttaccctctctctgttgcttcagtctcttgcttctgattttagatactataccaagtttggtcatttccacaagactcaaaaaatgagaagtattttggtattgtacttcatgtagtggattagattctaacttcaggtagcagttgaacaatgttgctaatgttattgtcaagaaagagttatttaatttaatgataagccaaaacaaaccttcatagtgagtaccatccaaacagtacaagttttttttttttttttggcaaccgatattaagtagaacgtgccaaattatccactttaacattcaaatcataagcttataaaatctttctaaaccactcttattattttgttttaagaattaaaatttattatgatttttatgatatttgaaatcatgcgaacattatattttagatttatttttcacgattgaaaaataaattatcaatttatttcgtatgagaattctaaatcctcatcaggaccaatactatctagatccgaaccaaaaacttcatgttgagtcatagacgaaaatgtgaagtttggagtcagtggtagaggatattcataatcaactcgtgttgattgcaatgaggaagcaccatgcatttcttgggtcgagccattgaaccaggaagagggaaaaggttcaaaaccattggactgtggcattgattgtgtaggatcttgaggttgcgattgagccatcatatgagaatgatacttatcaaaaggttcttcgaattggtctccattagatcctgatgattcttcgagtaagctttgaagataagccatatacaatgagacatcaggatcctcttgaaccgccatggcactgggaggaatcgaagaggtccaatttatcggctctggtctaatatcttgatgctttggaatgttttgaggtaaacggtcacatggttgaggactcgttagttgttgaacaaggcttttgaagtcgttcttgtctatgatgtagacttgcactcgcggttgtgtttgcgccagctgaggtacggagttagagtcagcgtttagttggtcgtagttactcttccgcttattcactctcaagtaatcattttgtggtcgctgatacattttttaacaacaagaatgtttgtcactcgttcgctaggaagaaagtgtgccaatcattagctaggaagcttcacgagataagtaagaatattacacatatatacaacagttctttattcatcataattcattttaaattcctgattttgcccactttagttcttgatttatttcaataataagatgatccaactttaatacaaggatatttgtccttttaaatttgttttccattttttccatagaaagtagaaaatatgtatctacaggtcattgaagaataaagcccaatcggtttggatttgggcctgcatctttgtgttggttctgcaactttattggtttttctagttttgaataagtctccacctttgtaggagaaagaatcgtgacattagtttagttgcgagagtttcgtagcttcagttgctttctttgtaaagtctatttattgactaatctgaattcaatgcaagtaagagtttttcagtatctgttcttgcaaatctttgtttttccttaaagtgagatttgataaaacaacagtggtatcagagcttgtcacgagcttggtacaaaagagaaacaccatgagtgaaaaggagtcggtgatcataccaaaattcgatggtgattatgagcattgggctatgctcatggagaatctgataagatcaaaggagtggtgggatatcattgagacgggaattccaaggccggagagaaacgtgatcctcaccggagcgcaaagaacagagttggcggagaagacggtgaaggaccacaaagtgaagaactatctatttgcatcaatagataagacgattctcaagacgattctgcagaaggagacgtcgaaggacttgtgggagtcaatgaaaaggaaatatcaagggaatgatagggttcaaagcgctcaactgcagaggttacggagaagctttgaagttcttgagatgaagattggagaaacaatcacgggttacttctcaagagtgatggaaatcactaatgatatgcggaatctgggagaagacatgccagactccaaagtagtggagaaaattctgagaacattggtcgaaaaattcacatacgttgtgtgtgctatagaagagtctaacaacatcaaggagcttacggtggatgggcttcaaagttctttaatggtgcatgagcagaacttgagtagacatgatgtggaagagagagtgttaaaagctgaaactcaatggagaccggatggaggaagaggcagaggaggaagtccaagccgaggaagaggtagagggggttaccaaggaagagggcgtggctatgtgaacagagacacggtagagtgtttcaagtgccacaagatgggacattacaaggcggagtgtccaagttgggagaaagaagcgaattatgttgagatggaggaagatctgcttctcatggctcatgtagaacagattggtgatgaagagaaacaaatttggttcttggactcgggatgcagtaaccacatgtgcggtacaagagagtggttcctcgagttggatagtggttttaagcagaacgtgagactaggagatgatcgaagaatggcggtagaaggaaagggaaagctgagacttgaagttgatggaagaattcaagtgatctcagatgtgtactttgtgccagggttgaagaataacctctttagcgtgggtcaactacaacaaaaagggttaagattcatcattgaaggtgatgtgtgtgaagtgtggcacaaaacagagaagagaatggtgatgcactcaacgatgacaaaaaatcgcatgtttgtggtttttgcagctgtgaaaaagtcaaaggagactgaagaaacaagatgccttcaagtgatcggcaaagctaacaatatgtggcacaagagatttggacatctcaaccatcaaggcttgagatcgctagctgaaaaagagatggtaaaaggcttaccaaagtttgatcttggagaagaagaagcagtttgcgatatatgcttaaagggtaagcaaatccgagagtcaattccaaaggagagtgcgtggaaatcaactcaggttctgcagcttgttcacacagacatttgtggaccgataaatcctgcatcaaccagtgggaaaaggtacattttgaactttatagatgactttagccggaagtgttggacttatttgttgtcggagaagtcagaaacatttcagttcttcaaggaatttaaggctgaagtcgaaagagaatcaggaaaaaaattggtatgtttgcggtcagacagaggaggagaatataattcgagggagtttgacgagtactgcaaggaatttggaatcaagagacaactcaccgcagcatatacgccacaacaaaacggtgtcgcagaaagaaagaatcggagcgtgatgaacatgacgcggtgtatgttaatggagatgtcagtgccaagaaagttctggcctgaagctgttcagtatgcagtgtatatactgaatcggagtccgtcaaaggctttaaatgacataactccggaagagaagtggagtagctggaaaccatcagttgagcatctaagaatatttggcagcctagcatatgctcttgtcccgtaccagaaaagaatcaagcttgatgagaaaagcatcaaatgtgtgatgttcggtgtaagcaaggaatccaaagcctatcgtctctatgaccctgcaacaggaaaaatattgattagtcgggatgttcagtttgacgaagaaagaggctgggaatgggaagataagtcgctggaggaagaacttgtgtgggacaattctgatcatgaacctgcaggagaagagggtccagaaataaaccacaacgggcaacaagatcaagaggaaacagaagaagaagaagaaacggtagcagaaacggttcatcaaaatctcccggctgttggaacaggaggtgttagacagagacaacaaccagtttggatgaaagattatgttgttggaaacgcccgggtgctcataacacaagatgaagaagatgaagttcttgcgttgttcattggaccagatgatccggtttgctttgaagaagcggctcaattagaggtgtggagaaaggcgatggaagcagagataacctccatagaagagaataacacatgggagttagttgaattacctgaagaagcaaaggtgattgggctgaagtggattttcaagactaaattcaatgagaaaggagaagttgataagtttaaagcaagactggttgcaaagggctatcatcagagatatggagtggatttctatgaggtatttgcaccagtagctaagtgggatactatcagattgattcttggcttagctgcagagaaaggatggagtgtttttcaactagatgtgaaaagtgcgtttttgcatggagacctaaaggaagatgtgtttgttgagcagcctaagggattcgaagtggaagaagaatccagcaaggtgtacaaattgaagaaggccttatatggcctaaaacaagctccaagagcttggtacagccgtatagaagaattctttggtaaagaagggttcgaaaagtgctactgtgaacatacactgttcgtgaagaaagagagaagtgacttcttggtggtaagtgtgtatgtggatgatcttatttacacaggaagctcgatggagatgattgaagggtttaaaaattctatgatggaggaatttgctatgactgatcttggaaagatgaagtacttcttgggagttgaggtcatacaagatgaaagaggtattttcatcaaccaaagaaagtatgctgcagaaatcattaagaagtatggaatggagggatgtaattcagtcaagaatccaattgtgcccggacagaagttaacaaaagctggagctggtgatgctgttgatccaactgagtttaagcaactcattgggagcttaaggtacctaaccaccactcgaccagacttgattttctctgtaaatctagttagtaggtacatggaaagtccaaatgagcaacacttgttggctgtgaagagaatcttgaggtacgttcaaggtacgttggatctcgggattcaatatgaacgtggtggtgctacagagttggttggcttcgttgatagtgattatgccggtgacgtcgatgacagaaagagcacctctggttatgtgttcatgttaggtggaggagctatagcttgggcatctaagaagcaaccaattgtgacattatcaacaacggaagcagagtttgtgtcagcttcttatggtgcgtgtcaagcggtatggctcagaaacgttttggaggagattggctgcagacaagaaggaggcacacttgtgttctgtgataacagctccaccataaagttgtcaaagaatcctgtactacatggaagaagtaagcacattcatgtgaggtatcattttctcagagagttggtgaaggaaggaactattagacttgactattgtactactacagaccaagttgcagacatcatgactaaggctgtgaaacgtgaagtgtttgaagagcttcggggaagaatgggagtaagaagaagagaagaataaaccgaaaagtgtgttttcggtttaagggagggattgaagaataaagcccaatcggtttggatttgggcctgcatctttgtgttggttctgcaactttattggtttttctagttttgaataagtctccacctttgtaggagaaagaatcgtgacattagtttagttgcgagagtttcgtagcttcagttgctttctttgtaaagtctatttattgactaatctgaattcaatgcaagtaagagtttttcagtatctgttcttgcaaatctttgtttttccttaaagtgagatttgataaaacaacagtcattatgtatgtgtatcttcctattttctatttttattttaattcgaatggaaggtattttcatggaatatatagaaatatatgatagtgctaagtatctatttgtttttaagaaaattttctatttttctctcatttctacatgttctcctttttatttttgtacgagtttttttcttcattacaatcctagatatgttttaggtactatacaaaaaaaattcttggtaaaaacattttcatacaaaagaaataaaatagattaagagatatcatgtattatgtagattcatttaacaccttaaattcatattttgtaagatttttcccatttaatatgtcttttgcgtatgatatcattgtttaagacaagaatatgtttccatcgaacaaactttaactttccttttaaggaaattataacgacatgagtaatataatactgatatcgaaagtatctttggtaattggtgatatgaatttgtataacgttttgacaaagtagataccactgacgttaacggtgcattgacatacgtatcgtaggtacaatgaaaagtgtggatacgtattatatgtcgacattgatgttatacagaaaattatgatgcaataactatgtaatcacgctctcaataaaacttcgttgtccatatatagtcataagacatatctttttcccggacaataaccaaaatatatctgttttgatcaattttctaatgtcgaataaacaatcatctcagctcatttcattgcacaaagatggtttataccttctagaccttaatgaaaccacgtctttgaagctaaacgtgccctttacattaccgg

SEQ ID NO: 1159 - DNA, 92219 bp, Arabidopsis thaliana
gaattccaaggccggagagaaacgtgatcctcaccggagcgcaaagaacagagttggcggagaagacggtgaaggaccacaaagtgaagaactatctatttgcatcaatagataagacgattctcaagacgattctgcagaaggagacgtcgaaggacttgtgggagtcaatgaaaaggaaatatcaagggaatgatagggttcaaagcgctcaactgcagaggttacggagaagctttgaagttcttgagatgaagattggagaaacaatcacgggttacttctcaagagtgatggaaatcactaatgatatgcggaatctgggagaagacatgccagactccaaagtagtggagaaaattctgagaacattggtcgaaaaattcacatacgttgtgtgtgctatagaagagtctaacaacatcaaggagcttacggtggatgggcttcaaagttctttaatggtgcatgagcagaacttgagtagacatgatgtggaagagagagtgttaaaagctgaaactcaatggagaccggatggaggaagaggcagaggaggaagtccaagccgaggaagaggtagagggggttaccaaggaagagggcgtggctatgtgaacagagacacggtagagtgtttcaagtgccacaagatgggacattacaaggcggagtgtccaagttgggagaaagaagcgaattatgttgagatggaggaagatctgcttctcatggctcatgtagaacagattggtgatgaagagaaacaaatttggttcttggactcgggatgcagtaaccacatgtgcggtacaagagagtggttcctcgagttggatagtggttttaagcagaacgtgagactaggagatgatcgaagaatggcggtagaaggaaagggaaagctgagacttgaagttgatggaagaattcaagtgatctcagatgtgtactttgtgccagggttgaagaataacctctttagcgtgggtcaactacaacaaaaagggttaagattcatcattgaaggtgatgtgtgtgaagtgtggcacaaaacagagaagagaatggtgatgcactcaacgatgacaaaaaatcgcatgtttgtggtttttgcagctgtgaaaaagtcaaaggagactgaagaaacaagatgccttcaagtgatcggcaaagctaacaatatgtggcacaagagatttggacatctcaaccatcaaggcttgagatcgctagctgaaaaagagatggtaaaaggcttaccaaagtttgatcttggagaagaagaagcagtttgcgatatatgcttaaagggtaagcaaatccgagagtcaattccaaaggagagtgcgtggaaatcaactcaggttctgcagcttgttcacacagacatttgtggaccgataaatcctgcatcaaccagtgggaaaaggtacattttgaactttatagatgactttagccggaagtgttggacttatttgttgtcggagaagtcagaaacatttcagttcttcaaggaatttaaggctgaagtcgaaagagaatcaggaaaaaaattggtatgtttgcggtcagacagaggaggagaatataattcgagggagtttgacgagtactgcaaggaatttggaatcaagagacaactcaccgcagcatatacgccacaacaaaacggtgtcgcagaaagaaagaatcggagcgtgatgaacatgacgcggtgtatgttaatggagatgtcagtgccaagaaagttctggcctgaagctgttcagtatgcagtgtatatactgaatcggagtccgtcaaaggctttaaatgacataactccggaagagaagtggagtagctggaaaccatcagttgagcatctaagaatatttggcagcctagcatatgctcttgtcccgtaccagaaaagaatcaagcttgatgagaaaagcatcaaatgtgtgatgttcggtgtaagcaaggaatccaaagcctatcgtctctatgaccctgcaacaggaaaaatattgattagtcgggatgttcagtttgacgaagaaagaggctgggaatgggaagataagtcgctggaggaagaacttgtgtgggacaattctgatcatgaacctgcaggagaagagggtccagaaataaaccacaacgggcaacaagatcaagaggaaacagaagaagaagaagaaacggtagcagaaacggttcatcaaaatctcccggctgttggaacaggaggtgttagacagagacaacaaccagtttggatgaaagattatgttgttggaaacgcccgggtgctcataacacaagatgaagaagatgaagttcttgcgttgttcattggaccagatgatccggtttgctttgaagaagcggctcaattagaggtgtggagaaaggcgatggaagcagagataacctccatagaagagaataacacatgggagttagttgaattacctgaagaagcaaaggtgattgggctgaagtggattttcaagactaaattcaatgagaaaggagaagttgataagtttaaagcaagactggttgcaaagggctatcatcagagatatggagtggatttctatgaggtatttgcaccagtagctaagtgggatactatcagattgattcttggcttagctgcagagaaaggatggagtgtttttcaactagatgtgaaaagtgcgtttttgcatggagacctaaaggaagatgtgtttgttgagcagcctaagggattcgaagtggaagaagaatccagcaaggtgtacaaattgaagaaggccttatatggcctaaaacaagctccaagagcttggtacagccgtatagaagaattctttggtaaagaagggttcgaaaagtgctactgtgaacatacactgttcgtgaagaaagagagaagtgacttcttggtggtaagtgtgtatgtggatgatcttatttacacaggaagctcgatggagatgattgaagggtttaaaaattctatgatggaggaatttgctatgactgatcttggaaagatgaagtacttcttgggagttgaggtcatacaagatgaaagaggtattttcatcaaccaaagaaagtatgctgcagaaatcattaagaagtatggaatggagggatgtaattcagtcaagaatccaattgtgcccggacagaagttaacaaaagctggagctggtgatgctgttgatcaactgagtttaagcaactcattgggagcttaaggtacctaaccaccactcgaccagacttgattttctctgtaaatctagttagtaggtacatggaaagtccaaatgagcaacacttgttggctgtgaagagaatcttgaggtacgttcaaggtacgttggatctcgggattcaatatgaacgtggtggtgctacagagttggttggcttcgttgatagtgattatgccggtgacgtcgatgacagaaagagcacctctggttatgtgttcatgttaggtggaggagctatagcttgggcatctaagaagcaaccaattgtgacattatcaacaacggaagcagagtttgtgtcagcttcttatggtgcgtgtcaagcggtatggctcagaaacgttttggaggagattggctgcagacaagaaggaggcacacttgtgttctgtgataacagctccaccataaagttgtcaaagaatcctgtactacatggaagaagtaagcacattcatgtgaggtatcattttctcagagagttggtgaaggaaggaactattagacttgactattgtactactacagaccaagttgcagacatcatgactaaggctgtgaaacgtgaagtgtttgaagagcttcggggaagaatgggagtaagaagaagagaagaataaaccgaaaagtgtgttttcggtttaagggagggattgaagaataaagcccaatcggtttggatttgggcctgcatctttgtgttggttctgcaactttattggtttttctagttttgaataagtctccacctttgtaggagaaagaatcgtgacattagtttagttgcgagagtttcgtagcttcagttgctttctttgtaaagtctatttattgactaatctgaattcaatgcaagtaagagtttttcagtatctgttcttgcaaatctttgtttttccttaaagtgagatttgataaaacaacagtcattatgtatgtgtatcttcctattttctatttttattttaattcgaatggaaggtattttcatggaatatatagaaatatatgatagtgctaagtatctatttgtttttaagaaaattttctatttttctctcatttctacatgttctcctttttatttttgtacgagtttttttcttcattacaatcctagatatgttttaggtactatacaaaaaaaattcttggtaaaaacattttcatacaaaagaaataaaatagattaagagatatcatgtattatgtagattcatttaacaccttaaattcatattttgtaagatttttcccatttaatatgtcttttgcgtatgatatcattgtttaagacaagaatatgtttccatcgaacaaactttaactttccttttaaggaaattataacgacatgagtaatataatactgatatcgaaagtatctttggtaattggtgatatgaatttgtataacgttttgacaaagtagataccactgacgttaacggtgcattgacatacgtatcgtaggtacaatgaaaagtgtggatacgtattatatgtcgacattgatgttatacagaaaattatgatgcaataactatgtaatcacgctctcaataaaacttcgttgtccatatatagtcataagacatatctttttcccggacaataaccaaaatatatctgttttgatcaattttctaatgtcgaataaacaatcatctcagctcatttcattgcacaaagatggtttataccttctagaccttaatgaaaccacgtctttgaagctaaacgtgccctttacattaccggcccaaactgaaccagtctgtattctttcttgccgtggagtgatatgtctcacccgcaaagacaacaatgagttagctatttggaaacctacttcaacaaaattcaagagagtaccgatgattaaacggggtcaaacccaaaatcttttgggattcggttatgaccgggttttagatgattacaaaattgtgacgattatcgacaagaaaacctatatctttacgttcaaagaaagttcttggagagaaagcaaactaattccctctagtgattgcttcttcaaagagaggaccggtacggttgtcgacaattgtatgtattggatagcaaaccggttcaacaaagaaaaattcatcttatgctttgatttcgttaatgaagagtactcaaaactaaacgttccgatgatgctatcaggattggagttcaattcatggttagatgtttcaaggggagaactatgtgttatcaatcactacccaagtgtagatgacaatttatgtgtatgtcgacgagaaattagaagcggcaagaagattgcgagatgggatagcgacccgtggatgaatgtagcgggaaacgatgacgaacccgttgatattaggtttgtatgcatagcaaaaaacgatgaagtctttgtagtggtgcgatgtcgtagtaaagaagaagaggacaatgtttttgtgtacaataaggaacaaaacgagttcattgaagttttattttctagtcatttgaaagtgttgggatgtatgactaaacttatgtaactccttatgaaaatatatgaaactactaaacactaactccttattttatagcgaattgctcaactttaagatctttcgtattctcaaaggcacaataaagtagtgttttaacagctctgtactgctgtaacctataagctccgaaagattgcacctttgatagtagagagacactaacctaagagtcaagtgaagaagatggagcatcttagtaacctctccatctttgactagatattggtataaccccaaacggagatgcatgaggcagaggaattgtgcccggaccgagaattccaggttgatccattgatgagaatgtatagtttcttggtgttagtggtggaggatattgaactcctgtagacagcagcggagaaggtgacctaggggagagcaaattccggtaagcagttggagattgtggacgatattgggacgttggagtaggtaatatccctcgaccgttgaatcgaggagaaggaagactattattatgcatctgttgtggcggaccgtcgaacttaggagttggcaaaatgggtgtgtttcgtgcagaatcattgaaccgtggcgaatgatgattatgcgattgagcttgaccttccacctgtggctgctgttgattgtcatgagatggctgcatttggttttcattaggtccagaatctccaagtgagctttgacgataacgcatatacaccgagacagaagactcagctgtattagacccaaactggtctccatgactgataattggttgtgaaccatgtggcaaaggatgcattggaggtctagcaacaaactcatgagtaggttgagccattacaggaggaggaacacagggccggtttatctgtatttgacccactggtctaatcttctgctgaggcttcaacagattccgaggaagaggctgaggtaaactctcacgcgacggagaatccgtaagctgttgaacaatacttgtaaaatcattgttgctcatgctataaccttgtggttgtggtaaaggactcttctttatgttcttcccaatcttattcacacctaactgatcataataccaacaagtcctatccatctcaaacaagagagactaaactcacaaattctgatctaaaaccttaagcttcaaagaggaacagagtaagtaacagttacaggatcagatattgtcctgtatcagccaaaaacttaatctttaacagctatgaaacctcaattactgaatctagaatacccattatccacttatgcatctaaaaccgaatcagtcgcatctgaaatcgaacgcaacaatcacattacgtctttatccactaaattggtcggagaaacaatgataatgagaagaaaagcctttcacctgaagaaaatcgaatccacaggatcctaaacccgtgatttaggtcaggtctctcagcagagcgaaagaaaaattgaagacaaagccctaattttcatcaatggatggagttttagtgaaatggtcaaaaacaaagaaaaatgagaaatggggtgagagaggctcgaactctcgacctcaggatcactcagtagctatgagacctacgcgctagccaactgcgccaccaccccattttgttagcttaattcagatataactaatgaaacctaaaatgttcctacaaggtctcggtcatatgttctgtctgggagaaaggtacctcctttcatcaatctatagtcagaacaaagaacaatctctctctttctcgttcataaatctccaaaaccactcgagcaagaagagaaccgagtcgggcaatcgcaaatttagtttctttgttcactgaagcttcaaaggtatgacctttattgattttgttttttttggatttctcttctcgtaaatcaatcactgagattggtaatatatgggttttagcctcttaacctaatcatcgaattaatcattcaggttctttgagtatcgaacttctctgttttctcaacttgaaagcaaagcaaaataacatttttagttgtatcgattagctaattttgattctttggaagtcttacatttctggttgattgctattaacgaatctctaatttggtcctcctctagttgcaaaattacatttgtgtgtgttttgtgtcttcagcttttgaattaagaagcttctagggttttatagagctttagattctttcctttaaatgcattaccttataatagaatttggtttgttttatcagtgttttgagtaattggaattgaaggaaagatgagcaatggtggtttgagcattgatgagaaagaagggttgatagacaaagatgaagtcatgatccgtcgaatgaagaacagagaaagacaacgtaggtatcgagccaggaaacggatgcgggaagaagaagcgggtaacgatgataatctttcgtttgagacaatgggaaaacaagaagaagaagaagaagaagacgagggactagagtttaatggacctagtggttatgttgagaactttgtgcggcgggtttattgcgatagaaattggaaaaaagaagctagaagagctcatttgattatgaacaaggctcaagatagttcttgtgagtcggttaaacggaagataaggccgcatcgtcgagattggaaagctgaagctagaaagaagaaaacttgattcttgaggattggtcaggttgctagaggatcttgcgaggtgatcgaggaagagaatgcacaaacaaagcagatttcagattcaataatctcttcaagatttctatttttgtagatattggaaatgatcaagacaaaagcaagtgatttgctttttcttgtctgtgactctgtctgtgtattcgaagatccatgtagtattatactaaggtttatgtgtgttgtgtcttattgattagacaagaggaaacattatcacactgacttaagaaaactgtgcatatggtctccctctcgacttaacttacttaagatttgtctctcttcctaagtttgatgtgttaggagagacatttttgaccatatgtacaaaatcagtgatcatgaccattagtctcttattttagaccatttatactcgatttctttttcttttttatcatatgaaattgtgtagaaatattaactttttcagtaactaactcatattactcatatcaatatatacaagtttactcattgaggagatacaacaataaaacgatacagactcaaacatagagcaaaagaagaaacttgtcgctctattttaagatttttttcttacaaaactaaaatctacaaaattactgaagccactaaaacgaattaattatgatttgaccccataactttctaaacttcccaaaacacacccttttaaccgatttttgaaatcaaacttgctctgagctgttcttgcgtatagatcctaaaacccatcttcaccgtcgcttgttgaatcatcaaatcgttaaccaccgacatactcgcgtgattcacttccaactccaaatccatcaacgccgacatcaacctcgccgccggatgattcctcttactagattcaactctaatcattgcgtcccaaccaattatcttcacttcaatctccatccccaccggtttaatcgaagaacacgaagacgacatatctcctccactagcactcgcttttcttccggcgagctcgagtttcacttcctcgagctggttcttgatttggagtttctctgactctgttttgactactttggatttaagctcgttgatgtaagcgattgcgtcaccgagtaacgaagctttatccatttttgaaacgtttggtacaaccgctcgtaacgcgtagaatctttggtttagtttctcgcgtctttgtctctctgcttcgacgtggtttagtggctcttctctaccgtttgctggctttcttcctcgtttctttggacgtttctctactgctacttctttcacgacggaagcttctagatcggagtgatctgattctccggcggttttatctccgaatgatagaactttatcttcgttcaaaaccatcgacctctttcttttgttttcgaattgtgtttgacccgaataagaacttggatccgggtttccggagcttcgtttaccttcatcgccgaagtttaatatctcgccggatcttggtttcactaaagtagaacttgacgtcgaaaaattaagttctcgggagaaagtgttattgaatttcggattctgggtctgagaatgaaccggactcggagtcggatccagattcgggttttcggttattgtgcttgagctaccgttctcaaactgaatagactttgaaaaaagctgggagctagaacttggagctccgttacccggttcgttagatccaggtgttccaatcgggtcattaatccacatagacgggtcgttctcaccttgatccgggtcaagattccaattaagacccgataaatctccagctccgccgtcgaaattgaaaagaattcgaaccttgttaataaggtccgaactctgtcggatcggctccgttgacccgacttccacaactccgttcgccgaaggaatacacgcaatagtatgcatcccaaacactcctccttgcttagcccgttcacaacccgacccggataattgatctgacccggaaacccaaaccgcgttacccgttgcaaacgctttaccagctaatcccgcaccgcaagcgaagctctgcgtcatcgaaaccaagaaaaaccattccgtatccgtcacctcctcatcaacagcgtcatccgacggagcaacaccaccggagatcaacgagttaagctctctcaacacttttttcctgtactcctgatccgccggagtagaaaacggcggcgaactcgatctccgtctcgggtttgctttatcttcttcacctttgtaataaccatctccccatccgagcacggaggcgccggagaaatcatacgacggttgccagaatatagcgtaggtccaaccttcgtgtgttccttcaatcaaagcttgtaaacgttgctgaagagtctcttgattaaatcccgcctgtgccggaatctccatcgccggcgtcggagttgtttcagtcgtcgccgtcgtggttgtcgtcgacgccggaggccataaagttgagatatcggaagagctcatgaaagcttccatcatagaagcgttgtcgtcggtggtccaaagattcatcgttggttgtagccggtaatcagtcattccataaaccggtgaccggtaaaaaaaaacacgtttttaatgagagagagagagataggagaaagtcttcgtagtggagaaaaatggagagcgtctgcgattattatatgtgtaactgatcttgagggtgaatgtgtaaatttgttgttagggatattacgtggcgagatttcattgggaaacgtggatggttgtaagagagagagaagcttcgatgaactcacatcccgatttaaccccatcgactgttggatcgacgcggtaagaattaagaccggaagtgagtgagatcgtacggctgtttggtcgcacgtgtatcacacgctctttaatgattgacttagattttaactgattgtttcttttgtaccaaagagtgaactgtgagctcagtggaaaaacactttactataacttttcacctattttttcgatttatatttgtcgttttgtcaacttttagaatatattttttataacagattaattacttattttataatgttattttaaaatattaaaaatcaaaatttaagatttgtaatctcaattatcaaatactgtgtcttagcttaattaattttgagatttgcatatctatataacgtgagtcgttgctaataattcactaaagcaaaaatttgtgtttgtcttaatatgttaaattgcaagagagtgaaatgcaagtgagaatctctatctccaaaaacgattcttgtctgcttaactaattaatttgttgacgactaaataaactaataatttattaatttgaccaaacgctattattagcatatgctttaagaaaggaagaactcctttataatatttttagttacattcacatttcacgataaacacatgctaacaacgttatattgtttgtttaatttacaatattaaaattttatttttaaagttcgaacaataattcaaggattaggtcattaggtgagtatgagtgaataacataaatcatttggcatcttttcctccatgcataaatttatcacaataatttagcatgccaccaatatggtcccattactcctaacccttacctaaaaaccaaaaataaaacaaaaagaattaagataaaatagtatatatatatatatatatatatacttctaaaattctatcttgcgaagacaaattcttactaacaaaacactaaacttatgttattgtgttcttgtagatttacgttgtcttgtgataaactcaatgatatgtctttatacgttcagattaatgatactccggttgatttttcttattaaaaccatattaaactaaagagtattttaccaacaataaatagtaaaataattttgggatctagtataccattttttgtaaataacaaccaaaataacttttgaatataattttctgagacatctgtattgggtgaactcgtcaatgaacgattcaacaaacagaaaacaaccaaaccattgtctggtggttgtgagtcgacttttgaacatgtttactataagaaaattatgagaagatgttacactaagttttggctaggtgattcgtgatatcatatttcatgtcgactttgggggtgacgccactagaaaacaacaatatcccactaagtaatgaataattagtgggataaatatagagatttccccccttacttcgagaaatgagataacaaagatgacagttttcttgttatgttgttatgttgagcttagaatggggatgatggagtgttctgacttcttagagaaaatggttgaaattttttaagtagagagtcgggttgattaaatgaagatcttactatcaccttgttgaaagagagggacattagtcgggattcgggaacaatgtggaacgtaagatataaatttcccatatgttatttcctaactgcatgaaataaaaatatatctgttacctgatccaaatttgtatgtgaccaattcgagttattcttagatttagagaaatagagaatcatcaattggtgtacactttcgatagatcgtcgaacatgatataatgatcttgattgatttggcatgctcgaatagcttatacaatgtgttacatatgttaggttaataagtgactaggatgaccttgtagaagcgcctcaatctatgtatcttttgttgattgagttcctaagtagcaataatttattcataattataataacatatgttcatatatatacatatgtatataaatttacatacaattttggattcgcttactttttaggaagggtcttttcaatgattttgaaacatgcagacacaaatacacgatcatatagacttgaaatttttctacatgtgaatgtgtaataatatatttttcctgatattagttgtattttctttcttttttccttttaaaaaatgaatctggaaattaattacatggttaaagtaatactagcttgaaatgaagattaagtgcagaaggaggaatcccactagtcacgccaaaaacatatttaatccttttttaatttgtaatgtttatcttcaattagctgtccatcgcattgtttatcttaaagtttaggttacatcaaaatcagatactatatattttaatagtaactgtttctcgtgagtattattatatagtaaactagattttaacctgcggtataccgcggaaacaatttattttttaaattaatatatatataagtttataaattgtatctatgtataaaatatttttattgtatagtttacaatttttattaagtaacgttctgtcaaacccgtcatgccaacccgtcctctaaaaaaaagtcatttattttattaatgttgatcttatttatgatatgtttatgaattattgtctaaatattttgtaattttgtagtaattaaatgttatcaaatatctctacggtttgataattataatcatgcagaaaagaaatatcaaaaatgataattttgtagtaattaaatgatattaaatattttagaagttttattttagtaattaatcgtgtagttaaggtagagagattttggaaagattgttaaatgtcaaatatttaattagaaaattttctttctaattatcaaaaacaattattaaatatcagtggcagccgatgtaaataaatctcaactccacaatttatttcacaaaatgggtgcaaaaatgtatatatagatgataatagtaaaataacagtgaatccgtcgtgacattacctattcataacttaaaaagattttctgttaatcagtgattttgtttaagcatcaaatcaaaagacacatcaatttgcttaaattataatcgagataaaattggtgataatgatattgaattatactaatataaaagaaattaatataatcaatcatattggacggcaggtgggacacttcataagattaattttaacaattcacatggaccacgtgcattactatgctttcgatcttctttgtttcctttcaagatttgattccttttaagttctagaaataagaatctacagaaatgtcatctatacatcgtaaacattatctcgatagtaaaaattcagcttagaaatgtaaataattgttaatgcatcattcgtatcaatatcgacgattacaaagacataagtcagtgattcagttaggaatcttacgatattaccatgcttctctctattcaagaaataccatcctatttgtaacagatttattaattcttctacatatatctgagcttcactcgtaagctcgatcactcgtttacatgtctcataccgaagataacaatttattaaatattatactacctttttttttgcagattcaactttttcaatatataatattactttttctagataaagaaaacggtattaaatatgatctgatttctaacttttatcattttaatttgtcgacaacttttaccactattggaaactacaaaggaatccattcgattctaaatcaagggtatttacaagtagttgcctacttgcctttagtatcagaagtataaaaaggcttcaaaatgtcttgtttcttgcgcaaatatttaaatcaaagattcttggtgcttcgagatggtttatggaatagtttagttagagcatcttcaacacatccctatttttggccttaaactttatttttgtctctattttactccaattcatctctattttcacctctattatagaattctctatttttttctctatatataaagacaaaaaatagggatctctattttttctcctatttttctttataacaaatagaaatctttatttttgaataaccattggagtgaaaatagagatccctatttttttctatatttagagaaaataatagagacaaccattagagatggtcttacacattgtttgtaataaaatcttgatactcgattaaaaaaaaaattgttattaagtttgtttatgtatctgttttattagctcatcattcagctttttcttcttcttttttatttgctctatcgcaaaaacctattcactaatagattttaaaacaaaagatttctcgagactagctcgactctctaatggagattgatgagtgaactcgtaaagtacagactcaaatattaaaatcatcaatttcttttagaattttggggaccatttattttcttttataatgatggttttactcttagtccaatactaacgaccaccaaattagtatatttttactaaaaaatattaataaggttatattttaataatcttttaaataattattttaaaacaatctccttattattaaaaggaaagtacaaattaaaaaatagacaaatttggcttcaatttcaattttaattttggattttgtacatagacattaaaggtaactaggatttaacccgcggtttaccgcgggcaatcggtttatttagttcttatactaaatattgaaataaataatataaattttttaatcaaacataactaaataataattaggatttttttattgttatttaatgataagaggaatgtgtttaaattttttttggttgttatttacttatttttgttgaacagtttagattgaagagaattaattttattgaacggtttagcttgaatcggatcatataaagtttaagagattgttaagaccaaattacctttaataattttgaatagcaaagaagaaaatccaaaattgaaatcaaaattgaggccaaattagacaaattttcaatttgtacctcctttttaataataagaggatgatttggtcaactcaatctatttaagcttataggatccacgttattaatttcgggtgggttaaaagtaatgatctcttaatcacggattcaaatacataatcgggtttagcatccaaagtagacaatcttaaccgttcaacaatatcgatatctctacttcattttggtatctaaatatgagtatattccatcccaaaaagaactataatcacaaaaaatatttcaaaagcacttataatcgcaaaaagaattacaccacttttactattttacatttttgttactactttacttatatttaaattacatacacatttactaattaatacacatatttaaacacattaaaacacattattctaatcactaaataacaatcaaccaataaaaatctcaatcattatttataaaaatttaaaataaaagaaatattttataaatttacaatataaaaatataatcaaaatacttaattaaaaaacatataaaactgaggcccccggtaaaccgcgggttaaatcctagttattacagtaaaagagataacaatttcttttctaattcggataaatttttcattgtaccagcataagtttatgtatgttttcaaatagaattctataattttcactgtttaaaaatcgtgagccaatagaaaacaagattcaattggtttttgggtgaagtttagtttaaaatttcaatctcaataccgtatttggaagtataagacctttatgacactttcaatttggtaaatagataaattctgatacacagatgttgggagataagttatgttgaccagtgtctcactaggctaatatatctcataatgaggttaaggtcaaatttgagtccattggagaacttcaggagttgatatacatttaaaaaggtggttagataaagaagcacattattcatgctgcgattacaaaaaataggtggtccacacgtttatgagcttcgtcagctaaacttttcccatcaaaaaaaaaaatcatttttaggtcaaaatcaagcacttttttatttttttaaagcagaaattttaaaaaaaaacagcaaattttcaaaattatgaagtttcaaattcactagtaaaatcaaataaaaataaaataattatgtaacacttgagattaaattcttttatcaatttgatactttgccatatcattaaaaaaaagaaaaaaaaaagtgtatggtaagcaatgtgttgtcgtctactgagggtactattacggcggcccataaagaaaacgactgcgaatttgtttttattgtttttgtgtttatttgatttccactatgtttatagcacgttgtgaaaactatttgatccaattctatctactccacacttcttaaagatttcgattttttaaaaataaattttatttcttttgaggtctagcaattcaaccatcaaatatgatcttaggggtgggcgcaaggcgagtacttgctattttagggatatttgttactcgacttgccttgtatgagtaatcaaaataagtacttatatttggcttgttaaaaacgagtacttgcaatttcaagtacttgctaaaatatgattgccttgcgagctacttgccttgtcatgttacttgctacttgcgagttacttacacttacttgcgagttattacttgttatttgcgaattatttacaagtatttacgagttattacttgctacttgcgagttacttacaagttatttgcaagtatttgagagttacttgcaagtaacactttcgaattacttgaaattacttaatactttatttatcatattttttacctgtttaaaatttactttacttctaatatagtttttaaatgtgtctaacactaaaacaatacaatatatgtatataaaatggtaaaataataacgagtaacgagtcaaacgagtcgagtattagtttttttttcattacttgttacttgacttgtacttacaagtatctaaattatactacttgttacttgccttgttaacaacgagtacttgttttttcaaggcgagtacgagccaagtagcgagtataggacgagtaacgagtacttgtgcccagccctatatgatctatcataatatttattctatataattgttggaagatacttttataattttaagataactaatcaattagaaaattttagttaactctttttatcaaaaaaaaaggttcccctgtgcatttttaataaaacttttgatgtagtattaagaagagttgggttgggtgcagtgcaacttttttgtttttttcttatataaccgaaaaaatgattatatgcgaccaccataacatgcaaaaaagtgcacactgaaaatttatattgatggcctaaaaagattattaaaaaggaacaaaaaaatcttgtgactaccataaaacctttgtcctagagatgtgtccatttcctggtttcgtcgtcatcagctagtcaagatcttatcgtgttctacgtttggccaaatatgttttctactttattatattgagatgtttgccttggtttatcatttttcttattacccaactattttattttgaataactctaaaaagtcctaaaacagtcaaaccattgcatataatgaacaacatcaaattaaatcatataattaacttttaaaaatttataattcttataattcttttctttactttacaagtgtaaaaacattttcatccaaactttcctttaatgtcttataaaaaaagcacatgttaatatctcttgaaaatgaatatgctatgcaatgtttgtttcaaaatcgtaactttatgttagttaacttgttagcgattagatggattagtcattgtaaaagttttcagtatctgtttagctttagtgaagtatagagaattatacaagatttcaacgttacgtttctattacatgattatcttttaaatactatatatcttgtagaggtattttattcatctttatcacttttagttttgcaacatttcagtttcgaattttgggttgttttgatatggttttcgtttaaattcgggttctaacttcatatacaaacgattgtcaaataataggagcttggacataatatataggtgttaactgttaagttcgtaattacttttgttaggatttattcaaacaaaatttcaatacaatttcggttgagtttcagcaaatttaaactagatggaccatggatacatcaatttttctttaagaatgaatgattctaggattttatgtcatttttgaaaacaacaccaaagctttaaacaataacaataataattcatttcttaatagggttctctttactatattcgtctatgtattgttttcctttgatacatagattgccgacaaaaagaaattgttttgagggtttaaccgactaactgtaacaattagttgctaaactgtatcattgattatcaaaccaaacgatcgttgaaccaatctactgattagtggattaataatagaaaaccgtattagccatctaaaattgtgtcagtttagaatcgactgaccgaacaacctctgccgattttagtaatagaaaaccgtattagccatctccaaaaccagatttatcatactagcatataaatgagtgctacctaccaaccaattcacaaaacctataggatacaaaagttggtcccaattttggtaaagagaaaatactcgtttaaattgtttccacacaatcttatgccctacccattctcaggctttattatgataatgtcttaacagtaatcttaaatctttagatcacatatatagtgcacgtgacgaaattgtcatccacatatggttgtgtcagaaaaattggccatttttatgtgtgacctttcacctttagtggtaggtgcccactcctccccctacgttgacacttctgtatggagaaatatctagtagaaacaaacaatatcaaaataaatggtggaagaaaaagaaacaaaccttctaattataatatttttatatcctatatatatatatatatatataagatcaagatgtgtatatgaaatacatatgtagatcgtagactagacactttggtagggaacaaatttatgattttattgagacacgtttttaaagaacatcttgtttttctctttaaaaggttataggaaaagaataaaataacttgcaattgaaaacttatgtggtccaactgaacgaaacagcttcttcccctgccaaagtgatgcttattgggccctaaagtttttaagacctaaatgacgtagttaaggcccaaacctatcagatcttgtgtcaagcatcaagaggtgaaagcaaactagcaaagtttctcttgggatttcatcttgagatggattcaactcgttcttgctgaatatcttctcatcatagagtgttgcatgcacggtccttcctccaaactattgcccatctattgaggataagaacataaggaatcgtttgagcacagcaagacgaggataagacgagaaatacaaaggcgggattcaaatgtggtttgctcagagacaacatatagtttgttctgaaaatgttctaaaaagattgcattcttatgtataaacagttttttttttttaatataatttaacataatatttttaaaaaaaaggatattttcctaatcttgtagatattactaaatctctcttatgtatatttaccatttgtattagggctttgtataaatactcgaccttgaggtctaaggaatacaagtcattcattcacatattattgagtttgacaccatcgagactgagaccgagaattaactcgctagggttaacacacatttagggttctgtcaggagccgccatgaaacgcaaggacgatgaccaggaggacagatcatgtagcagcgcaagtaagttagatccgatccctcttgatctaaagatggctacagtgcctaccaaatctcatatgaagaagagtcaccaaaataaactcgaggaagatgagaaagaagacacaaaccctagtaagttagagttagattcgctgcctcttgacctaaagatggcgatactgactagaatccctgccaagtctcttatgaagttgcgatgcgtgtcaaagatgtggtcttccatcatccgaagccgaggtttcattgattcctactacgctatctcctcgaagcaatcacggtttatagtcggtttgagtaacgctgcatttaacgagcctgagaagcagcttaccttcctcttctcgttttcccacgaagacggagagaagtcttcttcttcttctttggtacccaacttcgagatggcagttccctgcagcttagctggcctctcacactctttggcttctttccatggcattctcgctgttgaaggtaaggtgatgtgtaaccctaacacggagcaattcactacgttacccgttggcaccatctttgtggggtacgatccgattgacgatcaatacaaagcgctcggctttgattttgataagagatgtcatggtaatgctattggtcacaaggtttggacattgggaggtggtgaaggaatgagacagattagaggtgaccttgcaccttatagaccgatactactaccaaatgtatgcatcaacggtgttatctactatggtgctcataccttatcccaaaccaaagatccagttattgtgtgttttgatgttagatctgagaaactaagttttatcactgcacctgcggttgtcctccaatcggggatgaagtctatactcatagactacaaagggaagctagcttctattgtgagaaactcctgtggtggttgtatcagcagttttgttttttggatactagaagaccccaagaaacatgaatggtctaggcaaagttgtgattttccctactctctgtgggattatgttgggaatgtcagaatatgtttctttggcaccaacaaggctggtgagatcattattgccccaatgtttttgtcacgcgatgttcggtccttctacattttctactataatgttgaaacaaaaaccatgagaagagttaggctccgaggaattggaagcgatatagagtttaggcgctcttatggatccgaaaacaagttgtgtaattgccatgtccgtatcgcacatcaacacgttgagagtattgcctttttaaaggatcatataaatttaagaacttgattccacttatactaatgtaaaagagcattggaaactctgtgttttttatcattacaacgcttagtttgttgtctttgtggtttcttttgtttcaagtgtgtgttcctctcctcagttctttattttgttgttttataatatcacgtattgaagagccacggaaaactgttgaactcacaccactttcactcacaaactccatctctcacaactctgtttcttgttcttgataaagagaaaaacacaagaacacgtttaagaactttcatgtctttattgatagtaaacttggatacttggatataatccttacaccacatataaaatgaaaatggaggtattacatacctagactagagtaaccttggcaaaaaataaaataaaaaacaaggtcagaatacatggaactcatgaaaaagatattatcggatccaaagaagcatttagaggtctccaaagcttcctagagcgtcttccggtgattgtgttgcggatttctcgataaatcatcttaaagagagtagaaggatgaatcctttggtcgttgtgtaacacattgttcctttgacgccaaatttggtatgaagatccaccaatgtggactcctttgccgagtcgaatctagtgagaaagacacaacaaacccaagtaagttacatcaacgtcgagagtgttggctttcttaaggctcctataattttaacttgattccacggatcatgtatgtaagagagctctaccctttcattacttcttagtttcaatatttaatcaactgtttgattttcaacaccaatcaagctagtttcaatatgtaagagatgtatgtttattatgttagaaagtattgctcgcttgtcatcaacgtttatgagtcacactttcattttgtagcacttggtaggctgatgctagtaaggtacacatgaagactcaataaccagttccgttcttgtagacagcagaatccaaccatgagagttatggtgtggtattgcaagttgcccatcgttgcaatagatcgttttctttttatttattgtaatattggttggttttatgtgtagtttaatagctagacatattgaattgaaacgggaaaatacaacaaaatgagaagattgatattgtgaccaggacagaacaatgtttgtacctgttcttcttcaccactaacaaaatcagatacaaggaagagtcctgggatattcagttcagaatcagccaacacaaacatggttacatggaggtgggatcggacacaaaaagaaagtttatgacattggtaactcttaccaacttacaagttacaacacatacataaaagatcaaaactttgagccgtcaagaacagaaagtttatgactttggtattcccctttcccagatgtacattctatgccgtcaagaagcaacaatacctctctaggtggccaaagcatttccaagcaagaggtgattcctttacctttagacttaaatatttcttttaatcgagtagcatagggatctctttgttggattttgctgagaattcggtgagaagaaactagaggatatcttgtaaattgtatctatgaccactttgatgtttgctcgatgcaaatcattattctttagaaaaggaatataattatgttgtcaatggagtttgtttttgttcgttgtttgggttccacggttttacattcccagtgtttatatgatgcttggccccctcaatagatgtgcttagtgtttagtatatattccttttcttaggccatgtttatgtgttggtttattgtcttatagtcggtgtgttcatattatctttggttttggttccttttgcaaacggttattaggtttagtatttcttcttgtagtccatgtttatgtgttattgttgtgttattatcatcttgtaagttgtaacatgctcccatttgttgatgtttctgatcttttaggattttcttgacttggactttgtttgtggtcacctaactttctaactcacttactttttcaacaaatgttagaaaacaggttggtcttgtgtcaaaaaagaaacttatgattcggtggtgtctctattggcaggatttgaacatgacacacacgagctcctactgaataaagggaatgtttagttgtggatataacaagtatatttacataattttggacacaatttcaaacagatgtacacatttttgtgtatatctatgtatgacatatttttttagaatcgaaaatcaaattagaattgtataatgggaacggcaatattgattttttggtgaaccaaaaaaaggcaaaaatggcaaatccacaagttcaataaggaaatcgtatatccaaaatatttgggctacaaagtgacattttgtataataatcccatagttttaggattacactttttcttatcaggagatctcatattgaaatctagattaatctggaaaacatttaaaatagtgatcaaatatgattaaatttatgatataagaaattatattttagtctttcaactaacattgtgaatttttgaaatataaggccataaattgcttagttaatatatgatatctcatctaagtgatcttcaattgctaggacgagagtaccacttatatcttttgaaactccacactttttctaccttttaaccaagcattttaatatataatcagtctttatttttaactcgtatttacttaaatactatacaactgaaaatgacaaatttatcgtgatgggcttcttttggaggaaacataagtagcacgaatgttgataaggaaaggccattcgtgtgccactctttgtcgcctctctttttatttttgttttcctaactattctttataaaatagaatttttctaaattggaaaagaaatagaattttcatagtaatgcattttagaatttggatcctaatctgatattcagaaaaaggttttaaaacaaaagtttggaaggaaacaacaaactctaaaacttgtcttccacgacttaagcaaataaaatctcaacatctactctttatgaactcaatccaactgtcttcgcttttagatctagaaaccgagtcacgaagagaggtctaataagtttatagtagctctaagctataactctaggtagtttgtgttacggacaaaacctatctcaacgttatgatatatagaacaattagcaaagtacattaatgctataaaatcctagcagagctaggaagaaaaacaccgtattaattgtttttgaatccaacaacatttacattgacgaacaaatgaagaaattcaggaaaaaaaccaatgcaacaatgagtacttcgttttgtggccggtattcctttggctcaacatttacgattaagaaaacgtaacaaaatatattctacaaaaagaaaaattgaaaaatgaatgtaccaagattcaactttggaaaaaagacaaagaagataaagttgatatttataaagtgaagagcaaagggaagaagcggtcgatcacttgttctgtagggcttccatgcacatgctattgcctccccccccccccccctccccccccccctcaatttgttcttatattcaatattaataattatgttaagatttttttcctcaattattgagtttttatatagattagtgaaggaaactactagaaaattataattataaattatgttgaaatatatgcttgttggtttttcaatatttgaaatatcgtttaacaattcatagtaaaataaagttattatttggctttttagaacaccatttttctctagtattattctaataaaatttagtttatctccttatttttgttgctatttgaatttatttatttttttgaaaagaaaagtttttttaattaataatgagtttactccttagaaaatataaggtccctcgaaccatgatgtgtttgtttcaatcaccacgaaactaacatattctttttgctcgaaataattattctgttacgttgacatttccgagtcatatttaattgtaattacacattggatctgctaattatttattgctttaaacgataatgattggtggtctatgtaatagtggaccagtacctaaataattaagcgatatatgtgcaattggataatgcatgtaatccgtgattctttgtttactccgaaatcgttaggggtgtaacacatgtcagcctaggattcactaaccatttccaaatatccagtctagttttctttttagcaaattacttccatcacatatcaagagttgtacacacattcatcatattaccattacgagtctatccaagtctattaaagattggagtcgtgaaaggctacttaattaggccatctatattattgttacaagattgataaagattgaaagttgtcacactttgagaaaacgcacctttgtcactttattagcagaatgagcaatatttttcttagatcaaatagctttagtttgtaaattcattaacataatgtatagccaatgccctaggttctttaaagcttgaaaatctggtattgattcaaaccgaagctccacatattgaaagtgaagtctccacatatatgtaggttctcataattttcaatttttcatcccgtagtatttgacactccgaccaattgtgtttatctttttatgacgtaaacgatgaaatatctccgaaactataacactttttttgttctctcgcacacggtatactattctaactaggcatgaaattttgatccgacccgattgtaccatcccaaaccaacccgagtcttttggatttcgatacaaattagtttgacattcggagagattggaatttttgtttataaactggattcgatccgataatcgattggttattaataagccaattttagccggagaaacccacaaaaaataatataatattttttaaagaatagtaatagttagttgacaaaaagatgaaatcttactacttattagacataatgatatcaattgttatgaataatttgataataattgttagtgacatgttcttacaactatttttttgggtatgatatgtaagttttaataagctgtcgttttattttccatgtgaaccaatatctctcatactgctaacataagattcgatcagttagtaggaataaatttacggtatataaattagtaatcgccagattaataataacatatttccatcactcttacattcttacttaaattattatgataaagatatatagaatctctgggtagatttgactaacgaatagagatgtcgtggtgggtaaaaaagtccagccctacctaaacccaaaataaacccgcccaccaaaaacccaactttagaaaatccagatgggtttttgatttaatggataaaacccgaaaaaacctgattgttccgagactacccgtgggtacccaacttggtttctgtcaatttcttagagtttatttcaagtgctaatatactattatatgtatgttgtatctataatttgcttataaatatattttaaattgtatttattttctgtattacatatatatttgatgggaaaaaggttgaattgcgtttttggcggaaaaatattaaattgcattttttggcggaaaaatgtcaaatccttttcttggtcggaaatgttgaatgtcgtttttggcgggaaaatgttaaattgcgttttcggcggaaaaatattgaatatcatttttagcgggaaaatgttaaattgcgtttttgacagaaaaatgtcaactcctttttggcgggaaaatgttgaatgtcgtttttggcgggaaaatgttaaattgtgtttttggcggaaaaatgtgaaatcatttttggcggaaaatattgaatcgcgttttttggcgaaaaaattttgaattgcgttttggcgggaaaatattgaatgtcgtttttggcgggaaaatgttgaattccgttttggcggaaaaatattgaatgtcgtttttggcgggaaaatgttgaattgcgttttggtgggaaaatgttgattgtcgtttttggcgggaaaatgttgaattgcgttttggcgagaaaatattgaatgtcatttttgtcgggaaaatgttaaatcgcggttttggcggaaaaatgtgaaaagaaatttgacgagaaaatgttgattcactcgaaaaaggacttaaaaaaaactcgtggatacgcataacccaatgagataaacccatatgggttttatttatttgggtacccaaaaacattttaaatctgtgtttttttccaaaaaaaatagatctatggcttaaaattttatgtgggttttgggtatccagcgggttttaacccatcattaacatctctactaacaaaagtttatatatttagtatatagtatgtaattgacgccaaaagtaatgatgttcaacgaatctaacgaatcaatcggcggattcagttaatcaattgagtataaaaatcggcgcatttgatttagctaatcgattaagtgaatatttaagtatgattgtttattgtactcaaccattagtccaattaatcagagatatgtaaatgaaatggagactataaacgttaattaaataatatggtcaactgaaagtcgaaattactaggttacaaatatatgaaataattatcaatcaacacatttacatatgacccacacattacacgacttgatacaccttttttttttttgggtgaaatgtcgtaaacttattctacattctacaacacgatgttgatattcttgtatcagttccaattcatataatttataaaatagttaattattttggaattcgatttaaattcactattcttttatattaaccatcttacgagatgcgtttctgaaaaataatttgatgctaaaatttaaattcataggagtccaagatagtgtttgcataattaaaagaaattgtgttgccaaaaaaataaagaaacaaatgattgtctttcatacaaatttgcggataggccaaaaaccgatctgattgatggttggtgaaccgacgcagctctcgtcgtatgatgtacatgcaatgtatatatgcatagcataacatatagtttgtaagaagacatatactctcatatttttggtctaatataatgggagctttcataacaatagaatatgggactaaagaaatgaatgcgtagacaaaaagtaacatgtttgttttgtattgtagcttcctagataacacaagttacataacgattcttaataatattcagcttacattgggacatcatcctcttccaacacatgcttttaacttatgaataagcttttggttatatatttgtccaaaaaaaaaaaaaagctatatatatacacattagagaaatatattatataactaaagatacatactaattttattattctttatttaagcttttcatactaaatttgtgtaaagaatattattatatgtaaataagagaaaacactaatgacaatttatatttggtttataatagtgttatctacacattccaagttagtaaaatatataaattccatacgacagcaaaataaagttaattgtttcatgtcaaatccataaaaatgacatatgccctatattttctaattaatgcatctatacattcaattttcatcatccatttttttctgatttttttttttgacggcaagcattttctgcaattaatatgtatgaaaattcataattgaacgagtctacattattttctgatttttttcatctatatgaaaaaaataaaaatagaaactaaaattctagtgtgtaagtcaaaccaaagtaccaaatattgagcgagtctacctacatgggaggacgtgaagtaagaaaaagtcagaagacttcgcaaagatgatgagtttttttttagtagtttaatttcattaattataatagtcaatcatagattagatattttagctggccaaatcactttttcttcaaatcaaaatctccttttaacccaatctttaacaaccaaaattgacaagctagcatcaacatacacacatatacatcaaccctctgtcaaaatctccctctaatcactcattatgatttacgagtatctcaataatacctcaatttaattactttaattagctttaaaacacaatatgtatatactaaacaaaaatcccaaacatgctcctggttcctgaatttctgctcaacaaccgccgaatatatattttattctaaaaactataatatttccaagcttttgcagttagaaagttacacaatttgcaaaaaaacaattaagtcaagactaaacaaaaattacagtattgattagtttctgactatcaaacaccaaaaactaataagccagattaattttataactcaaaaactgatagaacattttaaggtttatatttttaattttgttgttgaatttgtagaatcacagaataactaaacaccaatttaaataattccaaaattcgaaaagtcttgtaattgataaaactttgcagaatctgaatcacatatctatattacaaattataaacaacaattaaaaaagaatttcaagaaactaatattgttgttcccttttctaatacaagaactttaaaaaaaacatgtaaatgatcaaactaataatttgcaaaaccaaaaaaaaaaagccttaacaaaaaaataataatctcaacctctatacaatggagaccgttgttgaaatatcatcttcgagactcgagattgccggaaaaccttgatcggactcggaaaattccagcctttacccttcccggtcgccggaaccggaaccggagaaaatccaaattctccggcgaccgcaacggatcttgatttcttcataatagccggtttagtatctcctctgtttcccataaaaattctccaaaacgacgacgttttcttactcctaccatgatccaaaccggaatcaataaccgaatccggtttaatcgggatcgccatagatttcgatctccgaaacgccggttcacattcaatcaaactcgcgactcggcccaccgatccaacgccggatatattaaaactgatatctccggcgaagatagagaacgacgaggaagacgaagaagacgaaggagagaaagatacggcggcgcgtgagctacacgaacaaggaagatcgtgagcacaatctggacaaagagaagagagacgttcgtggagacaaaatggacaaacgcccccaccgctaaaataaccgcgttttgaaaagtgttttgaacattgtgaaaaaccatcttcgtccatgtttttgcgttttgaagattcagagaattttcttctttcttcagtttctcggagtttgaagaagtgaaagagagtcgaaagagagagtttttataaaggctcgtgtgttttaattacggttaaattattacggtgcgttgcacttaaacacacagaattagctcataaggttgatggttatttacgtttgtgccatcatcaatggaaccattcagttcattcacgtgtggcatgactttggaaacgacttctctttcctctagttatttatgaacatataaatcgaaccaaattgaatttgattcaaaaatttaaacgaatctgaattgaattttttctatacttttcatttttaaaaaaatatatgaatgctgtcaaaaaaaaatatacatatatatatatgaattattattatttattatcttttatataaccagaaaatctcaaatcataactcataataatctcataacatgtggagagcaagaaacttttatttaaaacatccagtgttgaaccaatgatagaaattgaaatgaaataattgatactacagtgtatatgtgtaattacaccaaactaaggctttgaatggatgttgtggttagtgcggactaatctgtcagcggtccagtccatattatttgtggggcggacaacaaactgctacagacttagtttaaagacggtccgcagttagtccgcagcgattttcttttattttttttgggtccgtatcataacagagtatagtttatgaatagtaaacaaaaagcggtctggtctatagacggtttgtccgcttgaaccgttataactattcaaagcctaactattaaatcagagaaaaaaatctaacacaattaattcatatatctgattaaaatatagtatcgatatggcaatatcccaaaaaaaatttgaaccggttaaaattttgaatttagtcgaacaaaattgaatagccacctttgaatttaaaatttcaaaatatatatttgtggattgaatgatctgaaaatattgctaaaatggaatccaggagttcataaatcaaaatatttgacgtgtagaaataaaagcatgtatgtgcttagaaaaagacagttccgagttatggagacaagcttacttacaaagaaagtgacctgaccaactaatagatttagatcatggccacttggtttctaggcaaataataaaaatagttgttgaattaaaatggaacacgtaagattcgacgaaaagaaatctaatttgctgcttcagatttctgaaccctttttgattaaatttagttgttgacaaaactcactacttcaatatattctcgttgaacttcagagttatacaaatctaagtcaatgagtagattgtaattatgtgctgctaaatttgagttaaaatttagtatggaagaagactatagagatatatggaaatccaattttatcaccggtctaaagagatgttacattacatcatcggtaatgtacattgatattattctattctcgatttacaattgatgatatgtcgtaacattgtgatacttttattgaacttatgtcgttaaatgctcttaaatctctatggtcgagtttttggttttggcaaaaaatctcttttttatcaaaaaaatctctatggtcgagttatttgccatgttcctctagaaattggttgttgagatgattcggtgggctttgtcgctggatatttaaatttaacaatttctcactaacatatagctaagaaatgggcctcaaaccttctcgattgtgggccaaacgttcaacaaaagtagtttatttctattacaataaaatttagaaagctaacagagcttgattaaaaaacggtaaaaaatgtgtttttttagtcaaatccaaaacagattaggcgcataataattgttttttttataacttttttctttctttccaactcaaattctagaaaaaaatatatctcatacactatatattaataaagaaacacatttaaaagaatagcatttaactatcgtgatatatataaaaaggataaataatgtatcgcaaccagagcaatcctcaaccatctatctagtgaagttattatataaaaacatcaataaaagtgatgaatttttgtctaaaataccatcttttcgaaaaatcttacaaaaacaaaaaaagtttacgaattttttcatttattaacattttaaaatgtacgtatttatgattttgttttgcaaaaatacgtattttatattaaattcaagtatgttttgcacaaaaaatatataattcctcttcttggattgatcgaatgaatttcaagtatgttttgcaaaaaaaaagaattatatactataagttttcattactgtttacttttaatatatgttcatgaaaattattttaatagaagtatttttttctttggacaacatttaaatgctatggtagtatcaaatttcatagaaacactatactatattaaacgatatattgcacaacacaactactattattcaaaatttcgcaggcaatttttcagagaaaatatagcgtatattttgtagttctgtaacttctgttcataaaacatacatagagctgtgtcacgaatattacatctcatctattggatcaaaatataatattacccaaaattagtggacctatagataagagacaaagaaaattcttaacatgtaatattctgattaggtattttgtcttctatttccggcaagcgactaaaaaaagattttaaaaaatcctactatatagtactatatataaggattgacttaaaccagaccagagctcaaataattggaactgtttaaaattaataatggagctagtctacgctataagtcattattattaaaggattagttgaaaacttagctaacccaattaatattttctctgttgcttcatccaagactcatccctctcttgattcgatacggcaacactttatttataaatttttcataaaacatgatggtaaatcattttcgggattctacagtttatatttatcgtgcaaataaattttatttataatttgtaacaatttattgcctaattgtattagattgacaatacaaatgtaataacgtgctcaaattctatttttgattaatgactaacattctcttctttttttaaggctaactttcctacacatataaatttaatgaatagagctatgtgaaaaaatcatatataatctataaccagaaaaaagatttgtgacaaaaatggatgacatgtactgttgctatacaagttgtaggaaaacaaattacactatttaaaattgatttattgtggaatatggaaatcactgaattaaaaataagcaaaggatatgttttgtcactattaaataaaggaggttgatggataaaataaaatacttaaaacagaacagtattagaacagaaatataggcaaacaagaaacaggttaaggattaagacagtacataaataaggataatttttgtagaaccatcgaataagatggtgtccattgattagggttgtcattatctttcttttcttattgttcattcacatccactaaattaaagaaaactaatgcatataatagtaacataaatggcatcatcgcattacataaacttaatgccaactatacaaaattagtgacatttatacacctacatcaactttgattttatattcatatatcttttatatggctttttgtacatagatatccattactgaggtgattattgtagccagaatttatttggaaaactatgagtattgttaattattgttaaacactttaagacctggatataatctggttcggaattgttttgtccggtttaatattgtgaaaagaatgtaaaatgaatattaagttagtcatagatcgaattcagtacttagtataaaccatctataatgaataatcagtaaatcatacataatcgaaatcatagtctataaaaatcagactttatttttacttagtagttcaaccacctataatggctcatggaacttgatcctgcgttaatcagtaaactaatattctcgatggtgtatacatgtaacatacatattatgttatttgagctattttccgatgaaaggtaaaattgtggtgttttagagaaagagagggagagtgacttaaacatctacttggatcaaacaactttgaccatgacttagccactcgatcatcccatctaacggtggctaagcctcccactagacatttagatttttacgtaccaatatggacttcgattcgacttggtctgataatcctacgatcaatacgtgtttggaagggtaaaacctgtcccaatgtccactcatggttatataaaaggtttgacccaaaactcagctatacatacctcctatactatagatcctaaaagggaaaattttcaaccttacattagagaatattcactcaacaacacaccttggctcaaccaaacttagatttaatatgatttttttctacttcttaatcatatgtatacattattcagatcaaatttcatcaaatggtatggttttgttaaaaaaacaataatcaaacgatcttgttaaagatacatatcattaactcatagcggaagaaaggttagcacctttttttccaaccctcatatgcgttgtatacttgtattattagtaagttgtcccgttattagatcaaagaacatatccgagtatttgtctccacaatttaacaatggtaaaatcacattcgcgaaagtaattcaagatatactatgtagtacgtactcaactcttcaaaatttagtggaattttagcattgtttttcagaatcaactacggatttaccattttttttagatggcattggtggattttgacttttattaatagtttgtgaattttgtctttttttcaagctattaaaatatgatttaatatgtgttttatccattatatttgggtttagtcggttatggttgtttttatggtttaatattttatataaaatacatatttttactaaaaaaaatcctaaatatatacatttttaagtattaaaaaatagtaatccgtaaaattatagtaaaaatgataatttaaaataattttttttcaaaaatgacaaaatcaacaataatctcttgttctcatattttaaaataaactttgttttggatatgtaatgtaaaatatttttatggaactatcaattaatttataaacaaaatagaaaatacccaattatttttgtgcgtatattaactttagaaggaaaacgtgtgaaaatgatatttattattaaaccaaaggacttgaaaaatataacaaattaacagagtgtaaagtagtattatacgtgtaaaatcattaatcaaatgaacaataattacgttactctgttcattaatgacgatccaaaacagttcttcacttgattagattgggtgaatttcttttctgtcttgaattgaatcagatatttttgatgtatttcccattatgtgtattttaaaaagtaatgaagaataaagaaaattaaagttttggagattaaacattactataaacaaataataaatgtgaaaaggagaagaagaaagatggaaagtgggaaggatgggttcggttcattgaaccctccttaccaaaagcaaggtctctctcagcttcggagtctaggttcggttttaggttcggtatagtcgacttttgtgcggataagaacgactcttcgctcttctttttacacgaacacttctctctctctctcctcactctctttcctctttctctcactaaagaaaaaactagcgatcgaagagaatcatcatcaagaagctactatcagagaaatcaaagccctacaacacaagaatcaacatggtaatcacaatagaagaaagatttgaaatttgttaaagtctctgttttttctttcttcttcaaatgctctgtttttacttcaaagatcgattcaaattccgtcaagaactctttttttcacagctctgatcaatctttattcgtttttacccaaattgggttctctcaaaactcgaatcttttttctcccaaattgattctttttaaaattcgactctgtttttcaatagactctgttttgtttctatggttcgtttgatgctcattcgtttttgttacagggagctgaagaagaaaccaataagacatatcctcattggctaaaacctctgctacgagaaaagttctttgtacaatgcaaattacacgcagattcacataagagtgaatgtaacatgtactgtttagactgtaccaatggtcctctctgttctctctgcttatctttccacaaagaccatcacgccattcaggttcgtttttcctttcttaaattctttacctttttaccgtgagagagagagagagagaaagaacatgtggttaaatccagattttgttagtttggttggtgatctaactttattttttccatttattattccgggattctcgggaaaaaagtaccagagagtgttttgattctgaactttgtttgtttgattaaattttttacagataagaagatcatcatatcacgatgttataagagtgtcggagattcagaagtttctggacataacaggagttcagacatatgtgatcaacagtgctaaggttgtgttcttgaacgagagacctcagcctcgaccaggcaaaggtgtgatcaatacttgtgaagtctgttatcgaagcctcgttgattccttcagattctgctctcttggttgcaaggtaacaaaaaaaaaacgttttatttgttggatttgagtgaaaaaacattaatgtctttgatcttaaatgctttaggagttagttgtgtgttggtttggttgagagaattgagaaagtaaaagaaattttctatgtttgggtgagaaaatgcgggaaaatcaagtatatcccggtaaaaaaactaacattagtgtcaaaatttttggtcggtaaatatatatttacttgtggagaaagttaactcaataaatattgtatagctattttggggtttatgtaatgaaccaaatactatttgaagaagaaaagtataaacttagttgaataggtaaactaactactattcaataattttccttattaatgttgattttgtaattagaccgtcatttattctttaatccttgtttgatggggattgaaaaaaaagggattttttcgtgttgggtgggcgagaaaatgtggggcaatgatagcaacttcaagaaattgtgaagtagaaaaataataatagcatttgggttgacgagaaagtatgggagaaaattccaagtcaattaaaaaaaagcttcgtccttaagcaacacttcgttttaaaggtcttttcattttcattacttttctaatggatggtaacatcttcctatttgttgtttataggaggtaattactaagatatccttagcaagagcttgaaacttacgttgatcttgtaatgtttttgattagatctctggaatatcgaagaagaagagaaaggaatggacgaacaatctttcggattctgatgattcgtatagcagtacgagtatcggaaggctcaagaagaatgatgacattatgaataatagtttcacaccatcaacaccgcctttatcagccgtgaatcgtcgaattgcaaagcgaaggaagggaatcccgcatcgtgctcctttcggaggactaatcatagaatactaagaaatggtaatgtatagtcttatgctaataaccatcactagtagtttcggggtacatatatgtatatatatatatatctataatggtatataaagcaatgtaaaataaaagcttaacatcatagtattgtgtagatattaaaggggtaaaaaatgttgggaagatgatagaatgaggcatgaaatgaatacttgtgcctgtatattttgagctcaatggacaaatatgtaaatgtagaatagtgttgtggacaagacaatagtgataagtatgtgatgaatgtgaatggaataaaggtcattttactttcgatgtacttgtttcttgtttttttgttcatttttcagtttctactaaatatcaacttgtatttttctgaaaagtgtgttcatataactaaatccattgatggcaaggaatctgagaatagagagaaagaaagagagttatttcgctcaacttgtatttgactatagaatcgacttcctaatttaaaagatgtcattattaaaagatctcactactatttgacatttacaggggaaaaaaagtagtatatgaggcaaaataaacacgtacgtatgaacaatgatttaataacatttataagaattcatcttaattactctatagattctaaaattggtgtgttacaccttggattttatctccaatatataatttattcatgaaatttttattggaatatatttcaaatgattagatctacaagaaacttggaaattttctcagcctgaaataccactatatattttaatgaattttaagaagttttaattgaataaactaagatttccatatattatatcaataaaattttgttaaaatttattttcagtgcattatttacatatattatagcaacactatatataagaatcaatgatttaataattaatggattgtgcttagatttaaattttattaaaattcatgattgcataacaataacacacaacacttccctcttctatacactcgactagttccaaagatatcctataatatcgtcttcaatccctaaactcttaaagatgtatcaatctcatcatcaacaataaagataacattcacagctaatctaaactctaataatctaaacatgtaacaactaattgtataaatgtgtttttaatgagaagattcatcttaattccttagtaggacaaggccatgctcatcaactcgttagatgatcagcaaaatttgtggaatggatctgaaaagtgaatcaccggctacaaactaaggtatatatgattgccaagagtgtagttaacgattttcaacgagtatctcaaaagggtaaccggcatgaattcatgatctaatgatcatgatcgctcttctatcatggtgtagaagagaaagctccatttggtttcagtttattctagttctttatatatgttggcgtgactaaacccttgctcctgtggcttttgtgtttcctttgaactatcttccttttcttaataaatctaggcccggtggacctagaaaaacaaatgttcacatgagttgtgcacgtgaggtaacttaacatgccaaatgttgtgctactattggcagaccataatggctcgagagggacgaagccaatgatgcgttttggaggaataaagaaaaaggaaagacagagtccaacggcatctacttgtactgagagtgggcttttaaagcttttttatgtgcatttttatttgtgggactcattatcgtcatctcttctttttgcccatccgattgtcccaaacggcatataattgctgctgatgatgtaatcttggccgttggattctctcgaacttgttagaaacgtgacacaaaattttaaaatccacattgttcgtcatgttgtcattttgttattgtaatcatgtaacagtactataaaatgaatagaaaaaggaacaattctggaacaagcatgtgtcatgatgttgccaaacccactcacaccacgcaaattgtttcgtccgattgtccaacaatttttctaatatattaataatgtactattttaattgattcttaacttatagtgataatcgtaagctaagtggaaagtgagatgtgattaatccataaaacaattcgtttgttttcgtttatgaacaggtgaccaatattcacctaccttttatacactgatcggttgattataaatataacaaatccacataatagtgctctaagctatctaattaatctattgaggataggttcgatgtgctgtttaaatattatggaagcaaaaaaaaaaaaacttttaacatggatcatggatatagcctatgaaagtgaaatacgtcatacacagttcaaaaatattatcttttttaattagaggaaattcgttcaaaattttcattgtaatttttatcgaccattgttgatgttttgaatgacaagaatacattatgcctaacaagtttaatttatgaatgaatgcaaatttatcaaaataattaatatattttaaagtaatatataagattaaagaaaaactaaaactaaagtacattgagttcttttctagtttaccgcatatattaaattaaatatttaggatattagggatattatttcacatcaaaagttgagtataattttaagtgatatatataaaatataagtttctccacctataaccagtgtcgtgcctaaggttatcggagattaaggcgaagttgaaatcggaaaccaaattttttttttgtaatataaattttaaataaaataaaagtaaaaaaatttcaaacgatataaagtattaaaaataaaagaaataagaaacaaataaaacactaagacacgatcttcctttgatctcaataaattctttcacgaatttaagaatttaaaacctaaatcaaaaattttatttataaatttacaacctttactcaattccgattttgatttcttttttggtttgagatacgtttccttacgggtttagaaatctcgatttttttttttctttatttattctcaatttccttattctaagcctaattgtgtataaataaaaaaaaaaggtatatgccggattcaaatttgggttgttttccattaaagagttttctaaaaccattctaatacactacatttatgataattaggggccctaaaattttttaatattttcgttatctgaaataaatatcttttttttgctaaataactaattagttttaagttggaatctcataatctaatatattggaatgttaccactctgacaacattaattagttctaatatatatatacatgctaaacttttctattgaaataaacaacgtgagatcaaagagtggaaaacaaaactaagacgagataaatagagttttttaaaaatttgtccgtaaggatatttgggccaaacatacacctgaaagagtagattaacaggctttatttcggtccatagtatcacttgaaacgtttacttatgcaagcaccgaagcacccaaattttgaccataccaaaagagaacacacatgcaagtctctcgatcaattcacgtgtctctcaaccgctatgacgtggcctctatcctctgttcttataccttgctcttgaaggcaaagatgaaataattcaagaacaaaccaaaaatccccaaattggagatcaagatgtcatcggcgcaaatggatccacacgacaagatgagatcgcgtgacataagtaaagtcgcgagaggccagcaagcaccaagaccagctcacactcccggtacggtgtcacccccaccggaaaatgaggcaacgtttcgagcaaagagaggagatagtggaagagagacggatgccgcggtggaagaacgttttccagtgactaatgaaacgcgacattgtttcaatcggttcatgcaataccataagtaagttttaaaattgagttccactaaataaatgattaaagtgcatgattaacgtagtcacgatttttttttttaatacgtacataggtgtattgagaaaaatggaagagatgcgaatgattgcaacaacttgagagattacgtacgttcaatttgtcccgaagaattggtgagcaaaatttggtagattttttttttaataagaagcttaagattgaagaataatatatgatcactccgataatattctttgattctatttttcgatgttttttatttgtgaaggttgaaaagtgggaggaacaaagaaagtcagggacattaccagcgtcaatatgaagattagattatcgcatgtcgttgtggccttgtggggactgtccatatagtagtattactataaccaaaccaatgatcaattgaataattaattgatgaaatcatgtctttaaaagttctactgttctttctgcaagttcatccaaatctgaatctaaatatatttaagttgcaaaatcagccgaggttaagcaatatagtcattgagctatagatatacatcgtagaacaataacttgaaaatgaaaacgacatcaactgaaatctatctacaaaagagtcatatcaaaacgaataacattatgtagttgaatacatcaaaatcaagatggtaaactcgaagtgctttttcttttctctgccaagatgactactaccttgaagctttaatttgattccatcatttggtatcagagcttcaaagatttagaagctttgataccaattgacaggttcaaatcaaagcttcaaagtacaagtcaattggtagaatgattcattgactttttgttaatcaattttgacgttctaatgaataattgaggaagaaagaaagttgccagcaaccctaaactacttcagttgatgttcataacatgtctatatatatatgtgaatgaatgtattttctagagtaaccctaattacatgggctaagaaacatagatttgtgggtttgtattggacttgtcatgtgtcacattgttgggctttaacaattagtaatcaagttttaaatttggtcacataccactaaatatataattaaagtgcgtcattagtatattaacgaaaatactttttttgtttaagacgaaggtgtattgagaaaaaacggaagagatgcgaataattgcaattgcaagttgcaacaacttaagagatcattagatcaagtacgtccaatgtgccccgaagatttggtgagaaaaagctttcataatattttagggaattggacatgtttaggcacttttacaaacttttattccttttgaaacacttctcacctacaaggcacttttccttgtttttgaaaaataaatggacaattatatccccacccatctaaaccaaaaatttacttaaccggttaaaaaggttttgttttgatttggttcccttctaataaatcgacagttgatatttacagatgagaaaaggaagttaccttcgccgactgaaattatctcacaatatcaatgtcgatggttgttaattcttccgaccaagcaattactatggaaagtctcggaatctccaggtcactgtttcttgaattggttaatattactgtgcaacgatctctctcccttcaaacaaaacctctggaacaatttaaattgagttgcctccggcttaaccaaggcattgtgacgatgttttttgcagcgaattaaccgccactgtgattggagagatgacgtagaagtcgattaggaatctccccctgattcgggttatcgtttggatctgactctgtttctgcatcgtctcctccggaagaagttttaaaaaggaaacgacctacaaggcttgatataccgattggtgttgatggatttgtaactccgattttttcatcggctgatgtaactgtgacgtcgagggaggaatgtagagaggttgaaagagaagataatgattattctgtttattgtaagagaggaagaagagaagctagagaggttgtgtcaagttgggctccagtgataatgttagatgagcaaacaaaaaagtgctaattttatcgatctataaacacattcgcagcaaatcaaagacatacttgtccattaatgattgtccaagtagtccagtccatatggtcatcaaatgactcacatggtagtttcatactaatacataagtttatacataaacaataaacgtcaatccaaagtacattatccatgtctatttgaccatttatccacatgtgtatagacatgttgagacaattttatcgagttataaacacattcacagcaaatcaaagacagacttgtccattaatgattgtccaagcagtccagtacatatggtcatctaataagtcatatggtagtttcatactaatacataagtttatacatgaacaataaacatcaatccaaagtacattatccatgtttctttgaccatttatccacatgtatatagacatgttgatacaattttatcgagatataaacacattcgcagcaaatcaaagacatacttatccattaatgattgtccaagcagtccagtccatgatcatctaaagactcacatgatagtttcatactaatacataagtttatacatgaacaataaacgtcaatccaaagtatattatccatgtttctttgaccatttatccacatgtgtatagacagtcagttatgtagacctcagtcagttaaggaacttctccaaatctgccaacatctctacatattttaatgtagacgtaataggttggtttgaggatatgaggacaccgtcaacaatgaggagataagcaagccgaagtctatggtaagaagataaggtcttgtgattaacatttttgaaatatcacctaacgtagcatttatgtcttcacctattagctcttcacaatgttggatattataaataaaattagcacacgattgaataattggagcaaataaaatgattggagaagattaataccttacatttgaggaccgagtagaagttactagcacacgccggagacgacgaatcgattgagagacaagaaaatgaagacgatgacgggagaacaactgttgacgacgacgacgggagaggacgaattaatgtcagccgattgaaagctttgttgacgataacgacgggagagggacgaggaaatgactttgccggtagaaaactcgtcgggatgatcgccggagtcgagatgatgttatcggcgttgtgatgattttaactgcccagataaatgaaactgtaaaatcgtcgtgaagaattgggtgagaaagagaagtttctcacaaattggttttagtttagagattgagattaaaaaattaaaccgaaaaccggctaaatttgttaggttttgttaaacaaacgatttcagggtaaaagggtaattctactgagttaaagtgactaatgcttttaaagtgcctatttgtggccaaagtttcgaaatagtgtctttacgtgtaatattctcaatattttattatttcttataagaactaaagatcgaacaattattttgactccaaaaaaattcttctctcgtaaagtacttgtttttcatcgtcagtttgaagattagattaattacatcataagagtttctgatataattacgagataaaatctcaattctcaaaagtgaccagacatatttagtttggtcgttgtgtcttgtgtggaactggccatagtaccaaaaataatgacaaataacttaatcatgtctataaatccatattttggtgttaatctagattctgtccggacaaattctgctgttatgcaagtctctgttgaatcgtcaaagtttattcttcaaccccaacacgcaaagagcaggattgatgtccagagaattgaataaataagatttcagacatggtgttataagttaaaaggatatcaattgaaacctataaaaaactcctagcataagttgaatgcaccaaaatcaagatggcaaaccctatttttttctctaccaaattgactactaccttgaagctttgatatgactctcacaattggtatcagagcttctatttagaagctttgataccaattgttaggtttaggttcaaatcaaagcttcaaggtacaagtcaataaacaaaatgatttcttctttttattttctaaagaagagaaactttagcaaagacaatatgaagaagaattgaggaagaaagagaactgcaggtaaccctaaactaattttattgatcttcataacatgtctatatatatgagtctacatcttagaataaacctaattacttggaaaggaaacatggattaatgggcttgtattgacttgtcatgtgtcacatagttgggtttcaacactttacatacacaacacacatgcaaagcggatccacaaaagattatacataaaacggaactcaaagatatttggaaaaaatctagtcctacttgacaaggaccgattcttactcctttgccaaaacagggaaaaaacacttttggaagagatgggaacgattgcaacaacttgagagattatgtatgtttacggtcaccactaaatctttcataatattttattgtttctcactaaactttagattttctttttcacacaaaactattgattaagaagtattattactcgcattaaatattatactttaattttctcatttttattttgtaagattattctttctctatttatttattttctgatatattgttaattgttgtagttttttcttctcactgaaggttgagaatgggaggaacaaagaaagtcttggacattaccattgtcaatttgaaaaattagattaccgcataagtctctgatatacaaccaaaaatatttagtttggtcgttgcatggactgtcgatatttctaaaaagtaaaaaaccaatgataagtcatctctactccatttttactgttaacccaaattttgtcctgacaaatcatgcggtgtatatacatagttctcgggcttccaagattcttggaatctacttgatctctgttgtatcgtctaatctacagcatgcaaggaaaaatattgatttgtgaagaatcaaataatgatgatttcaaacatcaacatcaataaaaaagcaaacatacttctggctttaaattttgaaaactataaattcacattttacatagaaatactccaagatactgttctcaagatccaactaagaacaataagttaaaaaggacttcaagggaattgacttctatatgcttttttttctctgccaatttattaatactttgaaactttgatctaaaactaacatgtggtatcagagcttctatatatatagaagctttaatacccaatgttaggtctagattgaagctacaaagtacaagttcattggcagaattattcattgtggctattaatcaattttaacatttttatatacacatcactcttgccaactagatccacaaaagatcctacaaaaaaggaattcaaatatattttggaaaatcaagtccttacttgataaggacgattcttgctcctttaatttgttaacaagaaaaagaaaaaatatctcatatctcggattaatacctcacaaaccgaccgatttatgtatttctgatttggtttaagttcaggttcaatttatagagaagttggattaaaaaataaccaaggcctatgtattaatgtttttttttgcaagattatgcgctaggttgcatggaaactcgctccgaggtgcgtttctcgtttccgaaacgtttcggaaacggaaactctccggaaatacgaaaaacgtcacggaaacgcgtttcctaaaaatctaggtttagaaacacgatggaaacttacgtttccaaaatagaaactcacgtttccgaaatagacatacgacaaatcttttttattgactttaaaaatttaataactaaaattgaaaatattaaaattattattacatataaataattttggaagactttgagttttaagatctttcttttgttaaaccagatttgaaaagagctttatattatctttgataaaactaatgaaaatgttggtctaaattaactatttgaacttgaaccttttaatttttatcttttagaattttagtttatttatttaatattgatattttggacttgtattgtttaaatcattttttctttaatatagttttatgttaatgttatatatatatatataatgttatatatatgtataaatgtgtatacgtttccaaaacgtttccaatccctaattttaagaaaaaatcgtttcccgtttccgaaacgtttcgtatccgcatttccgtttccgttttcatgcaacatagattatgcgaatgattgcaatttacaagtaacaacttgagagatgtacgttcactatgtcgcgaagaattggtgaggaaatctttcgtaatattttgttatccaatggtatttatctcgattgtaatcgttaaatcatgaatggatggttaaatatttaccaaataaataaaaagaagaagaataattaaaatttatatattggtgagcaaatattattattccgattaaattatactttttaattgttgttttgtaaaattgttcagttctgttttgttttgtagtctctattatcatcagagttgtttagtttgatcgtcgtgtggactcttgacagtcctcatagtctactaaatctaaaaccaatgataaatcaactaattaattaaataatcatgtctataaagtataaactatatttttatgtgttaacccatccaaatctgcaagtccatacaaattgactctaaatatattgaagctgcaaaatcagccaagtacaaaattgactctaagtatattgaagctgcaaaatcagccaaggttacgcaatataatcatatagcgatcgatgcatcagaataataagttagaaagcgatatcaattgcaaaatagtatagagtagtataaaaatatgaaaacactctgaagttgaatgcaccaaaatctaaatgcattgttttgtctgccaaattgacttctatctagaagcttctagtgtgaagctctgataccacttgtaacgtccaaatcaaagcttcgagttacaagtcaattagtagaatgatttattgtttttgtttcttttacttatgaaaagactctaaagcaaagcgaaggaagagatgaggaagaaaaagatttgcccaaacggcaaacactaaattatttagattgatgttctattgttcatatgaacaataacgtctatatatatgtgaatctgattcgatagaataacctaattacttgggctttttttgggcttatattgatttatctgacaagtctgatcccggataaagttcatgatttggttaagttcggttcaatttaaagagaaattatattgggctttaaaacccaggcccatataaaaacgactcacgtggtattattaataaccggagccctagacccgccgtgaaatcgagcgattgagagcacttcgcaaaatcagagcgacaaaaaaaaataaaaaccaatcctttcgattccaaattttttgttactcactcgcacgagttttatttggtcgttagttatctctttcgttgaataacggttttaatttaaaccgttactttttatcaatggcgacttcgtcaccgtctctgagtaacaatggtctttcctccgtcgtcacgcctcccaaaactctccgtggtctcaataagcctaagtgtattcaatgcggcaatgtagctcgctccaggtattgcttctacgcattgtttcatcgaaggacttaggttttttacatctggggtttcgatttatggattgttcttgggtttttgatctgaaaggattcgaatttgtcttgtatagtactttttcgttttgatttagggttcataggtttgtgggtttgggtttttattcatgatttggtgattaatctgttggagattgtttaaagttttgagctttagtatcgaaagatcagttttttgagattattggtgaagtaattgtaattgtattgcttggatttgataaatgcaggtgcccttttcaatcttgtaagggttgttgttcaagagcagagaatccctgcccgattcacggtatgtttgccctgtcaaatctcaacttcataattagctaaagtgatcagttttagagtttagtgttgataactttgattggagagttctattctttcacttggtaagtttagagtttagtattcttgacttctatagggttcgtttggttgtctcgggacaaaaaaacctataaagaaccataagactgattcttggaatgtgcttgtgattagctgagagatatagagatgttatcatggactgttttgtgtttcttcttatgtgttttatttcgctgcagttcttaaagtagcttcaacgtctggtgagaagacgcaggcgccaagtactccatcttcagagcagaaagcaaccgagggcactcccgggtacatatatataaactaattttctgttttgtttgtgcttccatgggcaagtgaatcttagatgataaaccggtgtttgcttactaatactttgataggagattcttcagctttcttgttttattgcacgtagttgatagtgagatgatatattggtcttgtggaactaaaatatggcgctttatgttgacgttttcttcttttggaaattgtttcaggagtaccactagagtttcgtcaatccggcaactttctagcaactttgctcagtttaataacctgaatgcttcttcccgccagagaaaacctttgacgataaaggtatactaattaagacgtctttcattgactttagtactctatgaaaaatctccatttagttgttttcctcttatcagtttttgttctgtctatattctataggatgctcaagctttaaacgagtggcggtttacaaagctaaaagagtacagagacagaaacattgaagtagaaaatgaagcttttgatcggtacatgagtaatgtgaatttactcgaagaagcattttcatttacatctgttcctgatgaagagagtcatggaacagcagctcctgagcaaaacaaagaggaaaatattgtttcagagcttaaactgaggctgagatcgaactctgcaagaacagagagctttaagaagcggatcgcggagacagtcaaagccggtttggtgaagcttaagagactggatttaggcagttcttcagatgatcaagatgatatcaaaaggcgggtcaaaagaaagaaatgggaagagaaaggttcagctttgaatgaaataatcgataaactgaacaaagcaagaaccgaagaggatctcaaatcttgcttagagatgaaatcaaagctctgtggtcaagtttctcccactgctgcttccgagaagaacaagatctttccgggtgtagtccgaaaagttgagatgagtgaagaagcacttcaaaaaatcgctgagaatctccaatcttttgacaaagttggaatgttgtgaagtcgagaacatcctgtggatgaactgaaaagtttgagtggcaagaaaatttctagatccttcgtgaccacggtattgtacaatgatcaaacatccctcaaaactgatcctgaagactccaaagactcaagagattcttgtaaagtagtgttgagcatcatttagatattagaactcagccatggataaagctgttgattctatctcattggatttttttcactgtgtgttgttgctttgttagatttgaaattgctcattggattacctttgacttaataaatagttggtttggtttggtattggataaccgctcagtctaattagaccggtttgtttttttggaaaaaaatgaatccatccatccataggccactttcaacacgtatatttgaaaacgactaaaaccaaactcttagattctagttttgttttgctgccccaattccactattgatcaaaacatatccaaaagtttttgtggaactaaaaagtaaaaataacgtttagtttgtttccaatttcaaccatatatatcttattcatatatgcatgttgtggttgtctcgtgtgtgtagtattcatttacattatgcaaaccaactggaaacatgttgaatgggttatgggttggtggttgggacttgaggatcaaacaactcaaatgagctcattataagttaagctctcaataatcattaatttatttttgttaccacctaatatttctacgaagggttggtgtaacaatttttaattgtaagataattgtgtaatcattttcaatattaatttttattatgtatttattttaaaaagttatataatacgtaacacatttagtacttggttttggtagcttcatcaatgtaccatccgaagttccaaaaaataaaaaaaaatgtcgatttcaccgttggtgaaaaagaaactaaattgatatgtattattcattttttagaagagattatgggtttaaatctgaaacttcttagttaaatttttaattaatttatttattttgcatgctttattatatatttgaaattagaatctacatgattaatgatttttttctcagatagaataaaaaatatatttactgataaattattcttttacatctttccggattcgctactaatgtgtttttgttaactttaaccagattgcttatggattatgatatatagtatccattacttaaaaagtaaaagagatgaaaaaccaagaataattaatgtcaccaaactatcaacaacaacaaaaagagagtgtaatattcaagataaacgaatcctattatataaaaaaaggtgggaagaagttgctgtctaatgatgtaattatgttaactagtgtgctaaggaaagaaatcaagcaagtctcacacatacacatgttatgacttatgattagcgacaagcatttcattttattttatttttgctaagcaaaccttttgtttagtaaaatagacaatgtgcaaaaaattccaaacttcttaaattgaaaaaaatactatatttaaatttacctttttaagtaagaaattaaaagattttgtagtacactacatgttttaaaacaaccactatccaaacaaaaacttggtcaccgaataaactgtagaaatatcgatttccgtcatttaaattcactttatttttggttgtttttttcttggaatatgcaagagtaatggcgtggttgaagacacgagagagagagagagaatcctaaagaaaaagccaaagcatattaagaagaagagaaccaaaacgaacaaacccaaccctaaagaaacactattattaaacctatatttatagacatttaaagagagagtgaaaggtgcagaagaaaacagagacagagttcaaataccttaagatcacatcatcatatagcttttgtatcattaaaatggcagttcaagctcaacaccattcctccaatctcctcttcctcaataaaaggttcattttctctctgtaaattcattatttgcttttagttttgcttattgattacggttttatgtttctttgtgtgaacagaaacgggaaagagaaagaacatagtaattttacattacaatcacaagcagctggagattttcttgatcaaaccaatatgttattcaacaatggaagttcgtaaaagttctcttgttttttccattaaaatttaccaaaattaggagacaaaatgagaatgtgtgtgtatgtctcttattataggttctaatcagagaaaaagaagaagagaaacgaacaatcatcagttattacctatgcagtctcatcagtttcctcaagttatagacttatctctattacacaactacaatcatccaccgtcgaatatggttcatacaggactccgattattttccggcgaagatcaggcacaaaagattagtcacctgtctgaagatgtttttgctgcacatatcaataggcaaagcgaagaacttgatgagtttcttcatgcccaggttttgatttcgtacgagacgatttgggttacgcaaaagttttgattttgttctcatcggaaaaagtgtaaaactttttttcttttgtataggcggaggagctacggcgtacattagcggagaagaggaagatgcactataaagcgcttcttggtgccgtggaagagtcgttggttcgtaagctgagggagaaagaggtagagatagagagagccacgcgccgtcacaatgagctggtggcacgtgactcgcagctgagagcggaggtgcaagtatggcaagagagagctaaagcgcacgaagacgccgccgcgtcgctgcagtctcagctccagcaagccgttaaccaatgcgccggtggatgtgtatcggcgcaggatagtagagcggcggaggaagggctattatgcaccacaatcagcggagtggatgacgccgagtcggtgtacgtggatccggagagagtaaagcggccgaattgcaaagcttgccgggaaagagaggcaacggtggttgtgttgccgtgtcggcatctgagcatctgcccgggatgtgaccggacagctttagcttgcccgttgtgtctcacgttgcggaattcaagtgttgaagctatcttttgctaaatgggcctaattcaagcccattaggttgttatcgtaaatagaacttagtaggtaacacaaatataaatttcattggtatatgatataccgtatatcgaatccactagctattaaggaagccctctaaattttacaacaaaagaagttttttttttttttttttacttttcattacttgggattctttacacagatatgggatatggaaatgttgctattcgtacaaaatagttaactaagctaagaaacccatttttggggggcctaaagaaagggttacagatttctatcttacaaatttctcagtcattgggatctatacctttctctgcttcttttaactgatcttcataatcgtccaacaagtaatcacaaatctccagtaactgatctgccaaaggtggtattcctgggttacgcccatcgttgtaaagatgagcattgtactttatctgccagacatcgtgtctaaactgttctcggtttctgtactctatcttccgtaccttatctcggattgtcgagagatccatcgggttttccacgatatcaagataatctggagcttccttcttggataccggtttcaagaagagacgtgacacttcttcttttagtcttagtgtgtccactatgcgttccaagatgtttgctaggccaacctgttggtaattgaattgaggagagaaaacaaacaaaggttgaggttatgtagacatatgaaagcatgctacgtggctatagagcatttacttcaactgaacaaagtgaaatatggaagcaaagagaattttacctctccttttttgcgtcgttttggttgaggcgcatattctgcaccatctctttcaaagtcggacacatagcggcttctgacgtttcgacctctttctgacaatcttctatcgttttttcgaggaggatagtcttctagatacccttctacaatttcgggttgcagtttctttttcttctttttcttcttggctttttgtcgttcctcttcctccctctcactccgtattacctcttcgtatcttctgatctcagctatctcattgggttcttctgatacactcatatcatcataatctcttctcgcccttacttccctatgtcttcccgtacttatctcctcttcttcccaccatactctatcctctttcggtctccgctccagagaattctctgacaatctaaagctctgctgcctctgaaaacccgccagttctgccattctttttgttttccgggactcaaaccgtggactctcttcaagactactcatgtcatgatcattcatctctttcgaacgttttataacaagtttcttctgaggctgttctctttctgtcggtggtcgtatcacaagatgaggcctacgcgattcagcttgatctgtgtccatacttaatgatggccgcgggatagaaatagtgtgcctgcttgaggctgcctgatttctctctgtactagacaagggttgtccagagacggaaggcttgtgtgattcgctctcccctctctctctgctaaatgtaggcatcaatgaatgtgaacgtctctcagattcaccctttgattctttaggttttgccttacttgaaatcttgagtttgctgatcttagatgtggacttaatcccagtgtctatgtcagacaccaccgcttgctcagaacttcctggagcttcagaaacaggtttatctgacaaatctccagcggggataccatatctaaacttcagagggagacccccagttttggaacttaacttatctcccttcagagcttcatctacagaagttttcattgcactttttggcgcagctttgctgttcttaataggtttcagcttgggcagacctgatggttctgaagaactcggttttccggcagacttatccatatctatgccttcgggttgtgattctgtattttccctgtatcttgggcagtgtttattggttctcatgtgcccatgctggccatgaagataatattaaacacttttctctacgaagtaagtttagattcaaaatctagtctaataagtaattatacctgaccacaggctccacaaacaaagttctctctcgccgatttcttttccttgaatacctggtttagaccaaaagaacaggcaacacctcagaatgaccataaactaaattttatacatgctgtactgatttgattgtacctttaggttttcgttcagtattttgaccttcttcaactggcccaaagaattgctgttctcttttacctgtttacctttgggggtctttataatagaatcaacctgccaatgaagatacgagttggtcaagacatgcaagacatcatggtttgacacaataattaaagaaagcaagagcaaaaggttttaaaacaatttcaaatttgtactgacatttctgttgtctttgatggtgctctcatttactaagaacgatgcatcaggttggatggcaataggtttcttgtccatggcattggcctttcgtacaggttcaccactctgcaaagctatattgggtcgtgggggaggataagagcccattccctctcccacacctttcatcttcttctttttcttcttctgatcctcatctacataagcatcaccagtcagtgatttattgataaaatgaaccttaagctaatagcacaaatgcttagttgaaagcatgtaccttgcatcagcagtcggcataactcagcatattcagtagcttcatcttcaatctcttcatctgtctcaacttgagatggccgccgtctcatcttgagacctttaactccatccaatttgtcattcttagaaatgttagattcttccccctccccaccttcctcagcatcaagtagattttccagatctccggcaaaggagtccaagtcactattcgcctcattttcgctttcattctcatcaccatcaaaagctgaaagggacaaaagctgtctatcccaaatctcctgacacttttctcgggcctgctgttgcatctgcaggaaagacattctctggccacgagcatacttgcctatggttgtagggtcaaccttaacaccggatgcagcctgctcacttgatagcttccgtatcatagctatacgatgccatcgagtttgcttggcaattatctcatcagggacattaaacttgataagaacctacaaagataacagccaaaccatctcttatgttcaaattttcgatgggatttaatttagtaatagtttagaagaaaatgggtaacttgtaagtatttttagctgaaccaaagaagtgtacctctcgagctgcttccatgcttaatctgcgaagatcagcatctgtaccagtgacagttggggctccacggccggctgctgcctttttcttcatatgcccggctgcagctggtgcttttggcgcagctctgacgtagctaaatcctagaccccgtccagagggatcaccaaccccagtaatttccaaccgctctatatttgctctgtcctactcaaacccacaaatgaaaatcagacatgtgagtattgaaccggccaagtacaaaagcatgagcgatgactgatcagaagtatcaaatccacttccactgacaagattcagaaaggttcttaacaaaactagagaagatatatctgaaatagtttctagtcttgtttgcaaagaactaataatgcatcaccctggcttatctataaaagagaaccaagaataaacacgacacgacttttacggattagctgattagtgatgactaactcccaagttcctaacataaattacagataaaacccactggctgggtaaactactaactcccaaatatagataagtgatgcccacctgatttgtacaagcaacaaaattactgctcaggttccatggagtaatctgcaactcccgctcaatatgtgatgcagcagcaagagcaatagcttcgtctgggagctgagccaatgcatttgatatactggcaggtaatgtaaaccgggtgatccctaaatgtttgagccgatacagcccagctagcatactctcataagaacatacctaggacaacaaaatagagaatattatgcatctttccatttaatgctactttggacagtggaaaacagagtggtgtataaaccaatgaaatgaacccaaaggagaaatttacatgctctggtgccacaagctttttcagctcactctcaggaggttctagtaaactatcttttttggtccaataagactggccatttttatccctctgcattgtgtatgtacatgtaatagatcagcatgatgacgcaataagaaaagaagaaaaaaaaacgcaagtgtgcaactcctagatgctgcaacttatgcggaagtaataatatgatgagataccttccaacaagcaataattttcatattcttcttgatgattgcatctgtcaagttagaaaataagaaagacagctcatctgcagcaattgggtgctcccccccaccacgcttaaaaaattctcggtacacataaaccaacattctgttcactaaataagtctgtagattctttgatccaggagacattacttccatgcgaggttcctggaaaaatataattaaaataagatgtagattgctacaattaagtactgcaggtaaaacttataaccagactcttgtagtttaaaacacaactgaaatgagcatctcccatctctctgatcgctggagtatcttccccagcaatatctatttattctagatctgctagcttactatacccttccatcacttatcctaaaattttgctaggacaccaacgtcaaaatactaaaggaaaaatgataacggaaaagattagtttgattcgctcaggctagtaagcccattgttacgctactaaattcacaagcatggaatatatagattcaatcttaattatgtatgtgtgtgtgtctgggggtatatatatgtagttggacattccctggaccaaaattctaagagagaaatcttgcgaaaggcaaacctgttgtccgacaacaactatcttgtcaatacgccttagagagagctttcctttaggagaccggaccaacaagtaatctgttgactgcaatctctgcggaaaaataggtgctttatacatatttgtttcaacagatgactgactgcaaccagcgtgtatctccccaaggaaaggagatttgtccccaggttctagaatcatcacattccctaaggtgtcactttgattgcgcagcaagttgccacgttgatcctcaggggatgacttctgataatatgtgcacaaatttgcacccattcctgcattgctgagcatcagcggcctctcctcgcagtacctacggagatcaatgcaataaaagagagacgtccaataaatgtcttttcctagatcaaaataaccgcaagatccacaaagtaacatgcataaaaaaactaaacaaagtttccaatttgactctcaaatagaaggtcatcttactccatcaagaaaacatggccatctttagtagataggtcagatttctttttgaatgccccaggaggtctcaaagatttattttcgccaggtagcttctgtgcccatggccacagatgtactttagtacgtataagatgaaccaaggaatttggttgaacattttgtgcagcaagagacttttcatcgtcaagttcctttcccttatagaacatcttcactgcttctgtttccttaaaatctgcaaaacaattgtagcaagtgagcttcaagatatttctgtgaaaccattaaaaaagtgtgttctccaaatagaatctatgtcataatgcagtagaaaaaagtgaaaatagaacaacaacctagctttctagaagccttggctcttaaagaagagacagattcctctatgccaacgtgtagcttgcttcctttaccccccaggctcttaactataattttcatggatcctcgggtcggtaactttccttgctgtttaatggctagctcattgtcatgtggataccataaagctttgggccggtgaaaatttgctatgtctttactgcaacgagttaactcaacacattttaatagaaactactaaaatggatgtagaaaagcacataattgcatttgaagtgtggaaacattttagaggacacaaaagagtggaaataaaaacgatatgcgagtgaccacttacttgctcaatttactcttcatcgtctgcagtttaatcgctggtactgaatgaaaaactctcaaactatgaacactggatttattagtatttgcctgcagttgctgagagcttttcccattcatataaaacttgtcattggaaagattaaattgccacccagaatttgattcacagccttcttgaaaggtttcatccttggattttgaagaccgggatacaatcatagctccagcatgaagttgaagatttttgctttcctcgttatcgaaaatttcaaagaccatttgctcatcttgaagatcaaaaattagtttagatctgctcaactctttctctgagtcccatattatactatctaaccatgcctcatcccccaaatccctctctcgcaatacaagtctgctaaagcgcccaagggcgtctttttcaagtcgcttaatcttctttactccagcttcatcatttccactaagatgattctcatcccactgggattctaatcttagcagttgtggatgatgtctacttttgttagtggactcgtttgttgactgggaacctcttgagccaaaagactccaacagattggcagaaaaaggcacaaacatattattgtccgcttgaacttgcactctagagttcaccacattcaagctttcttgttcagtctctgaatttgttcctttaaccagcataccttccggctcaagtccaggttcgaagatctcaccagaattaccactaatttcaggagaatgttcccaaataatccgacgttcccattcatgctggtcaagaggaaaaacttgcatcgataattgagattggcacagagatgaattatcatctatgaagtcttgcttcaacagttcacccataatacatgaatctcttcctagcttcgtaaattctcttgattctggtgtgataccacctattgtgctagcttttaccagctgtaaaccctctctaattggaaagggaacatccagctgaatcagatcagcttgttctacatgagtatcaatcctaccatggctcttcaggagtacctcctcatcgtcttcaacaagctcagatatatccatagatttgtatttgtctgtacgaaagaagtctatgatgtaagagttccacatgaagaagtgaattacaaaaaaaaaaaaaaaaggaatgctgagacaacagaaacgataagaaaaggagaaaattggacaaaacatggaatttgcctggaaaattaaatagaatgaatcacttcatatttgtggcatcgaatacacagatctagcacattcttgccaaaaagagactgagccgcataaaaggaaaaggtctttttgtttcaacacttagccctttagaattgaaagggaaataaaaaatggagaaacgttttttgatggacagcaccaaaaaaactcaatagggttcgagaagaaacaaaaagaggaagaacattccagatcacatacctctacaagtgacatatctattttctctcctatcccgtttctgtggaggctcatggatagcaaatatctcggagaactgtaagataaccataccatcttccacatacaacgtaggcagtggggtggcgcctttgtcatccaatgtaccttccaataactcatccacctcctcctgaatgttttgatgagatcactaacataacaaaatcatcccacagcaaaaatatgttatttgagacacaatttccctttattttgaggggaaactgacctcctggacatcttcggtgtccatatgatcctctttatccaagatgctagcctcctcttcatactccaaggccttgtcttcctttaagacaactgcaacgcaattttttttgtcttgttaagtttatattctcaaggacttaaatcacactagactacagctttgcaagtaatcatttgcctgagctcaacaagtataattacaggaagaatgacttaacaaaaccaatttgagtgatgagataacacaacaaaagtacactttactatgggataattgttttgttcaagaaacggaaatttcgaaatgcaaacctggttccctcttttcagtttcaagagatttttcaactggcgcttgctcctcctcttgttcttcttcctcgtcataatcttcatcatcaaacacagaagctctggactttaaactacccaaagcaactgcagtcgaaaaatactccttttttggcagtagatgatcttcctcactgactacttgaacttcgggcccatcgtactcttcatcaatatcctcataatcaacagcatcctcagcttttctatcataatctacacaacatatcaccacagtcaatgacgctgatgaccaggatttggtagtgtaaatagtgtcagtatgtaaatgctacgggcaggaatgttgcatatttaaagattgtaaacgtgagtagttaaaatgtttatgcatataaattacgcaagacactttcttaaacaatccaataataattggattatgactacaacgaaagtaagaagagtgcaagaccattgtgatggaaacattcactgggagaaaaactttctagcaggtttcctagaagctactccagtatggtttaaagaaacggtagaatgaaaactagaagttaaatgaacaataaaaactgcataagatagacgaccctggcagacaacatcaccttgctcagctggatcacttgctgtacgttctgattttgccaataactgttgagtttagaaacaccattattggcatcccagtacaagaaaaagaggattaaaaaccacataaaagactcgcagttcactcgtctataaactttagaagataaaatattaaagagtgtgtagaacgttacatttatatctggtagagatgaacccagcttatctgccaatgcagaaagatgttctttggcgtcctgaaaagtttaaatgttagcattggcacaggtatgcttggtggagaatttgcaactcatagttaataaaatacatatatcctaagtccagagagaatagacagaaaaactgagaccgataatgaaaataatgtgttcaacaaggtcatcatactgaaagcgtaaaacagattacctcatcaaggtaatcagcgtccaagtccccagagttatcaacatttccaaagatgaatccaaggttaaaacccctgctgttgtcctcatattcatcatcgtcatctgcagcagacatgtaaaatattggtgttcaccaaacaaatcttggcagacatgtaaaatattggtgtaaaatgggaatgcatgtgataactgattatcatcacgagtattcagaaatcacaaagattgcatgttaacactcttgttaaactgctaaatccaaggtcacataatcattggattcctctccatcatcttatcaggctacagtagcctccatctagtgaaactactattcccattctcttcgtcatctaagatcctacaaactcaattccctctagaaatttagaaaaaataatcttaactataccctagaacatgtccaggatcactcaagactgctccttttctacttaaagaaatccaaaatattcaaaaccgtaaatcggtcatgagctagcctaaatgcaccaaacactagctagacagggacatctctagtttcacaaactgtagtaatccaaaattccacaacctaatatttccaatctctttgtcaattaagatcctacaaaccaatactcagaatcactcaaggctgttccttttctacttaaagagacttaatccgaaatattcaaaaccgtagaacaatcataagctagacaggggcatctccagtttcagaaatcatgtcgacaatggactggaccggaaaaaagaaaagcaacaaactttgataaagaaagcaacatatatatacctgaggaagtctcgttgtgggaacccttgccattggattcagccatattcaaagatttaactacaatggtgacaatcgggagacgacaaggcaattgtccttcccaaatccccaaccattaaaactcaatcaaaaccttcaaaagaaacaaaaaaaactacacaattacaagccaacctaaacggacctggaaacaaaaaaagctaacttctttatctgaaacttcatcaaaagagtctcaatttggctttaaaatcacaaccaaatcgaaaccccattgatcaattttcgagttaagctgagttgcaatcaaagcattggataaaattgaagaagacgatacgataccattcactgatacgagattgttggattggagggttctttcttgaaaccctaattgagggtacaagtaagcttcgccggaaaggtaaaccagctcaatcggacgagacggtacgatgtcggagagaagttccgaggtaagcaaactctcaaatcggaggaaaaaaaaaagtaataacaaaaaaaagaagaaaattgcgaagcgaccaagacaagattgtgagggcatttataaaagttttataacccgacccgaataaagtttgagtccgggtctaatttcttaaccaggaaaaatcaatttcgttgtttggtatggaggtggttaagcagaaatagagtcggttctgaagtaatttttgttgttgtttaatcagtggtaattttacgaatttaatagatatatacctatgatatttctttaaaatatctttctaccaaaattgcaaaagaaaattgaattttaaaagtattataaaaacataactgttatagttctacatttaaattttcaatttttaataatattttaatcactttaattttattttttcgatcgactaacattctaatatccaaatttaaggcacacaagtttaattgatagttttatttttttcatcgaataacatcggatgtgaaactctttattgcataccttgtacatatataaaaatcaataacatgttgattttaattatataaaaaaatttaatattaaataaaaccagattgaataaaaatggatattaagaaaatatataggttcttttattttatggaccactgcgtcggtaactatgacgaagtaaaacggcagtagccgttaaaaaaaataaagtaaaatgatccatatagacagatcggagatgtcgctgaaaaaatagaagtgtcgttggaaaaaatagagatattgatctaacaacgtaggagtcgtgaaaaatatagcggcctaaatgaacataatccagcttttcttccattgtcagttttgaacaaccagcaacgaattttataataaattatgccatttatttctcatttcgttctttaatttttagtcatcaaatttaatcgcaacgaccaatacaagaagaacatggtataatcataccaaatcattgattcaatattaccttattagattttataaaattcattatccattcaacaattgtacctcaacattttcaaatgtacctcaacaagcaattttttctttatttagtttaacctaaacaaggaatttatttttatttttaccataaccatcatgaactttgttgacttgttaaatgtctctatctccttctaacgaaattatcaaaatcaatttctgttccttatactccaaccaaatagtggtcctgattctaaatcctagttctaaaattaagccttgtattttctcttttttattaacgtaaaatcaaacaaaacaaatatctcaaatattttgttaagaaaaaagaattctttattcaacgaaaaatatggattaaaaagaacaccaaagccacgtgcattgtcacttcccaactttagaaaaattgtatttatataaacaagttttatctaattagcagttttatgttattttgtctttaatctcacttcaccgtctctctttcactcaatctccgtgattcattttttctccgacgttgcttaatcctcgaaatctccggcgatgggtggttgcgtctcctccaacctccttactccgaccgatgacagcagcttctctcacctcaccagctcctccttaagccaacatttcgtcaagctaacttccaccacttacggtcttctcaatctcgactcttcttcaccttctcctccgtctccttcctcctcctcctccgccaaatccgttatcacgccaatgactccgcctgagagattcactatcaacggtaaggaggcggcgatgatgatggttaagtctgagccgacgacggaggttattaacttctgggagctaatgtcaggtttagacggcgatacttgtcgattctctccgattccggtgaaatgtaatggattttccggcggattaaagaaagagaactccgatcctaatttgaaaaaccctaacgattacgaggttttgaaaccgttagatccgaaattagcggaggaatctgagaggttatgtgacggcggagagaatcgcgttgtgatttatacgacgtcgttgcgcggtgttcgacggacgtttgaggcgtgtaacgccgtgagagctgcgattgagagttttggtgtagtggtttgtgagagagatgtgtcaatggatagaggatttagagaagagttatccaatctaatggcggtagaatcgacggcggcggtgttgccgcctcgggtttttgtgaaggggaagtacattggtggagcagaggaagtgatgagattggtggaagaaggattgcttggtgaattgcttaaagagattccgaggaagaaagatcggtgtggcggcggttgcggtggttgcggcggattagcgtttttgccgtgttcgggttgtaatggaagctgtaaagtggtggaaggatgggggaatgatgcagtggtggtgaagtgtaaggagtgtaatgagaatggtcttgttcgttgtccaatatgcagctaaatcaacaatacactagtaataatctcaaatttggaatcatatatctaatactactactactattagagtctctctgtgtcaagatttatgctgaacctttaaggcaaagatctttggttctggtagagatacgttctttgtttgttggttagttttacataaaaatcaatacaaaatgtttgtgttctttgttgttttcttttagaattcttcaaatagttagtcttattttggtttcattttgagtcgatgaactgaaactgagatgatgtgatcaatacatcgttatgctcggaaagtaaaagttggattgagtttggtcacaattggattgagtttggtcacaattggctatgtagagttggagttagaaatcaataggcctaggcaaataaaccgaaccgaatgtaccgaaccgaaaccgatgaaaaaaaacaaatccaaccgaaccaaaatttgaaaataaccgaatgaaaattaaattctataaccgaaagaaccaaaaccgaatggatacaaaccaaaatattttagataaccaaaattatcttaaagatatttttaaaaatattagttatttttagagtaaataattaaaagtacttaaaaatatatatatataatcgtaaaagcactcgaaaataacccaaaaatatttgaaaatatcaaaaacaaccgaaaccgaaccgaaatttcaaaataaccgaatggatattaaattttaaaaccagagccgaaaccaaacaaaaattttaaaataaccaaatggatactaaacattaataccgaaagaatcgataactgaatggatacgaaccgaaaccaaatagataaccgaatgtccaaggctagaaactaagtaaccaacatacgatataattcttctggtctactagtacgaaccgaggaaccctgatcactaaaatcgaaatgaaacaaaactaaccgaactgaataggcccagtcctaaagatctaaagtcgatcagctaggcccagtccaaaagatctaaagtcgatcagataggcgttgtgtcaataatatcatcacttcataatattgaaatcaaaaacttatcgtatgtaatagttgactaattaaagagtaataagagtatgctaatcaactggtgcatcgtgccagtaactcgtacttttgattttgattataaggaaaaaatataataataaaattattttatttatgatttttttttttgttaaggaatttttaatttatgatttttttgtggcaatccaacaagagaaaactcatatagatcggtttgtatcacttggtgcaacaacatttatttccgaaaggagaagaagttagacaacgtccggatgagaaaccagccttcctacagtccgaggcacatttaccgtccccgtacgttgccgaacacatctgcttgcattgatcatcaattctccctgtaggtttgatctctgcatgtccaccaagtcaccacatgaaaaccatatataatcatatatatatgcatgatttatatttatacagacatacataattacatatcaatgttcttgctttcaaatgatgaaacgtacttagaatataacaacatatatataactagaaacatacctgaagccaatacgttgtaattggatacaaaagcagccaatattaataagaataaaaaagtcactgaagtctttgtaatacccatttaattttgtctttgctcgttgtatcaagtataaaagtatattaaaagaaaatgaaactgtgattttctagattttaattaaagctcaatttatagtacaattaggttctttgaatgtaaccaaaaaacaaggttgacattcatttttcttatcattgatatggatcttccatatatatactaacaatattttattttgacttaagatttgtttcttacttaacattggtggatattcattcaatagatactaataatattttattttgactatatataaaatatttttcttataaaaaatattagttagtaaatcaatccacccgatgtttttacatacaaaatgtccattttagtttaaaaaccaaggttaacctcctaggataaatctgttgggctgattttttactaaaacccaattaggtttagtattatcaagttgtatgaataagaaatggaccataatggtttggcctgctcacgataaatctccggtatatgatgggtccgatttgaaaggagaaaacgagtcaccgaaagatttggtctcttatatttctcgattccttgagaataggattcatggagagagtggttattccttcacgtcatccacctcctagatttctgcttgattttgtgaagaaacaaattaaaaacctaagtatttcaagcctatataaataggtcatgcttcaagtcttggagagacacagtgaagtctttgatagttacacacaaatagcaatagcaaaagctccaacaatctctttctgttaaaagtaagtctcgagagtatcgtagtaactattttcgttagagttgagtttcgagtgatgcaaaatcagtttatagaggttgtatcctgagatccttaaatcacacagaaactgtcacactacgggtgatttaaaaggttaagggaagagttcatcaactcgtctcatctcatgttctttccttaatgtttgtgattttgatttcaattgcctttacgtaatgtttgctaattttagctcctacaaaatcaagacgaattagttgagtattgatgtgaaaaccagatcaggagactaattgaagtattgaactccattttgagccttttgcatagaaaccttgttccgaacgcacaagtctgcttgaaattgaccaaggatgaacatacaaaagtgatttcaattattcatcacttgtggatactaatgtcatttctgtaagggataaaaaaagcgatagctaagtgatttgatatgcctttaaaaatctttacatcatttatttgaagtaaaagaacattagtgattaatatacattatgtcaattttatggtttttgtttgatataatttatttagtccgtgtaagttgtaaattatgactacttaatatatttttttctggtaacaattttgaatcttaggccaaaacccaaattaatcctcatggcccatagattccgtgtattatttttttgccgttaaagatgtttatgggtggtcaacgtacgaagtaaaaaaaaaaaaaaaatcagactcttgaaaagaatcgatctcttccctgtaggctatgctatacggttatacccatagaaaaaaaatacacatttcaaatgtaaatcactagccaacaattttatttttcaaatatttttaaaaggcaataaaacataggttttaacaacaattatcaaattagagcataaaattgtttgtgtctgacaatgttaatttatacaggttataatgtataaagtcgaagatatgtggtcgaatatttgtcaagaggctgtgtgatgaatatctgtcggcataacccaaatttgagattgctttcatagataggctaatgttagtcctaatcagaaagtttgaaaactattattttatttttttgtcaaaacgtttgaaaactatttaacaactcttttattttggaaaaaagagtcaatatagacaaaagtttgtgagattatgacttaccatctgtttgtttcaaattattttccagaatcaataatttcggatcatagacagaattatgaccctcaatttattttgttgtaaaaaatagtaattgtagggaaattcaacgacatttttcacagtgaatgtataaacgggttccttaatttgtagttactgaaaattacaagttagttgggaaaataatatattttctgaaaatatttgagaaatttaaaacaaatatttaaaaatagattaatattaatttaggtaaaattttgttcataatttttgtttcccttaaattatcttgaatggaaatttttaggtttctctttcaaatcttttagacaaatttctctttcaaaaaagaaggaattaaaattcataagaatgttataattcctgtaataatatttattttttaagcatcttaattatttttgttactttgttagtgtattggaagggaaatgatgtatatatggtttgttatttttatcaagcaaaaataagaaacaacttaaggttgaagtatatggttgctttaccacctacaatataatgtcccatgcccttttcaaatttaatcagctcactcggacttcgattgctaaaatgttgatggctatgttttccatcgacatgctgaagtatcaagctaatgttcaatctcccaatgcaagtctccgtatatacaatttgaagacaatgcactgtcatactgcatttaactgaatcgtgtcttgtagcctctttcattagtgacattgttccaattcattaatcgagccaagttggatccattatcttgcgtttaacgagattcttgatccgtataattaactatattcagacatttttgtgtgttccaatatgcttacttctacacttttctcgataacatcactatttttttagtaatattagtcagaaaattaaaagaaaaacaaaaaaaaactattggttacgtaatttgataagtggtaattggattgtcgtatttgcacaagaaaaacgacatgaggattttccaacgaaaatgaaaaaataacatagttgcaccaaaaggtgaagtaattatagcgaagcgagaatcttattacgctgcgttattatttggtacactttacttagatgaaagtcaaaataagtatcacttcattcattatacaagtccttcatcaaaatgacaatgatactttatccagataaactaataaaaatagccgtgttatatgctagttttttatacagtaaaacatataaattaatattcacaaaattaagaaatattataaaacattcctggaataggaatattgtaaaataaaaaaattcagatgtataaaatagtaataatttttcaaaatatattaatgtattagttttagctgtttaataaataaataaaagttgacgttagatttcatctctatttttgttgtgttttcaaaatatagtattaactagtatcgtctataacttcgtcatcaaaatagccaaaacttctttcagttttttattttaatctaagaatctttaattttaatttcgaatatgtatcatttcatttcaatagactatatatatctttctaattcaccatcaaaagatttttatttttaatttaatatatatatatatatatatatatcttttgcataagtgaattctatagagtatagactttctaattcaccatcaaaagatttttattttaaatatcaaaatgttcaagttggaactataaaatttataatatccaaaccagtaaacttttttaagatcaattttctctactcatatttttcaaattagttttaagataaaatattaaatgataatacaattaaaaaatttgagatttgaaatttatagaaaaaataatattactataaattaacatatacatcatagttctgtcattaactcattattaatttagaaagttttttataaaatacggattcaccatgtgcgtttgaaccaaagtacaaatttaccgaatattaactctcactatggcctatgggctttatgattcgcaaatacaaaagatttaagcgataaacatatattctcgtggttgtacaaatatggcaatcttcgtatcataatttggattcaaattcaatagtgggcatgtaagaaatgtagaatgaaagatgagggatgtgaaaagttctaccatttagctttttttttttttggacatcttttagctttaatagtcaaagataaagaactaaatgtaatgacttctaaaatagcttagtaagcaattgaaagagtcgttattcaagttttgtatataatatcattctttaacttcgtaaattttatgattataaatattataaaaaaattaccctccaccattaacaaatgttaaaccccaaaatcaagacgtactatcaatagaacatgagacattttttaacaaactttattttatattttgtgtatgtgtatgtatagataatcatacagataaatgaagaagtgggtctaaagacgaagaagactcagtgaaactactccaaagatcaacattatcatcattattccaatgaagatcccatcgctgcatcatagtatcaccattttcttcttcttcatcaaaactcttacgatgacacggattatgatgaccattgttcaattgccaagctacgagccggtcaagactagcccagttgctgcaaaccggtctttcggttatcttctcttgaacgggagagaaatcgagtttgcttggagtcaggaaactttggtcgaccgggctctcggatttaggtgtctcaagacttgggagttgcatgaataagacatcatcttgatgttgagtcgttgtttggctctcgggcatgcaaatgttagaaccggtacggtccatgtagagaagaacatggtctaaaccggtaacgttttgagtgttgtgaaaggtgggccccttctcttcctccgtgtcatcaggtaaagaagatagagtgattttaggacaatcgtcaatcttttgatagttcttcttcctgaacactcgacataccacccaaccttcttcgttatagctcattggatcttctgtaacaacatcagcatagccctgataatggaacacaaatcgatcttatgaaatgcaataagagatgattaaatcttgatgatgtaaaaatgcaacttttattttgaaacaaaaaaaaaaatcttttatgttggtttttcttttggatatgcaaccataactagttaactacgtattgtttgtagagccgtgttaaactattttaagccttgtgaaaaaatctttttatataaatgtatatatgatgtgttaatttcataagaaattatcttattgtaactcagagaatcatgttcgattactttaattgcagatgctaaaagaaggctctagtgcgtactaaatgaaccaaaaccttttatagcatgaaacgaatctagctaattctttgactataagtttgtaatttgtttattctaacctaaactgcaaattgatgattgctatatatacttacattagacattggagtatcgtcgaggcgatactcatgcatgatccagtcggatttctgaccgtgaggagctcttcctttgtagaacacgagtgtcttcctcagtccaattctccggacacaactgcagatgattttgtcacgtccggtagctttccagaatccagcgactgttgcccggttcgtcctggtcccggttggatacttcttgtccttgtggctgaagaagtaccagtcgttttgtggcgttgaaccgattctacattcctctgcatttgcataccaaaatggttcaaaaataaagaacaaagaaatagagagttcgtagaaatgaaagagttttttttcatatttagggtttaaccttgaatatcccaaggctcaagcttgtttagatcaacttcacgaatgacatcaagatcgatcttttgagagttaactttcttacggagatagtaatggagaagttcttcttcggtgggatggaatctgaaacctggaggcacttttgattgtccattaatcgaaagattgaccttattatcagccattaacgaagatagcaatatatttttgggtttttgctctagaagagtagagaagttgtatgattacgagtggaaatggttacaacttaaaaaaaagaaagcaaacgatgagataatttataatggtggtaggactcgacgagacatagcccccaaaagggggaaattgttatttaaacaaagaagttcatgcattaaagtgtctttatgaaattagtataatttagtaaacagatgtttctatgtttaaatcgagtttgatcatacgtaagttctgacgtaagacatatttcttttgacgtgtaatgtcatgtcatgtgtaatgtataaaacggaaaaatactaacgtaaataaacgggtttagtgggggattaatctttgtgttttcttgcaattacttattgcagaatttgaattccatgtgttttggtctttactaatgtatgtaaatataaagtatagatttgtttagaagaaaataaatgtaaattattttctaatatagctacgtatattaaaataattttcattaatatatcacacactcgtttcatgatctacgtcatctacattctaccatgttaattagttatctattttttcccatgtttttggtatgttcattcctttcgatgtatcctaaaaatacatcaattttttttttcttttcataatctatcatttttattctaatatctggtgtcacctaatcaagataatgtgtgtaacattaacgaaagaactttccatgattttttttcttctttttggacgattttcgatgtttaattgtactatattttttggtgtatttaagtgacaaaaacgtgatgaaagtcaaagaaattgaaacaagcggagaagagcaggggacatgctttttgcacaagtgtgacacttcatcttcatttcatcatttaattcacctctgcctttagtgcatgtccaattagtgcatgtatatttcaatctagctattcatcttaaatcggaaatagttattcagaccatcttacatagtaagtttgagtattcgatggttatgcgaataccaaaaaaaaactaaaatgaagggtaaggctatatagccattaatatttaaccgtagatattgaaatagctaaaaagaatagagagtatgaatgtgggagtgacagactgacatgttggaatatccacttccagctaaaaaggtgatagttggattatgtacacaaataactgaattaattagcaatatttgtttatgaaaatatatgtatatattcaaccatttaacatacatatatgtgtatatattttagttatggacttaattattggaattaagcatactgatataatatgatttacaaatagaggctggagcaatgacactttaatcgttttcttattatataatataagtatataacatgtacataaaagttgttaccctacatgcactgtacttatcatttgtctgttgatgggatctttgtgtttcaacattaataatgatgttttgtttctctaaattctatgcttaatcatgcttttgggtacacaattgatggattaactaataccacataatgattaaccacatttgacctctcattctttcactttttccatttctttattctagttttaattgagttgagtgtgaagtttcacctcgtaatttgttcccatactaatattttgatatatcatttcgtcattcccttttgttaaatcatgtgtgtcccatgctcacatgtatgttattaactgaaaactaatttcgaacaaaaatatcacaaaaattaattcacatttgtcattaaatcgaaataaggagaaataaattaaatattcaagagaatgttaaggcttttacactaaagttgatatatattgaaacaagaatatttaatttatctaacatgttaactaaatcattgaaggtgctccaaagttgatgatcttgctggagcaagttaagagctcacatcattagaaatcgttatgtagaagacggatgtgagtcatgtgacaaagggatgaaaccggtttagctaatctgaatctttgttggttttgattcctgcaggtttagctagtttggctcaaatggtcgaatggtttgagatataagagaactgttgggctggatcatcaaaggaaaaggtcgaacttgtatgttgttgtgcttagcttaaattgttattttgttataccttatgaggattagtttgagtttccgttcaagattttatcccattatcatattttgtttcctttcaatttttaatctcgcaccaaaatccaattaatacatttgaatgtgatgagttggttatagttgcatatggtgtgagtggtgatgcagaaagagagtgtaatatgtaattcaatcaaataacgttttgaatgattaacgaattagtgctaacttaataagacatagtcaatagttaataattaagtgaaactgcattggttggtgaagcatagcaaaagtttggatgtcaagcaattccgataaaagtatagtcatactgacgtagttacccactttctgctttttacttggattataaaatatccacgtagttagttatttgaatagtttagatacatactatcatgcatgagcaatatctacgtagaattcaaattaaataacattttataatacaaatcagtaatacgacaaaactagatcatataatattgtgagttttggttgaatagaaagtgacatccacacgtagttgcaatgactaatcaaattcttttgacctataagttaaattatgtaacaagtcgcaaaagtgtccgtttttcttgcttagcttcttcaaatgtgtcttgttaacggcaatcatgtgacatatataactagatcattttgaatatataatccttcagcacaaataatcgcgttattgatgatgatgatacacatttataggtaagataatatactgaataatgcagtaaaataagtgtttgttgggtaaattatatatagtgtagtaaactttgtgaatgtgtagaatcatctcttgagaagtttagagatttgaagaatgcaccgaagagattttccatcgcgaagcagctgaaacgcatcgtttatcttctcaaatggaagctcattggtaataaaaggttccaatttcacaacctacaaatcaaagattccaattaatatcactaaaacacaaaattacttcttgtttctaagattagaaattagagacaaatttcagacccctttcatgcattgttgggcgaaatttggaagctgagatttgggcttgaagccaccaaacacagaaccggtgattctacggccgtcgaaaagctccattgggtgaagaggcaatgttcttggcgtcggatagatcccaacaagtactgtcgatccccaaccctatcatcaaaataatgtttctcatttccttctttatcaagtaactaaatcaacatcaagtaaaccaaattaagattttgatctcaattcataatattattatggacttacgacgtgagtggataaaaaggcttcgcgaagaacatcaacgtttcctgtacattcaaagctatagtccacgcctcctcccgttatctctcgtatcatctttttgtatattgatccatcgcaaattcgcaatggttaaaaattttagttaacaatttttttattttttttacaattattgatatttttttgttataagaaaattggtatattacctgatgtactggcttagttaagtctttagggtttatgaaatctgttactcccatcagtttacctgcaatatttgattggagtaatatggtaattatatggacatagtcgtagattggtacgctccacaaaatctagtaaaccttataatcagtccatttggtcctgaaaaatatcattttgtttatgttccattatggcgtataattggaaagttggaaattaaactattgcattcgcattcttaagttatttgcttcactacttttcgagatgcttaattagataagtggaaaagagtttgggaaatttggttttattttccccatatcaaccttagtatgtagaaaaagagcgagagcgcaatcgaagcattggtgaaaaagaaagtaacgtacctttctcaaatttggaagcattagcatcaacaccaatgatcctagaagctcctctagctcttgcaccttcagcaaccttcagttctcattcatgaaataaatatatcattttcacttcatatatataagtgaaaaattaatttttatcatactttggatgcataaatggattaatgaagtttaatcttacagcgagtccaacggaacccaatccaaagacagcagtgctttttccttccttcacatttgcaatgttccaagctgctccaacccctatttttcaaaacgacgtcgtaacattaagaaggaaacacctcatgaaactatgcatgcttcttatttttaccacttatgtatatacttgaggtggtcaatggaccacgacaatatgtaacagtaaattaaaatttactgttacagagacaaattgaaataactgcgtttttgaaaggagaattaaatgtgtttttgaaaccaaggtcctatcttctcctttattccctagctagtcccaaaactcactatgttatctcccacaaaggatatgataatatatcatttctaaaacaaatagcaagttctcgatgttcaagactatatggacaaaaatccaagaatccaattgctatatacgagtaaattagtaactaaccagttgagacaccacaactcaagaggctcatttgcttgagaggagaattaggatcgatcttgacgacgcaagccgagtccaagacagtgtattcggtgaacgtggaggtgttaaggaagtgatatataggttggctttggctcgaaccaccgtccttgtttatggtggttgagaatctcgtccctccatcattcaccatcaccctcttcataggatccacatgatatcgctcacagagattactttcttctctcttacacactttacattcaccacattctccattgaaagtcggaatcacgtagtctccttctttcacatcttttactccttctccaacactctctacaatcctatcaaacatataaccgaaacatagaaaacatatttagttagcgacactcataggcggttataaaagggtttagatatcgggatatacccgacagcttcatggccaagaatccttggaaatgctcgttcagcttcgttcttttacacaccaaaaataacatatttttgattagattacaatcaagaaacattgcaatttttgtactgattcgagtatatatccatgagtaccgtgccgttccaacatccgagatcggtgtggcaaatggaggagtaaagaattttaacacggacttccattttctgaggaggatcgacgcatatttcttgaattacaagcggcacttttggaccccatacgacagcagctacatgcatcacatacatgcatcattactatcataatcatcatcatcatcatcatatgcatcaacagcataatgataggaaaccatctcattggtgagtcatttacttacctttacaagtgatgacctttccttgagtctccgccatgttcttgatgcttttttccttttgttatgttagatctttcttttatgaatgtagctctatatatacaggactgagatctatgtatgtctaaatatagtcacatgtataaatatccaaatcgagtcaataatcccgagagaggtgggtttgataagattgatataaccaatctctttacataaaccatcgtaatgcgaatctcaaattcggcgctccagtcaccggctgataaacgaccgaaaaatcgatggtatcttaaattttgtttgtgctccaactaactttatatttcatgcaaaaatttaaactatactatcttcacataagatttgtgaactcctagcattaaagaccgtcattgaataccgccaatcttcgtgatttagacaacgtcacgtcaaatttatgtacattgttctaaaaatattgtgtgttttaaacgtcaatgaaactggatagattttcattaaaataaaatacaataattgcaaaatttggtaatgtatggtggagaaaataagtggtaggttttggcggggactacttacttgatattaaatggctttcaatggcacaccaatcacaaaatggacagagtctggtgatagaaatgactagaaaatggtgatgatgtgtaatgtgtgtgcaccaatagtataaagccttaaaccagtaaaccctcgtgtggttgcattgtaatatcggatttagaatcaaatacgtaaactcggtgcataaaacacttaaattttagctcgaatgctttagaacatctccaatgtattcatctctttttaatcttattattagtattctattttagtgtaagatatatagtgagacttgccacttttttccaaaaagcatatcctcttccgaaattcgttaaatattcgaggaaacttaaatatccggtgttctaaaacaattaaacaagctttcatgtgaaaacggttgaaagctcattcaattaaatttattttagtctcaaaaccaagcataattatttgaaaagaaaagattaaaatttgaatagaaatggtctctgttaatgtggaaaaacacattttgcgtggatcttctaactaaccgtaggggtagcgaaattaatatgagcatcgtttataggaattagggagcaaggacttgtgagtttttgaacacagtaatttgatcttgccgtcaaatacgcagacatttcttgggttttaagtatttttaaagtttaataagttcaaaatatccacaaattctaacaatctaaaaaataaattggagacaaaaccgaaccgtttaatgcattcaacacctaacacattcaacatcttttgataagtgtatattttagaacatacgcacgaatgtcctaggggcttcagccgagaccaacaaaaaaaaaggggaaaaaattgctttaagaaaagacgaataagaaacattattcttaaaggttttttttatcaaaatgtttttttcttaacctttatttttcaatttgtttgataataataggtcttttttaatagttactgcttctaaaccttttcttaagataatatatagtgattttattccgtaaataaaagtctatagtgattttaatattttgtttaataatacataaaaaacattaggaagtttataaaattcaaattggattgtttaaccaccgaaaatcgagtaggtgaattggaatcgtacaatatttaaaacgacgaatgtcttgtatctatctcaataatgtttggatgaatacttgaaaaaaatttcataatgaagatgtactttaaaacctcataaactctcattcatattttgttcaattgttgtaaaaaaaaaaaaaatcccatatatgtacaaaaagattgtaaatggtagcttcatacattgcctataaaacaaaaataacacactacaaactagaaagtaaaaactcagtctcgaaaagcacaaacattgagtaaccaccgttgtacctagaccgcatttcgtacttgatgacgtcacaaattaagaaaaccaccaaaacatttttttaattatattatctctcgaaatttccaaagttgactttttagatattaagaactgacaaaaacagctgttctaagttgacctgttttttgatctccatattacaacaacacaaccgcttctgttgtccttcggacaaaactaagaacatcaaatttgatccaaactctttttgtcataaatcaattttttattccgacaaaaaaaaagaaaagaaatcagttttgactttcttcgaaaccaataacacacgattgtaaaattgtaactgtacgaagtaacttctggatgtgtgatatgttttaagctcttttctttttaagagataaataaaaactctctacgaggttttttttacccaaaagattctcaggtaaaggaagaagaaagaagcatcatcagatcccagagttacatttcgaaaacaagagatgagagatgcagacaaacatctttacatgtctgtgtaatgctgtttttaagacgacacagcgatatatatattgcggagacatgagatatgtgaaaacctgtaaagctaagatcaatgcattggatgcctcggtgatctcggacgaacaggcgtctttgaaggactcaccctgtagaataacaaaccgtcataaaaccgaaaaagagaacgaatttgtgtcgtgaagatcggttttgtttcactgaccttataggtaaagaaccaagaacaactccactgcagttgagagcagctattgcgctttccgcctgtgaagatataaagaaagactactcagaatatgactcaaagaaatgtgtggaggtgtgttcgattattaccattacgaactctacaaaagcaatacgagtcgagtgttgataatctccaagcagcctcaggcgataaacctgtattaacaacaatctaattagtgaattattgcacaaaagaataacaactttgttgcattcttagcaactacaacattgttcacctctccgcagaaggactcaaaaaagatcttcacgtctgattgagtcacctataagcaatttatacacaagtgtgaaagggagatacttcatcaagtacggttaagttaagagaaatgattcaagagagtcaccttcttgtctatgttagtacagtagatagttcttgcacacatctcacgctcatcttcagtctgcatagacaagactaaatcattttcctcagtcgctaaccatcagaaactttgcatagtagaggaaaatctcaccctaggcaaaaatgtcgggttaaccggtgctatagctgttttggatggtaaaactttcacaggatagaatcccaacatagtccccgataaatttagagcagtcatcgcaccctctgaaaacaaaaccacaagacatttaaccactgtagtacactgatgatactccagaaccgagaaaatgaaataataccttcatcagtgaactctatgaatgcaaaccgaaggaccgagtttgggtcaccgcatatgcgacagtcaacaacctgttaaaaccaaacacagtaagacacacaaccaagcacaatgatggagttcatagatgagagcttcaagaaaatattttcaacctgtccacagctcacaaacaaaccagcaagctgctcttcagtgacctataacacccaaaccacacaaagaaaacgtcaacaatgaaaaaaaggtcttgaggacaatcatagaagagataaaaagtgtaaactttcaacctgttgatcgagatcagagacgtagacggttctacggataacatcttctcgctgagccatgcttgttcgagcattcatccttcgtttcccttgaccaaaactcttcttctacaccacccacacacacacaatcaaaacgaatgatatggatataaagtagtctcatcaagtaaaattcaagctttcaaatgtacaatctttcttttcaaagatctccaacgaaaacgaaacacaattgatccaaagctatgaatcgtagactaaacaaaacaacacaaaatttgtgaaaacacaatcaattaacaaaaaccctaatacaattcagtaaagttaaacctcaattcaacaaaagatcataactttgcacaggacaatcgacgaaaaccagtgtctcttacccgtcggaaaccaccgttttcgttaccgtatccgccatttccggtaccagcaaagccattgttgcggaagaaggaaccagcagaggtgaagaaaccaccgttaacaccgttacctccttgtttattcagagaaggaggaacaaactcttcagccataggattaagcttagagaaaagctcctgaagctctctcatatcacgcttaaagctctcaccaccgtcaacgccgtcggatctcgccacgtgtgacccgatcttgctgtaaagaccttgatcgtgccggagaacttgatcgatcctagagtgatggttctgatcatcggaagaaacgccggaatcttgactagtcattgaagatggtggtgaagacggcggcggctggatcacgactcctcctgcatcagcagcagtagctgctgctccagtctcaacaaccgccatgatcagagagaaacccaataatcaaaatcgaaaattttaaggataattgtgaaggaatcggccgatcgggtttatgagttgaggaagaaaaggagaggaatcagcataaggtgctctctggaggaagaagaagaagaagaagagagagagagagaaataaagagacgattaaagagtgattaatcagaggatcggtgataattaatggtatttgatcagagtgattaagtaaggattcgttgagaaaccaaactagtaatgagtttacttcactttgtgtttttttctttaactgcggtgaaaaatagagtgtgattggataacgtagaatccgaccgtaccggggagagatagagagagcctggactctggagtgtttggtctgttttatgagtctaattttacggatttagaaggaaacataatacggtagaaaaaatatgatggtaaaaaaggaggatacactaatatttgattagagatattaaaaacatatgtctacccaaaatataagtttaattagttaaaattaatactattttattatataaagttagatttaacttatataatcgtaatatgttttaattaaaatataagatgccgtcatttctccagtgtaaattttttaatatatatattttaaaaagtccttacccttatcaaaaaggagtatatataataagtaagattttttattttctatatattcaatttttttattttattaatatattaaactagtaacctcattctatttattttgttgttgttaatatattcaaagaaaaaagtaaaagttctttatcgtatcaaaaataaaaaatatgaaatttgttaacaaaatatttaccttattttgttatttttgttgtttgttaatattattcaaaaaaatattagagttctttatcctatcataaatataaaatataaaatttgttaatgttaatgtagaaaattttaatattcttaggagagcatgccatgtggcaaaactgtaattcatgaaatcacaacacatttcaattaattgattatattttagaaagattattaggttagaataaggataaccaagttcaatataattcatgatataataaatagagacccttacaaatatattttttgaatatttttcttaattttttttattttttttggttaagataagtgtaagatatagatgtcagcaaaatatacaaaatgtcaaaatttataattggtgttatcattaatctatctaaaacaattatgaaactaattcaagtatgttagtaaatatatatgcttctatataaaaacattactaataaaaataatatcttcttgaatgttcctttctctcacaaattttttatttacctaatgttaattaaattgaaaaactatattacaagctatatatatattagaagagggtattccacaaagtataaaactcagttagggcattaaaacatgaacaccacaataaatttgtataaaaagctgaaaaaataattggaagttactgttcaattttctacaaatagttaaatggtattatttggtttttgataaaactttaaatttacttttcatttttgattttcattgttcaattaatttttcacacgttctaaattgagtgtaacctaatctaatatattatggacgcccatctattatctattttactaacagcaagtttggtgatttactctttaacattattttttgtaatatatgtaaatatatacatatttaaattagtttattcaaacagaaaatatatgtaaataactctatctactaactcttgattaactttgtattttttgattaaatttgcgtccatatctttactaaagaacttgctgttagtaaattaccagggactttaaggcaaccaacaatgacatattttagacaattttacttggtaatgcgttcatatgacagttcgagagcaaaaatactttacaataaaattctggtaaccttactcaaattgatgaattttagaggttagattgagtctcaaactggtcattaactatgttgttatagatctgtgtgtagttttgacacaaatatatatatatatatatatatatatatagggaaaaatgtcaaaaatattctttgttgtaataaaatgctaaacaaagccctaactttgactcggttaaattgatttgctaatttttattgatttttcatttaatcgttaatttcatttatatatcactacaagaaatacatgatttgcatccaacccacaaaacgtcaaaaaccaaatttattttataatatttggtgatactaatgtttccttcagatctcaccggcttttttcattcttaatatgcatttttctttgtcatcttcttcaacccttgccgatttagcactattatcgatcatgcccaggaatgtggtttccaacttactgaataaggaatcagtgagtatgcttttaaaaatctccgggtaattatatttagctgttgattgttttctaaaatattccatcaggatttccaaaacgattgagttggagaaatatgaaaggtaaaaacatgttaagagaagttgtggatcaaggaaatcgacataagcatttaactcaaatgatattgttacattttgttgttattttgtttaaaatacaaattaaatgaatccatcaaatattcgtaatgcatatgtgtatatatagtcactttactctgatgttctacttttggatgaattacgtaaactggaaatataaagaaaaaagtgtatttccgaccaaaaccaaaagcaaaaacttaaaaagaatatgtgtatatatatatatgatatttttattaattaatttttatcttttaattgacaacatattgttgaacgttttcaacaagtctcatggtttcatctcatctatatatccatggaaaaacagagtcacttctcccactttcatcccgacacatatttgttgaatccggatggatcgctcaaatacaactttgagcatctaaaccattttttagtgaacgagagcatgattcaagaggaagactgcaagtgtatcgtagaaagagaaaacaaggagagaggaagcagctcaaagtcaaaacaaaacaagaagaaaatgagtttcaagaaggaaaatgccaaagctgatccatgttttagaaatatggtggtaattatcaaatatattaattattatgtgtttttaaaggtaatcagatatataatatatgttttattttttcaggagaaaaaggttaacaaaatcaggaatttgcaaactgtgagagatattgatgaaagcaaggtgattgagttgctacagagaggaccagttattttgtgtatagaagtatcatatgaatttaatttttttacgggggtgagtaaattacacatatagacatatatttttcaattactatacattatgattttcattataatgtttcttataaccaaaacgacaggataaagttcttagaggatatcaaagaaagggtctataagatcatatgattgagttgacggttatgacactactctcgaatgcgctaactactttgaatttaaaaattcatacggtttttgctgggggaaaatggatttggaaaactaattcgaaaaagtaggcgaaaaaaacacgagccatctctaatcaatgttttcatgtatcgagagatatacataataatataatattttttttcttggtatatgaatttgtattgtttatagaatatatgaagataaataacaagattttacaagtcaaactcaaactacatccttctttcttagattattgtacatcttgttctccatatccgttgtcttctttggatcctacacctttttgtacatattctaactagatcattacactgtaagtcaaattgttcctgttttgcacttaaaatacatgtttagtacgaagtcttactagatcattaccttcaaattcgtttctagctatatttttaatatgcaactaattgtagaatcacttttggaaatagagttcttcaacaatatattaatatagatgcttaatgctaataatgtggagcagtcaacaatgtataaggtcctaactcctaatttaactcctaatccaaatcaaagcaagtttcataagttaccacatattaagtgggtctgagcccggcccacaattattacataaagcccagaaagagctcgacggacttgagacggtaaattaattttgttaattgccagcagcaacgacggacttcaaacggaaatttttatagcttctctcgttcagttctgcttccgacaatcaaacaccactttctttggatgatttggaatctctctgttcagcttctctgctactgccgcaactggagatgcataagtcgagttctagtttctgttcagaatctggagtctaatttcttcaggtgatacggttcttgttcttgaaaccctgagctcttacgttctcgaatttgagggatatactttgattcctagggtttgttagaattgacgaattgggttgttataaaaataggattttttttaagttgtgtgtagtttaggcgaagaattatagaaattgggggttagggttttgtgagagatgaaaggaagatcgtatcggttttcaagtacggatcctcatgaggattgggttgatggactttggactgtggattgtgtttgtggtgtgaatgacgatgatggaacagagatggttaaatgtgatgattgtggtgtttgggttcatactcgttgttctcgttttgttgaaggacaagagctttttacttgtcataagtgtaagagcaagaacaatgttaatgatagtgaagagactgaggttgctcagttgttggttgaattgcctactaagactttgggaatggagaattc

SEQ ID NO: 1160 - DNA, 90632 bp, Arabidopsis thaliana
aagcttggcatgaaacctgtctcagatgtcagcagagtgacaatcaaaagagccaagaatgtaaacaaatcttctaacaatcaataaactctcatgtctctggttataagtaacataggtttgatgattgtggaaaatattgcatctatgtcaggtgttatttgtcatctcgaagccagatgtttacaagagtcccaatgcagagacttacgtcatttttggagaggccaaggtcgacgatttgagctctcagctacagactcaagctgctcagaggtttaagatgcctgatgtgacatccatgctacctaacgccggttctgaagctaccatggctccactagcagaggaagaagacgaagacgatgttgatgacactggtgttgaagccagagacattgatcttgtcatgacccaagcaggtgtctccaaggccaaagccgtcagtgctctaaaggctaatgatggggatatcgtttcagccattatggaactcactacatagagttgagtagtagagccacctaaattgtgcttttgtttcattgtttcttgtctcagctaccattttctttgaacattattaattatgtctccccttgatttgaagtcattatctgtctactctgatcaaagtatttaatttgcggtcattataggcactatataacaaaagtgtgatgacgtagtagttaacaaaagagtaacagtggtttgtttatacatctcttaatcaaagagtcaggaccataacaagaaaacattacaatcttcagcaatcaataggctccacgtccaaacatttcccaggttctgataagaaaaaagaccaatttattcagtagtgattctgagaaatagtatcagtgttcattctcttgaatcgacatgaccataagtaaaataaagggtaacttgtagaaaggagtaccaacttcatctttctgcacaattagtcatgtgtcagccacttcttaggaaaatgatttgtatgccttatctagtctccatccagaaattggagatcttgaggctgttctttgatattttacatgccaacctgcaaaatcaaaaaaaatcttgggcaagccttaccaatctgacatgtcattgcccttcaaagtatttttagaggggatggatgatttgatgtcacctttctaatatcttcaaggatatgggttcgaaagagaagtctcgtagaccatcaaacacctgtctgcttcagccttcagccataagcttttatagaacagtgcattttggttaatctgctccacaccttgatgctgttggtaaccatttgtaggcacaacctgcccacatgatcaaactgacggtctacctcctactaaacgccaattatcacagcataggtatggagaaaaaaaacatacctgaccaaagccgttatcttcggttgcaccatattgatacgaacgagaacctgggacagtctcccttgaaaccacagagtacttatccttccttttcacatcaaggtcgacagtcatattgtttgccgttggaaactgatggtctctaatcgatagctaatagacaggatttggaatcatggtgacccattaacaaaaggaagaggtgacccattaaaacaatatcattttggtaaattctacaagacatgatagtatatttttcttattgaccttgaataaaatatgttctaggcgaatgtaatgggcttccaagtataatgaaatctcatgtggcttaagctagcaatttataggcatagaaacagttagaacaacataccttactcttgttaggtaacagctttagatcatatgaattgtattgtgcaacgctttgattcccagcatgttcctgactgttgttttggatgtacaaattgagattctgtacagtactgttaatgagatcaagctcttccgcattcggtgaatctgaagattctgaaccatgtgcaagtgttagtaactctgacagcccatgcatcgttgtaagtagtttcttcacatccatttttggagatgggccaggtaaagctttcatatcgcttgtagatgaactcgctgcagtttctacaacatgaaatggaagatgatgcttaaaatctctattaccctttactgaaaatgtagggtttggctccaccgcaatccacttagtagacccaaagttactgtctgcctttggagttataagtgaagaaccgccatgtgacatgttgggaagaaaacgctccacatttactgaggattgtgctaagtctgcatctactacattatggtcctccctataacgagctggaatgtataaaccgctagtattcaccactagcgataaatcatctgcagcttggtttttaccatagccatatggcttttgtttagcatctgcaagagagaactgacgggccaatggattcaatctccgctgaccttgagatttgttgctgcttcctagttttgcatactcagtaatcccaacctcagattctatccaaggaccgtatgaagatgtcgaaccaaaatcatgaccaccatattgactcttaaaactgtggccaacttctccagaagatgtcactaccttgcccttatctagcgacttaacatgtgaagaagcaagagcagaagttgaatatgcatttaccacaaaatctcctagcttctcatgaacagaaggacctagttttgcactagagggaacaaagacaggggccaaaggatccaaccttttagatggttggaattcatttctagaatccaacatgctcacagtcttggaaacactatcactagttacaaaaccgagaatttcatctgcattgtgggtcaagatgcttgtcttttctgctgcatcatttcttccatcttcaagaggagggtcagttaaatcaaattctccagacgacgacggaaaagtcgaggacaaagacttcttcaacgacgaagaactagtctcttcacatttctccccatccgtttcaagtttcttcttagaactagatggtataaactgaggtgccaaaggattcaacttacgaaacccactaagatcatcagtagaacgcctggaagtcatagatttagtaccagaagccagactcttatgagaaagcattcctttccaacaaggagaatcttcctcagactcatctaggtcagactccgtagaagacttctcagagacacaggacaaacccaacttcgcatcaccaacaacatctgaggacttcatcaatacctcaggcaatttcgagaaacttggattagggtttaccaaaacctttccagaactagctatcttctcctctaaaaccaatccttctgcaaaaattcacaagtaacctccacaacattagctctttacaccaaagatgagaactttacaccaaaaactctattcccaattcaaacacacaacttttaacaacaagaagagaagagtattaagattttgtgttatacctttattagtctcaacatcgcgagacaagttagataacgaatcatcatcatcgagaccacttctctgatcatcagaggataaaaaggaaaggtctaaagtataatcaccccaaatagaatcttcgtgttcagatttgagagagaaggcaggagaagaagaagaaccgattgcgaaaggtttagcggaaggtgaaagaccgcttcgtaaaccatcaattccgtgactgtagtgcttcatcttctctatatctctgttgttatggtttaggatggagaaatggtgaaatcttgtagaagaagaagaagggaagggagggattttgcagagcttattcaccttccccttccctgggtttgcgaaaggacgaagctttttccttcctcaggtcaaattctattaaacaaaaaaaaatgtcgttctctgtttactctgtcaaaaattcggattaggacgaaaactttttgatttgacattttcaaccttttatttttgtcatattttttatgtgtccctaaacttctcttctcttttgaattttgcataaacatattttaaattttgaatggtattgagagatgaaaattgagaggtgaagtagtagtatagggccaatgtatatcctaagcttaggtatcatcttgaagctgaggtcacgacattatcgtggtctcgtgtgtaatgtttagacaatttgggtgttgaaaaagtaagatttgagagtgtttgaagataagtaataagattacatttactcacatggaggcttggaagttggaactacaagtagatgattttggaccaacttattccttttagaggataacaagatagccaatgtgctaagagagccatgtattttcctatgtaccttggatagtagtactcccttgtggcttaagtcaattttagacacggagaagcaaacactttgtactcggtattaatattgaagatggttttgttgagttgagaaagaaatgatagatattacctactagaactgccaaaaaattactaaaaataaattcagatgagaaatgagactattcagataaatatgaataatctcaaaaaatgagacccttatttcaaacagaagattaataataaaatcttagaaaagtctcgaagaaaaaatctcacattcaaaactttcatctaacttaccaattaagcttcaaaaaaataatacaactaccattaagtccaataaactacagggaagtaaatcattctctaacaccaaagggaagtaaatcattctcaaaattgatatggtttgagtggctcgaccggaaagagacaaattgaaccgagtaaacagttttttttttcttttgtcttttggttcttgatttcagaatcacataactcgagattttagaggttctaaaggaaatggtgtctctcatctattctttactaagaagatacgtcggaaaaatagagccttctactcaactctacgaatacgatgatgagaactttcacctccaaaccaaaacgttacaaatttgaataatgttttcaaatcaataaaaaaaaacttctttttgaacaacaaaagaaaatcataaaacaaagctctgtaacattttttctattaccttttgctaaagatcttatttacacaaaagctttcaactcaaagaaaaatcacaaagtaagcaagaaaagaaacatcaagaagaacgagaataaggaggaggggaaggaagaagaagagggagagaggtattggaactatggaaaggaagagagtataaaatatgaagtcggattcttctcggaaaaggcgcctgagaaaaaagatgctccacaactccggcgagaaccaccgtgtactccttcatcatctcagcaatcaaagtcaccagcaacattttttagtttctttagcttcaatggaatcttcttagttttcctgttctctgtgtgttttcttatacgattgtatttagttatatatatagttggagaatgggaagtgaaaactaggggcgtgtgtcttctactgtctctccgctcttggtattttttttggtcttggtttatactaactttcttaatttatcatttttaattaattatactattaaattaaatgctctatactatttgactaatcatatttatagtttttctattttaatgttaaatttagtaattaaaaaacagattttattgagtacaagattatatgaaagaaacatctcaaaataattttaaataaacaaataagagtgaatatcttttttttttttagtaggaaataagagtgaatatctagtgaaaatcacgagacaattttttttctaatgataaaagtttttttttttttcacaacatccgttatcaattaaatttttaatcaaaaatctaatggttaacatattcaaaattaatataatttgcagtttttacttcactatatcgaataagtagcaaattcaaaattattagccctcaacttttagaacgcaaaattcttataattttgaatttgtatttttttcactagaattgtcttttttttttttttttaacatctgactttattatattgtaaatggatagtacaaataattcagtaaccatcgaggtggtacattaatttatactacattatactagaattgtctatatatgtttattagtttatactacattattagacatttttggctataaccaaataaatgaagacattaatgacttttttttctcttaaattattcactacaaacataagaaatattcgaatatatttaaaaagtacttattgtgtaacgttgcgccaaaattggtctagatttgaataataaatagaagagaaacaagtgttgcgaaacctgtagaaaacgcacattgaattggatggaaatggacctcaccatttctttatcatgcgggatccactccgaacccgtttgatgtttatccgcaaaaccaaactttatcttgttttcttatgtcatttaattaaaaaattcatatccttagaatgtaaacgacatcaaaattctaatatacttgattagaacttcaaaatcgtttattcatttgatactgtaaattttattgtttctgtccatagtctaagatttctgagtttgttttgtttctatagaatcaaatttgtaggcgttatagaacttgttagaccaaaacaatttattagttttaatgaatatttacttagcaaaacaaaacagaaaaaacgaaatggttgtttggattttattatgaagataaagatcaacaccgattgattatactcgtgaatggtttgtctctattcgaatattttaagatgtaaataggaaaaaataattaattagtagtatgtatgaagcgtttcatttttaacgtccctaacatttttgctttaaccgcatttatttaggatgtgtcagaatctgtgaaacgtttaatgtgaactgcaatctcattgatgaaaaccttgaaactatcacaaaaatatcgtcgtctatatacgtaacataggacgttggattgattttagtttttgttgagcttttaaatttcatactaaagtatggtatatggttggatttggatatgtttagattactacggattggtcagtcgatttggttacgtgtctgaagcataggtctaaatagtcatgatatattgattctgataataagatgatcggactgataagtgataaggatgaaatatcgtatatagtccaccaaattgtcacgttaaaatgggttttggaggcattacagtccggcacactaagtcactaattacatggtttagacgtctaaggctaatagtgttttgttatccaattacatggtttagaagacggacgtactattacgtaagccatccctttaagaaacaatatatatatatatatatatatatatatatatattgattgtaaaataaacatgtttattttgaataatatttattttgagtatgcaaacatatttaccattttgtctcgtacatttttgtgaaactatgttttcttttccttttccatcaagattaaatttgattatgtattgtttgagataatttatttattttattatatgacaagactatattgaattttaattttgaaactattatttttggaaaaatagataaaaatacctttaccttttccaaaaacatgtaaaaaactctcaacttttttggtgagtttttaaaccccgtcttttttaaaatggtaaactaacacctatgattattaaaattaatttaaataagacaaaatattatacaaatatataaataaataaataaaagtaatttggtttaagatttgttttcctaaattctgttgtacaatttattttttccaaattgaaaatttttaaagtcttaatgctaaataattacatgaaatcgcttcattactagtaaattggtggttgtataaacaaattatatttggctcagacaattggttttatattaaaaacaacatatttagaatctattcaaattctatttattttggttcaaggttagatttgatttaatatggataaatgtaattagtgtatgttatgtatgatatattcttctatatatacatttaattgaaacaaaaattttggttgacttcagaaattcatcaacgaaaaaccaaactaattttataataactaaatataaaattttatttggttcggtcacacacgtagaagtagtttgaacttagaactgcaaaaaatggaaaagaaagctacttgttaatgattctagagaatttggcttcattactcaacactacaagagaaaaaatacagactaaaacgcgattgattatacaaacgaaaaacatggagaatggcacaatatatcatcaagtaaacatgcctttgaaggaatctaattgatgaaacaagaagctacatttcgcatctcttgactctttccatatttctactaaaacaactatcaccgccactattatcaccacactactaaactgcaccaagctcttcttctgtttctgccatgatgatgatgatgatatatcttctttttcctgcatttcacactgtttcaatcatacttgttaatgtttttttttttttttttttcatttatgtcaacattagatgctttgcttatggagatgatggttgatgtaacttgaacgaaacatcttaccttcctatggcttgcttctccttctctgccatttgagtttctttttgtattgtttagggttatgagaggcttcctcaatctcgtctgcaggcggattctcctctgagcagtcccctgagcacttaaattagccggttcttcctctacgacctgcacattcatcaacggtcatttgaaaggtcattccaagttgatcacaacactagcaggatgactgaattctaccttggacatggcagattgtacttcatcttcttcttcatagttgtccgcatctctctctttcttgttggtaactggcgtcaatggctgttcgatctgcagccgaattcttctaggagcagtgccttggtccacaacagagtccagatctctctgattctctcgagacctagccttgaactcaaaaatgttactgggactaatgttgcggtcaacatggctttgctcaaaggatgactgttcaggctgattgacattatagttaaatggatcgatagctgcgtaagacgatgaagcatattgcccaaaaacgttgttatgaagtggcgtcaaggtccgagaggacccggttgaagatagaatctctactgcctccttgctatcaacgttctgttcactgacccatctagaagctaaaatgtcaggaacaaattgctgcacatgaagaaacattatggtcagtcccaaatcattatcagtttacaaatccttattatacattctggtaacctgtgagccggaaacttcagcactgccgtcaacaaaagcaacagaatctttgagaaatgggtactcagtagacaacagtcttgtattaccaggccaatgcatcatattcggaagtacaaagtctttcctgtcattagaggattcattatggttatggaatacttcatccaagacatctgttaaagatgcatcttgttcagaggcaccatcttgaaaatgtagcccataatcacagtttccaaaatcactagaatacatagaatccatgtgagatgtagcaaaaccgatgcttgactgtcctggataatatgatttctcactcaagatgggtccatgaagagttggaacgtcccttagaagtggattttcctataccataagaaagcacaaaatggttaacgatgggacgcaatggaaaaattgtgatacaaaatgctatagttggtgcaaacagagatcacttgaaaataagtattacctctactaacgtcttgcccaaattacggtctttggcacgagaagtttcagcgtgattgacagaagtattgtttatcactgaaacatcaggtttcacatcattattgcccttgtcacttaaacacctctcagtgtcatctgatctatctagagcatgtacaccagatgtagctgtttcttggaccatttcagaagatgtgtcatcaggagagcatctagtggtggtggttggagtaaaattaactttctctatttcctcacagtgtgcaggatcacaactatcactaggcttgtggaacaagcgacacaaaacatacggattctgttacaaagcacacacaaccaaagaaaatatataagcagaagacttttaaaaaatcacacacgaacaagccaaaaggtcaccgccatcattaacaaaatgttcaactaagtaggagtagtaatactcaaactaagctacatcaactagattatcgccatttcaagaaacaaattcttactatatgaagcaagcaaagacctcacaactatagattagcttgaagcagacaagaagctagaactggtatgaagaagactctgtaacaaacacacacaaacaagcctaacgattattaccaaaacagagaccaacaagccaaaaggtcactatcaaagacaaaaacattaatctaagagtagtaatacttaaactaagcaacatcaactctattatcgccatttcaagaaacaaatttcttactatatgaagcaaccaaagacctcacaaccatagagtagcttgaaccagacaagaagctataattgaccttgagtagacaagaaaagagaacaaaacagacctgaccaggtccagtaccatctagttccttgtctgtagcacgatactcatgcataatccaattagtacgctctcctctaggagctcttccacgatagaaaacaagagtcttcttcataccaataatcatcttcttagacttaatagttcgatctttcccagtagctttccagtaaccaatatcagtagctctattagaacgatgaccactcggatactttcgatcacgaggacaaaaaaagaaccattcttgatcatctgtctttatcaccgatagccctaaacattcaaacaaaaccctaaaaaatcttatcatcatcactctcaataacaatccaaaattcacaaagcttccacctttcaattctcaaaaatgaaatcatgaagaagaagagactaaccaggtaagtcccatggttcccacttgcaaacatcgatctcagggatgactctaacctctaaatcacggccgttgatttttaaccttaggtaatgattgatgagttcttcatccgttggtctgaatctgaaacctaaaggtaaagcttccatagacaacaaagcttgctccgtcgtcatctccggtaaagttttgttttttatttggttcataaacaaaacctgaagagacagacctttgagctaaagcttgagcttgaccacttggttactgtggtctgccaattgttccatgtcctgactcgcacgtgacgtcagttgtctttcatttccctattttaccctcgtattaataatataattacggaaatgccatggctcaaatccttttttaggcgccgtttgctatctttttgactcgataggctacgtgccgtcagggtccactcgttagattccttcacgtggttctcctataaagttgctcaatttagattgtttttgtattttaacttgtcctatttctggctactacatgggaaaattttgactaataatatcgtgcatgcatatgtttgacatcaggcaagattataattgttgtctgtttttgtcgtaatcaatgaatacattttaagaccatacctcgtttattttgttttatttgttgtatgagataatttattcaacaaccaaattaaggttgttgagttagcacgaaccattcgagtcactagattctttctactttcgttaactatagtgttaccaaaacagagttgagaattctgtgcatgatagtactattgtcggagttactactacttggaagatttacatagagccgtgtaacaattctttatgtactaaaaaaaggttaaagtcttattaccataaagtataataaagctctgtaaaagtttacgtgtccgtgaccataacttccatctccaattattgctccttttataatgggctttaatctggtatttacgcccactaaggttcttgtctatctttttataaattggcccagtactaatttgatttatcgatcgacataggttctcgttcactcttcacatcgtattggccacatgccagttcttttgtcataagaaaaagagccctaataagaacaagggatactgagttgaaattctccggaatttgtggaaggtcaagtattattgtcgctaggaaaaccttttaggatgaatccacaaattgaaaccttaaatcctaatgaaacccgaaaagaatgtaaaccttaattgatatagagacacattcaagtttcaaatggtaagtgaggattgaggaacctagctaaattgctgaatctaactaaatttatatgtgatttttttgtggaatctagctatataatttaatattcaaatagtaacaattgaatctagctaaattattttaaattttaactaatcaaataaacttctaaaattataaactagaattaatagagaaatcccctatatatcttaatagagaaatacacttaagagaataacctttagctactgtgttatttatagagatgtcatgacgtgtcgcaaccagaacaattctcaacaaacttgattaattgtccaccatttattagattatttacaaaaatttgtcattagtattatatataaatatctcaacaacataaaaatatcaacaaattccaattaaaagtaataaataattaaaaactaaatttaattaaaacaacctaataattaagcaagtaatctttcggaacttaatatatatacctttttttttataaacataaaaatgatatgctaacgaagatattaatagcaatcaatgtataggtaataataatttctatgcaaaatatcgctggttcaaataaatagaaaagtatattacattacataatacacaagcaaatttcatatttcaaataataatccagtaaattttgtaatttattacaatatctttatttaataattactttgtttcccgcacataaactatctagtatactattatctatactattaattgggaagcattgtgtaaactacaacattgtaagagtagtttaaaactaactacgcataaattttagcatgcgtaatttagtaaattaacaactactacaactaaataaatatcagagattttgttttttttaaaaaaattgaattaaatcaataaattaataactacccaatattttcgaaaatcatttaaaaatgtttccataacatatcaggctattttaatttgaattgtatatatgcaaacttatttattttggtaatatgttattagataattcggaaactacaatccaatttaataacaaattattatttaatttagattttatacaatttccttaacaaaactatgttaattgtttttgattagtacacataaaaaataatttagatttggattttagatttgtaattatgtacaaaatagtttcagtatagattaaaatatttaacaattaaattagaatttaaatgatataaacttttattttttttaaacatgtaatattcattattttaaaaatatataactaagctaaatttgaattatagaaaagaaaatatatactgaaactattttgtagttttaaaaaatattttcgtcatcctaaattgaaaatatgtaattcacattgcctcacaattaatctagtatattgattctttaaaaaaaaatagatagagattcataagtaaattacttcatgttctaatgatgtttatctcctaatttactattcatttatgcgtattcttatggatttttctttcagggtcaacactagattaaaagaaactagccgggtgttgataaatattatgccatagataaaatcatggaattaacaatcaaaatatagttatacaatctgaaacaataaaaaaacaaatataacttaatttattttttatttttaactaaaatcaacaaatttatcagtttataaaaaattaaaattaaaattaccccgtggtaccctacgggtaaatcactacgatttcatgaggttgcaatattaatttatacaaaatttgacttttaaaatatactttatacaattattgaaaggtatacactaaaaatcggttttatatactacaatatcataaatttataactcacaagttattttaaaatatattaatccaagatctaccacaggtcaatccctcgattttttttatatattacaataagaatatttaaaaataacaaaaataatatttaattttacgaaatgaagttatctcgtggaacgagtttgagttgatattcatacgggatgataatctacgagtaaaatcttataattaacaattttaacacaattatacaattttaaacactaaacaaaagaaacaatatttacaaaataactatatcttaaaattcaaatttttagttacaaaaaaatcaatcaacggtgtaccgcagagtaaatttcacattatataatctaattgatcaaatttcaaacaaaaacaattaatttgtatatacatccaactaacaaaaatacacaaattttccaaataactttatattattccgcaaatcgaaacaaatctaacattcgatttactatgcaaaatacaatgaaatataaataatataaattaataaaaaatttagttattgtatcataaataatactatgcacttttctatgcacattataatttatacactaaaaatgtattccaatacatttcttaaaatatgaaaccccgcacgtatgtgcgggtcagaatctagttatttaataaaataacaacaaaatattatgaaaatttctaacttgtaagaaataatgttgaattttgatgaaattcaaagttattatatttgacatataatcaggtcacctaaacacgaatctaacatatgttcttaaattaataacattaagttattatatttgacatataatcaggttacctaaacacaaatataatatatgtttgtaaattaataacattatctaaaaactcttaaaatgatccaaaatgtcaattgtaactcataaaaagttaatgtagattttggtgcaaatttaaattaatatatttaaaagatttatcaatcataattattatatattttggtgattttaaacaaaatttaactaatctcttgcaatcaaaacgcaaactaatgaaaacaattgtgaaaaatttgatttacaatattaaagtaaatataatttattaaaaacataacaagaataacatcattgaaaacctttataaaaaatatataactaaatgctgtgactattttcctaagtttttctcaatttttgctcaattatttatttggtaaattatatgcaaaacaaaacaattccacaacttttcctcaagttttttttttttttttgtgtgcaccaaattcatagattgaaattagaaagatacatgaagattaggcttcatcggacaaactcgagtaacaaattcgaaaattgaaaagcttgactatacataactcaaacttagagacacaagctgcagtaaacttcataggagatcaagagaagtgtcgaaactaactaacacaagcatgcccatgaggaaggaagggataacgaagaaactttatgagttggcaactctctgcgacatcaaagcatgtgcggtaatctatagtccgtacgagaatccagtggtgtggccgtcaatcaccaacttctgtagataacaataattcaacgttagagaaaaaagaagaagttaccatcaaaacaattaactaaaagtgttttgaaagatttacaagggattttaaaagggttttataagatttacaagagatttttaaagggttttaaaagatgtacaagggtttttaaaagatttttttaaagaatttacaagaaaaccctttaaaaactcttgtaaatttttttaaaaccttttaaaatctcttgtaaatcatttaaaacctttttaaaatttttttgatggaaaatagatttactagggattttaaaagagttttaaaatatttacaaagaatttttaaagggttttaaaagatttacaatggattttaaaagggttttaaaagatttataagggattttaaaagagttttaatattgataaatatatatttatatttatgacgagagaaataaaaagaagaaaaaagtaaacgtacgtcattttagaagaaaactttttcttttgctatatgtagaggaattaaatcttctactttactctgctttttgacttttcaaaaagaaaaagattttttatttacaatagaaaagtatattacattacataatacacaatcaaatttcatatttcaaataataattcagtaaattttgtaatttattacaatatctttatttaataattattttgtttccagcacataaagtatctacaatactattatttaataaaataacacaaaatattatgaatatttctgatttataagaaataaggttgaattttgatgaaattcaaagttattatatttcacatataatcaggttacctaaaacacgaatataacatatgttcttaagttaataacattatctaaaaactcttaaaatgatccaaaatgtcaactgtaactcataaaacgttaatgtagattttagtacaaatttaaattaatatatttaaaagttttatcaatcataattattatatattttggtgatttttaacaaaacttaactaatctttctttttttttgtaatcaaaacgcaaactaacgaaaccaattgtgaaaattttgatttacaatattaaagtatacataatttattaaaaacataacaaaaataacatcattgaaaacctttataaaaaatatataactaaatgctgtgactactttcctaagtttctctcaagtttttttcaagttttgctcaattatttatttggtaaattatatgcagaaaaacaaaacaattccacaactttttctcaaggttttttttttgtgtgctcataatttataaattgaaattagaaagatacatgaagattaggcttcatcggagaaatccgagtaacaagttcgaaaattgaaaagcttaaccatacataactcaaacatagagacacgaactgcagtaagcttgataggggaagaagtgtcgaaactaactaacacaagcatgcccatgaggaagggacggataacgaagaaactccatgagttgacaactctctgcgaagtcaaagcatgtgtggtaacctacagtccgtacgagaatccagtggtgtggtcgtcaaccgaaggtgtttaagaggcggttttaatgtttattaaaaggccggcgatagaacggtccaagctgatgatgagtcatgagacctacttgtagaaccaaattaccaaagaaacaaagaaactggagcgtctacgtcttgaaaaccgagaaactcagcttacacattttatgtttgattgtgttgagggtaagataagtgagcatcagtatggtgcaagggaccttcaagatttaagttttcatattgatcactatatcaatcagcttaattccagggtcaagatccttacaaacaatggtgagtcttcttcttccgttcctcctctacttcatacttcagttgcgggtgcgggtgcagctcctcttcctgttgcgggtgccgatcttccgatggatcagaatcagtatgagccgattcagctctatatccctattggtcttagttatcatattcaataccaacatgaaatctatgataatttcagtttggatccaaatcattagtatccgtttcaacatgatccactcatgaatatgttgatggaatatccttatcaacaagtgggttatgttggagagcatgcgcacatccttttcatgaacggaaactactacaactaccaccaaacaccaaccgttggtcttactaccaccggtcacatgccttccaacaacaacaccacccccaccaccgatgtgtgatgtgtttcaatagtttgcatttttgttttgttcgtttcaaaaaaccttaaactcttacaacaattaattggatttggtttggttataaaagatgtgtctattcaaacaccaacttttggtaaaatatttgtagaggccatacctcgctgtgatatatatttcgactatctcatcccattttttgggtgatttgttcaaaactagctatgtctttttcggtatgcaatgtataaatgtaaatgtaattttgacaaattttaaattttatttaaaatttatttatgaaaagtattcattttgcatataaaataccaatttggcaaattaaagaatcttaaaaagaggtgtaggccggcttttcatttcctccgtacgtaaataaacaacccaccaaacaaaaatctctcctcgctccatgccttctctactctctcttcattctctcctaagctatggcgagaagagaaggagaagtgacggagacccttctgaaaaagtcgacggagaatcgcggagaagatcgggatgggttagggatgaaggagaaggtttggagggaatctaaaaagctatgggttgtggctgggccggcgatctttacgaggttctccacgtccggactatctttgataagtcaagctttcattggccatcttggctctaccgagttggccgcttactccatcactctcaccgttctcctccgttttagtaatggtatcttggtgagtttactataagtctataacgattagatcagttcttccacacactctttactacaaattcgtaaaacataaaaacaatttttttttgttttaataactattaatatatgttaaggattgttctgattagtttgaatgatataaatcgtactatataaacggtgacgtgaatgcttagatagacttcttgtgggaacttgttttggttgatttgtcaaccaatcataaaaattcacaaccactcaactctttgcctttatgaaatgaaattatgctatttctatgtatataagatattgaatgtttggaaggcattgttggtcgtatactcttcgtttattgttagtgtagttacctttttcacataaacaagtctcaactgaaactccatgagttttgattattacatcaattattattaatggttggaaatgcaacaaaaacatttcattgttaagtagaatcagtgggtaaatacaaaatagaataaagtttagaaagttggagaatataacaaacacctttaaccaaaaaaaagttggagaatatattgattttataaaaagtgaaaaaaaaatattgtaagaaatgacaaaaaaaataaaggaatagtcagaagattaatttatattaagacaatatattcccttttcttatttgtactccatagtgcaacaaagataacattgtcaagaagtatagcgagtcattggccacaaatgtccaatggtcacctgccaatgccatcgttttcttaatgttttggtctttaattagcatatcatgtgtgaggttcgaatttataatatgaaatagtgcttttaaaatgttattagaccattggacatatattcagttacaccaaaaaaattcaatacacaatatatgatctctttaccaacaagagtttataggttatatacattttttagttatcaacatgcaatatccaagtttaaagtttaaatattatagttgtttatatataagcgtttatcaaacctacttagttcttgttttataggcaaaatatgtaaaatatttaaccataaaatagtttttttttggtgtaataacgaaccgtcaatgaaacaatatgcagttaggcatggctagtgcgctagaaacactatgtggtcaagcctatggagcaaaacaatatcatatgcttgggatctacctccaaagatcatggatcgtcctcacaggctgtaccatttgccttatgcccatctacatctttgcaggccctattctcttggctttaggtcaagaggaacgccttgttcgtgtggctcggatcatagctctatgggtcataggcatcaacatctcctttgtgccttccttcacttgccaaatgttcctccaagctcagagtaagaacaagatcatcgcctacgttgctgctgtttcgttaggagtccatgtcttcttgtcgtggcttctagtggttcattttgatttcgggatcgctggtgccatgacctcttcgctcgtagcacattggttgcctaacattgcgcaggttttatttgtcacatgcggtggatgtacggaaacgtggagaggattctcttggttggctttcaaggatctttggcccgtttttaaactatctgtatcttccggtggcatgatttggtatgattttctaatcttctcacctggtaaaagtatcaacatccatcaacgacataagtatatatttactagtcatacaaatacttttgtagaccatgtggttgtaatcatatatatgaaaagttgaccaactctctccaaatgattaacacatcatcactttagcatttgccatgtgtctactaagtaattaatgtaagctcttcaacttctaatttataggttaatgatatatttattatttaattttacatatttaattatagtattactaaatttattttaatattacatgatttttcaataaaacaattttaatagttttctcatactcgaagatttttttttgtaatccaaactcaaaatacgattatataatagtcttagattacttaatgatttgagtaagttattctcttaaattgatatttatattctcttaaattgatatttatacaataaatcactgagagtgaagaatacgtaaggagctccatcatcaaattcttaggtttctagaatccaaaactaccctctgttaagttggtttaatacaaacgttatttatgaattatatgtatgatgcattgttgagaatgttgttagaaaaaatattcttgaaactaaaaataattgcttattgcatgaataaataattagataaataaaaattatatttaaactaaacaatacgaaaaattccgaaaaaaccgcggcgtagcgcgggtgatcacctaatttatatataatgccacgttgggtgaaaagctgccaagtacattcattcattttctcaaaggttgagaaattttgaataaatgttatagagaaaaatttcgtgtttatgtatttgtataataatattattactataatagtattaatattattgttataatattactatgattaatatatatatatatacacatatattatgataatatataatagcacttgcttggtgatattaatttttggcagcttggagctatggtacaactcgatcttgattctgctcacgggaaacttgaaaaacgctgaggttgctcttaacgcacttgcaatctggtaaagtatttttatcagttttatgtcttttgtctttgaagctatattcatacgatcgatttgtacattatctttagatcattcgtctgaatgctactgacattttaccatttttgacttcatacggaacactactgacgaacattgttcgtaggaaaacagaaagaattggttttattgtctacataacaatatacattgatgctagagaaaatgataggtttaggttaccaattgtacttatactctctagctaattggtagccgcggaatagcataatgcttttgcgattgatcataggcacttagattcaatattatatgttataattttcgcagcatcaatataaatgcactggagatgatggtagccttcggcttcatggcagcagcaaggtgcgtatatattgtatatactagatatatttgattatattcttcttgattaagtcattctaaatatttgattacacatgctttatttaaatatcttataatcatcttcatatttttattttattttgtaataatgttttgtaatagtgtaagagtttcaaacgagatcgggagtgggaattctaatggagccaaatttgcaacaatggttgtggtttcgacatcactttcgataggaatcatcttcttctttatcttcctgtttttaagagaaagggtttcatacatttttacaacaagtgaagctgttgccacacaagtagccgatctttctccactcttggccttctccattctcttgaacagtattcaaccagttctctctggtatgtatcttgccttttcgatactcctatattgtttaccatatataagacattaattcatcgaacgttgtagggattcatttttcaatgatcactctatattcatgcattgactgaatatgtgaaattggttattataggtttttacgtagaaagggttttgtgtgatatatatccactatccagtcactttcacgtataatgagttaccaatttatcattatatgatgaatacgtgacgaatgagtttgtttataaccctagacaacatgttgaacttatttataaatgggtacaggagttgctgttggagcgggatggcagaaatatgttacggtcgttaaccttgcttgctattaccttgttggaattccttccggtctttttcttggctatgtcgttggtttacaagtcaaagtaagtctcaatttttattattaatattttctttttagttttttaatttaattttgtatatacaaatataaaatagtttttttttaaatataaaatttagggtgtttggttaggaatgattttcggaatcttcgttcagacttgcgtgcttacagtaatgactatgagaacagactgggatcaacaggtttgcaaatcgaatattattggatttttagtagaaaattataagtatttttttttggttataatataagaactgacttgtatatatacattactccttattgttataaataatgcaggtgtcttcgtcgttgaaacgtttgaaccgttgggttgaaccagaatccccaagtcgaaaccaaactttacaaaacgaatgatggtgaagattgaagtaaaacttgagtttgtattcgaattttgaatttctacttcaccctcgaatgtacacacttgcgtaaaatgtaaatgtgaaacaagtggtaacgaatttggaccactaaagtatcagtccttaactcagtgatcattttcacctactaaactaggaatctttaagagctttcaagtggcaaaccaattatcgcacattcttagagaaaaaaatttgagaggaaaaaacggtaaacaaatactgatatagatcaaagaagaaagaaatagcactacaacaaaaatctagtgtaactattataaagctgtcgtaacaaatcaaagccattttgttttgttagcattttgtttcgaatttttcttggctatgctatagatttgcagataaaggtagaattattttttcattattatgatttttcaaaacaaaatatacgttgttttcttattttaacatttcttctaccgaatttttattcaccaaatttttttatgtagtataaaatttaaaactatttttctttcaatgtcaaaatctatactattaattgggaagtattgtaaataaacaaccttatgaagggtagaatattacatagaatgccattgattgttagtgtttttaaataaattcattaaggatacaatagtaatcacaaaattaatagatttaaattaaaaattgtaatattttttaaagtaattattagtttcccaaaattaaaataactttctctttcctattaattatggacgaaaaattaaactttatttcttaaaatttattaaccaataagaattgcaaaactaagatttgatatccaattatactattttattaaactaacatttttgaagttaatttttatttattttttttaaaaaatcataaaacttgcttgataccattaataaaaatcataatttgcgatagataaataaatttaattttagaattttgggttaagtattttgaaatataaaatgaaaacaattatttcacaatttctaaaaaacaagattagatataacaaagatttatatttactatgaattaaactaaaaataattaatttaaactaattatcattatgccattcatttagaaatatttaaacaagaaattatacatattaatttccatatattttgggggtttttttcttctttttttcaaccggatatttctttaaataaatccataatatattattgcacaaactttttttaataatgtaaataattatacatttttcattcaaaacatattatccagcaataatagattgcttttatgggtgtatttcaaaatgtaattatatttcaaaaatccaattaattatgattaaacaagggaaataagaatattgaaaaatgtagctaaggaaataaacattattaaatttcttacaaaggtatttgttaaaatgttatttatatttttgaatttgaagaaggaacaaaaatcaagaaaggatatttgtgtgtttaacttatgatatatttgtaaaccttaacatcatatatgtttatccacaaaacacagtcatatagtataacatgatatttaaaggtaaaaaaataagacttttggaacatacttttaatgtaatgaaatgaaaataggaattttgagacacaaacgacatgaaaagagacggaagcactatatataaaaaaaaatgaaaccaaactaaacatcaaattaaatatccaacgggtatgagtttgggttatgagcactatatataaaaaaattatttacacacataactctgcatgtatgtattttgtgacacaaattctatttgtgatgattacggataacgggttggtagtattttatttcacatatacagacgagttatgagacgaaaaatttataatagcacattatgggttttccgttccaagatagttatgcctagcaaatatacatgaaataacccaatctaaaaccaaatccatatcctattttacactgataatcaaactgttataatgttttgattagtttagaaaataataacgtacaagcacttaactttacaattaagtaatatcttaatttatcttactaatataattttgtcttgtgagtccggatcttaaaatataactatacacgaacgcaattgaattttgatcattactcttaactttataatatctataatattacaaagtttactcataacaaaatattatatatttttaaaatctattaaacaatttatactataatatatatcacaaaataacaaaataatctatattgaatttaaaatatgaaaccccgcacgtatgtgtgggtcaagctctagtgtcttgttaagaatggtttttgcaactttcgtgcaaacttgtgtgcttactaactctaacacatattggaataaacatgttttattaattgattaacatttttaaaaaatatgaaatccttaatcgtttatcataacaaaattacgaacttgtttaagaatttatattggtaatatattttaaaatgttttcaggtcgtcgtggctaaaacgtttgaaccatttggttgaactagaatctataagtttaaacgaggctttaggaaaagaataataattatttgatactggaaatcctcttaataaatatgataatcttgattcactaaataaactgtaattgcttaattacgttgatctcacaatcttgttagctagcacaagaatgtgacttgattcttgttttatttatttattatggtttttggtgaaacacatagtctcacgacctatgtgtaacaagaaatatgaataaaaccatagtctcacgacctatgtgtaacaagaaatatgaaaaattattcataattgttttggacaaatgatcgatgagagcacgatctaaggtgatcttaaaatgcatctatttcttaagagtattttaaccactcactggtcactgcaacacgaggcattgacggatttttgtatccccgctaaaacaaaactaaatacattaattataaagattgcttctcaaacccaaactctctttttctgccttctctcttctatttattgactacttctcccgaaactaactagtccataaaatacaaacatagactccaagatggccggagaaggaggagagctcacggcggctttgttgaaaaagacgactgagaacggaggagaagaaaatgatgagttagggttgaaggaaaaagtttggattgaatcaaagaagctatgggttgtggcggcgccatcgatcttcacgaagttctctacgtacggagtttcattggtaactcaaggctttgttggccatattggcccaaccgagttggccgcttactctatcaccttcaccgttctcctccgtttcagtaatggtatcttggtgagtttactataacgatcttggaaatggtatatacttcatttataacaattttcccatttttattcaatctcactaatcccttgattattatggactaagagtttgtgggcaaatttatgttatttaaatttttaagtattttatatatattagaatatgaaacatttgattagtgtactatgaatttttaatactttgaagataataaattgaagtgtttggttttagtactatatagatttacagttttgtatattggattgttgaatatttaacattatgttttgtttaattttcagcaccaatgtttcctttttcatatatagaggatatataatccttgaatattatggaataagaaagagctttaacatgtttgacttttttttgcttcatttaatacactgaaaacaattaattatgtgaaagaatacaattgagttgtttaattcttctgtgagcctgtgttcaactagttagttttgggagaacttctcttatcaatttcagtattttccaactatttagatagaccgcttaaaaatatatatatagagaaccaaatttgaacctaaatcgctttaaggaattaaacccatcagcctaaaacacggttaactcaattaaaatttggttcagtttataatatatgattttggagtatttttcgaatatatgttatttcatgaaactacaatgtaactgtctcaacattggttataactattaatctaatgcagttaggtatggccagtgcactaggaacattatgtggtcaagcctacggagccaaacaataccatatgctcgggattcacctccaaaggtcatggatcgtccttacaggttgtaccatttgcatcatgcccatcttcatcttttcaggcccgatcctcttagccttaggtcaagaggaccacattgttcgtgtggctcgggtcatagccctatggctcatagccatcaacttcaccttcgtacccgccttcacttgccaaatattcctccaatctcagagcaagaacaagatcatcgcctacgtgtctgctgtaaccttagggctccatgttttcttctcgtggctcctagtggttcatttcaatttcgggatcactggtgcaatgacctctacgctagttgcgttctggatgcctaacattgtgcagctcttgtatgtcacatccggtgggtgtaaggatacatggagaggattcactatgttggccttcaaagatttatggcccgtcttcaaactatctttgtcttccggtggaatggtttggtaaggtttcctaaaagcttatggaatctaaaagctctgcaaacaatataaatatcaattagtgatacttttacactgagaatctgatccgaccgttacagttacgcatatatattatacactgaatattttattataattcatgttacttttcttttgttatatgtttgattttttcttgttaatttactttactttttttaatttatgattattacttggtggtcgttattttttacagcttggagttatggtacaactcgatattagtattgctcactgggaatttgaaaaacgcagaggtggcgattgatgcactagcaatctggtaaataaacaagaattgaccttatatctcttctggtttccatactacacattttctttatactaactcgactcttaagttaaaatatggtatgagtataaatagagtaacatacaaattataatattttacaaatcgactaatcttttccatttcttttttgcagcatcaacgtaaatgcactgcagatgatgatagcacttgggtttttggcagcagtaaggtgcattgatatatatactatacacagatacacttcacttcactgatactaattatatcttatctttttttttcttggtatgatcttaatattatttatatatcactcttctatgtaattatctctatatatagtgtaagagtgtccaacgagctcggtaggggaaaccccgaaggcgccaaatttgcaacaatcgtagcggttttcacgtcactctctataggattagttctattcttcgtcttcttgtttctaaggggaagaatttcgtacattttcactacaagtgaagctgtggcagccgaagtcgctgatctttctccacttttagcattttccatcctcttgaacagtgttcaacccgttctctcaggtatatacattagctagttcaagcgtgatggttatcatcgtatcgaattcgaactgatatttgaaacgtagtatatgcctttaattggtttcaaaccttatcaggagtggcagtgggagcgggatggcaaggatatgtggcttacattaaccttgcttgctattaccttctcggaattcctgttggtcttgtccttggttacgttgttggtttgcaagtcaaagtaagtttttctctttatatattttttcttcataatgaacaaaagtaataaaattaacaattgaaaacaacataaaactttacttatctttttttgaagggtgtatggataggaatgctttttggaatatttgttcagacttgtgtgcttaccatcatgactctcagaacagattgggatcaacaggtttaaataaacaaaattgtagtttccccttccaaaataattagtttgttcaagcaagctatgttattggtttggagcttaattatattgtttgttgccacttttttctgtaggtatctacgtcgttgaaaaatataaaccggtgggttgtaccagaatctagagatgcaaatcaaatttcatcagaggaataattcgtttggattatgatatgaacaaagatattatataattatgatgttattttgggcaatagttctttctaactcagattttcaatatgaaataaattttgatggtaatttattaggctttttgttgttgttgttgttgttgtggtacaatgaaaaaagagagtacaatctatataatttattataatcaaagaagaggataactaaaatttattaatgagctatttaaaagataaaatcccttttagttctttaatttcaccaacatgttaactcatagtaaaattaaactttggtagaattttgagatatactagttattgaaatagtgcgaattagggtatgaccaataaaaagaagagagtacctttggaattttggggaaatttgtgtgcttactactatgatgacactaaaagagattaaaataatcatgttttataaactgattaccatttaaaaaaaatgaaatttcttcgtttatcataggaaaagtacaaacatgtttaaagaaattatattggtaattatttttaaaagatcttcgtggctaaaacgttaaattgattgattcattttgacaaagaaaaataaacgtttgattctggaaatcctcataataaatatatacgacaatcttaattcactaaaaattgtaattgcttacgttgcttagaacaagaatttgactattgtagtttgatatgctcgtttcttgattttttttttatatttttattttttttaaatgggtttattatgcaacacatagacacgagactcacgaccaagaaatatgtatatgaataattatatttttgataaaaatattttgttttattccaatatactttccaaacacacactttttaagcatatataaagataaagtttagatatgaattatagataattgcatttaaacaaatgatcgatgaatgcacgatcttaggtgatcttaaaatgcatctatttcttagagtattttcatcacttagtcactcactgctacaaaaggcgttgacgaccttttgtttcccagctgaaatataaaaaaaattgcttcttaaactcaaactctctgctctctctttcttctatttatttcctcctatcagataaaaacacatagactccacgatggccggaagaggaggagagctcacggaggctctggtgaaaaagaccggcagagaagaagaggatgagttggggatgaaggagaaggtttggattgaatcaaagaaactgtgggttgtggcggcgccagcgatcttcacaagatactctacgttcggagtttcaatggtaactcaagctttcattggccatcttggcccaaccgagttggccgcttactctatcaccttcaccattctcctccgtttcagtaatggtatcttggtgagtttactatagcgatcttggtaatggtatacgtagcttcatttatatcaatttttccaattttatttaatctaatgaatcccttgattactatggattcttctccgcttcagtaatggtatcgtggtggtgagtactacttcaatttttatttaatctaatctcttgattattagtgattaagaaataactatattacaaggtcagaccatgtaggtgaaaattaaaaaaaaaaaacatgtaggtgaatttatgctataactaagttgcatggaaacggaaacagaaacgcggatgcgaaacgtttcagaaacgggaatcaattttttattaaaattagagattagaaacgttttaaaaacatataaatatatatatatatatacataaaactatattaaataaaaaatgatttaaacaatataagtctaaactatcaatattaaataagctaactaaaattctaaaagataaagattaaaatttaaaagattcaaattttaatatctaatttagaccaacatttttattcttattttcattagtttcatcaaagataatataaaactctcttcaaatctggtttatcaagaaaaaaatcttaaaactaagagttttccaaaattagttatatgtattaataatcttaatatttccaattttagttattaaattttcaaagtcaataaaaaatatttgtcgtatgtctatttcaaaaacgcgagttttcatcgtgtttccaaacatggatttttaggaaacgcgtttccgtaataatttttgcgtttccgaaacgttttcaaaataagttagaccaaaactatattataaaatttggtctcacttatttgaatttttaatacagattaggtggtcgtgtgaagaaactattatcaaactcaattaaaatttgtataagtttatatggttttggagtattttttggatatgtaattccggttaacatttattttgaaactacacaatgcaaaactacagctgtctcaaatttggttataactattgttctactgcagttaggtatggccggtgcactaggaacattatgtggtcaagcctacggagccaaacaataccagatgctcgggatctacctccaaaggtcatggatcgtcctcacaggtggtaccatttgcctcatgcccgtcttcatctttgcgggccctatcctcttagctttaggtcaagaggaacgcattgttcgtgtggctcgggtcttagccctatgggtcataggcatcaacttctccttcgtgccctccttcacttgccaaatgtttctccaagctcagagcaagaacaagattatttcctacgtgactgctgtctccttagggctccatgtcttcttctcgtggctcctagtggctcatttcaattttgggatcactggtgcgatgacctctatgctaattgcgttctggttgcctatcattgtgcagctcttgtatgtaacatgtggtggatgtaaggatacatggagaggattctctatgttggccttcaaagatttgtggcccgtcttaaaactatctttgtcttccggtggaatgctttggtaaggtttcctatttttgttttgtgttttgaacacttaattaaggaattagctagtagtggatcaaccaaatgttttcatactgatagctttagttttcattgtcattgttggtcaaaacaagagattggttccacttgatgcatatacttagtccatgtattagttttcaggctgtaaactatataatataattatcaatcttgtaggatttgatccgactgttacatttacgcatatactcctgagaatgttaggagtatattatacacacttttaggagtatattttttttttggtgaattacttttaggagtatattatattcactgataatttaatgatagttctagttacttttttcttttgtttttttttttctttctaatttacttatctttttaaaaattgatgatgattactttgtggtcgttattttttacagcttggagttatggtacaactcggtattggtattgctcactggaaatttgaaaaacgcagaggtggctcttgatgcactagcaatctggtaaataaacaagaattgaccttctatatctattctgatctccatacaaaacattgaaacataaatacattttctttagtactaacttgactcataagttatagtattgtatgagtaatggtacatacaaataatatattataaatcgactaatcttttccatttatcttcgcagcatcagcataaatgcactggagatgatgatagcacttgggtttttggcagcagtaaggtgcattgatacatatatagattatatacaacacacttcactttattgatactatttctatattatctttttttcttggtatgatcttttatttatatatcatcttatttgtaattatctatataaatagtgtaagagtgtccaacgagctcggtagtggaaaccccaaaggagccaagtttgcaacattgatagcggttttcacgtcactctctataggaatagttctattcttcgtttttttgtttttgaggggaagaatttcctacattttcactacaagtgaagctgtcgcggccgaagttgctgatctttctccacttttagcattttccatcctcttgaacagtgttcaacctgttctctctggtatatattttagctagttgacgcgtaatggttattatagtatcggattcgaaccaatatttggagtagtatttatctataattggtttaaaaccttaacaggagtggcaatcggagcgggatggcaaggatatgtggcttacgttaaccttgcttgctattaccttgtcggaattcctattggtgttatccttggttatgttgttggtttgcaagtgaaagtaagtttttcagtttatatatttttcttttatgttgaaaagtaataaaactaacataaaactttacttctttaattttgaagggtgtatggataggaatgctttttggaatattcgttcagacttgtgtgctcaccgtcatgactctcagaacagattgggatcaacaggtcagaagttgattactatataatattccctgaattaatttgtttaagaaaaaaaattgtagtttctccttccaaaataataagtttgttccttagcaaaaataataattagtttgttcaagcaagctatgttcttggattgcagcttatactgtttgttgccacttttttgtaggtatctacgtcgttgagaaatataaaccggtgggttgtaccagaatctagagatgcaaatcaaatttcatcagaggaataattaatttggattatgatatgaagatatgatagatttaaagattatgatgatgttccttttttatgaaatgtgaaaaaaaaaattgataaaaaataaaggttgtttacagaagtttttaaggagcttgtgaattacacaaaaacaagagcatacaaagaaaaaacagaccttcacgttacggtccattaaatcttgaactgaaccaccgtagcaacagccctcttagcttccaattttcgtagtacctcaaagacatgatttagcttagagatttttatctgaatataatcagcttagtgttgaatttgagttatatatactctttttctctcggtgttctattgtattatgtcattatgtgtgtagaactagaatcgtctcctttgcccgtaaacatagccaaaatattgttagtaccaagaaacgtaaatttggccatgcatatatatataatttactccatttgttactacagttttttggatttgtttggtgactttaaaaatgttttcatgttcgtgacctcatgatgatgattgatcgattgtgaaaaaaggacagcttttgtaaggaaataccgatctaatactacagtgacgcgactgcttacgtagacttctttgcctcctcttgtcgtagctttgttttgtttttttcctttaacaaatccttattcacaaccacaaacccctttgttgttcatatgatcatataaaatagaaatatgcatacatttcttttttatctttaaatgtcatttgcagatttatatctatttttttctacaattatttattaaaatttaaatgccaaattggtatcaaccactaatttgggtttaaaaacaaatacatatctttgttggatcagaagaatagttgtggtattgaaccgttggattgaaccagaatgtaaagattaaacgagacttcacaaacagaacaaataatatttgttcgggagaattctctaatctatataacaatatcttaaataatttaatttcttaagtctttctaccaatttttttttttacaaccatatttcattaagaaagttcaaaggactactacagagggaagcccaattactacaatgaaaatacaacctaagttttaagaaaacctagatgctgacacgtgttgaagtcttctgcttcatcaagccacgcatcagttgatcgagcgctgccgtgtttttctcgccaaacatcaccgccttagatcagccaccgtcgatccgtcgtggagcgatgggtggttgcctcctgtctgacgatctcgaacccaagccgtaaacgccgagaacctccagatctatcatatggtatgcttcaagagttctccgagcaaatccaactcctgggaagttccatcacagacaacacctttactgatgcagtcgaaacattgctccaaattcacgaacaaagaaagataatgaagatattactcctcgagatgattgggaggatcggatgaacctcgaggggcagttggacaagagattagtctcgccgtcgcgagaaaacaaaaaccggactactctagtagactgacatccgactagaagtcgaaaacttatttaaatctaatataaatctatatctactaaatcaacagtcactttatcacaaactgcaacattctcctgtttacacgtaagcaaagtcttaatttattgagttttgatttttctgaagcgtaaaacaataattcttttctcattaacataaattattaaagagatttaatccataatttatttctttctttctcgccatcttcatcactatcttccccattccccatatcttgcaacagttattgctaatttatgttgtttcatcttctatgcaattttctaattacgaatctcaaatttttcacattcggatcagttattttcttttccgcctgctttacaccatgacgccatggcagattaacaatccttacattttttttgctgcttgccattctcaaaccaaaattcatctcactctcccttctcattcgaggtcagttatggctgaagaagaggtcaaccacaacgactgtatattcaattaaggtatcaaatttgtaaaatttctgaattattataattttcagttttccatatattgttttggctttcagttttaacatcattttctttatactttgtgaattattacaattttcatctaatcacatctcattgttggctattaatgttgtcaagagaaagtgtttgagaatctgactttaagacgacatgggtttcgttttcaggatcccgtgtgaaacattttcagaaaaataaaactcttacacgatcatgagtcatgactaacccaatgacatgctaaggttatcaattctcaattagttcttcctttattttttatttaaaaaaatagttgatcttatatttttaaactcaaatatagtgctagacaaattgactttttgattttgtgaaatcacagtaaaacaaaaaacgaagccatacaagcacaagatgtactgatatacactagagaaaaccaaaattttttcagttttaaaatggtgatatagatgaacacaagagtcatatatctgaaaagctgagactatacgacaaaggaaaacagaaacagaagaaaaagatatccataaggttgtaaaacatgttttctcatgcaattgaatcttcaatagaattggattgattacaaatttatggaccattggatttttgttatgctagaatctttagaactttggaaatttcgagttatgaggtttagaagttaggcattattgaaattgtacgacgaatagactatatagagaatatatattttattttttattttttgggcaaaaaagaatatgcttttacctgtttttctaaaaaaaagttatcttacacaggacacactaaagataacgctttcaaacaaaagaatttattttttatcaaattatttttgtcccgaacgtagtccaggcttcatactagtaatatttataagtccgaataaatccgaaaataaacccagacgatatagagcctcttctctctgaaaaattagaagagataaaagaaaagaaactctcttgtattttgcaagattttattttcggtttaacggaaatcgcctgctccccaaaaaaaaaagagtttttttaactgaaataagtctttctaccaatcttgttagcagaaaaatgtgacaatagtagtagttcgatacgctcgtgacttgattcttgtctttttatggtttatggtgtagcaaaattaaataattgttagtttttctattttattatataaaacaatatagaatgatttaattattttatttcttagaatgttttataagtttcaactttcaatacatgactatttgtattttataattggttgaatcaaatatcaaataataaatttgtttactaaaacattattatatattttctatattatgaaacataggtaggtttgttagtcaaaataaatggtctataaaatgcaagatatcttagctaggtgtctataaaccactcactgctacttgctgcttggcgtagacggcttttcgtttcccaataaaaatgacgatttttaagcaaacaaaaaaacattaatctataaagacaacaaaaaaaacagagttgttctcataaaccaattcatacacaaacactctagtctcctctctttttctctgccttctctcttttatttattccctccttccctctggtcctccatcagatacaacaacagagactccaagatggccggaggaggaggagagctcacggcggctttgttgaaaaagacggcggagaacggcggagaagagaaggatgagttagggttgaagcaaaaggtttggattgaatcaaagaagctatggattgtggcggcgccagcgatcttcacgagattctcaacgttcggagtttcaataataagtcaatctttcatcggccatcttggtcctatagagttggctgcttactctatcaccttcaccgttctcctccggtttagtaatggtatcttggtgagtactttcttcaattattactctcaatttttttaccaacaagttaaatcatttcttcaaacattgaaatcttcgtgatactattactgaccattcataaattaaacgcgttttttgtttgtcataacccttagaaataacttttcattaatctatttaccggtgattgccttagaatgcataactatgcaataaattaaattgtggtaccttactgaaaatagaaaagaaaacattgaaaaatgattatgacaagtcttttttcgggaaagaataatttctcttttttttctgttcaacaattccttttgttgcacattaaatattattgactaacaaatgaaaaatcagaaatataattaattcttccaaaactcaataataaagcacagcatgtttttgattggtcagaattaagaagaaaaagaaaaaacagaactactgattgtaatttataaatggttccttttgacggataattgaaataacataaatcatgtgagtcctgacagttgacactgcttgacgtaacatgcggtggtttcttgcgaaccacatatcaaatttgtagtctcttctcgtattttccacaattttgtagaataatgcagtagagaaataattctataccagtttttaaaaagttaaagggtttattatacaaaaagaaaaagaaaaagagaagggtttattatactataaccttaaaagaaaaggtgtaggaaaagtattgcagttgataaattatttttgggaagacaagtttgacaagatttttcaatggcagtccacttaggaggcgtaaccactctccaccctgaaaatcaaaagttgtttcatattttacatgttttcagtatacaactccaaaagtaccatcatatcaaaattttgtcgaagcttttaagccatacactagacgccataaagagccaaaagagagacaaataggatctaattattgaactatcagacaaaaagaaagttttgaactctttttatataccttctaatcaaagtcaagtcactacactgtaacaacgtttgagctagatcctgataattttacatactcatcaaaatttggttcagtttatatggtcttgaatgattttgtatggaatgttattttggctaacatttattatgaagctatgtagatgtctcaactttggttattataactatcgtgtaataacgaaccgtaatgcagttaggtatggccagtgcattggaaacactatgtggtcaagcctacggagctaaacaaaatcatatgctcgggatctacctccaaaggtcatggatcgtccttacaggttgtaccatttgcctcacgcccgtctatatcttctctggccctatcctcttagccttaggtcaagaggaacgcattgtccgtgtggctcggatcatagccctatgggtcataggcatcaacttctcttttgtgccttccttcacttgccaaatgttcctccaagctcagagcaagaacaagatcattgcctacgtggctgctgtctccttaggggtccatgtcttcttgtcgtggctacttatggttcatttcaattttgggatcactggtgctatgacctctacgctagttgcgttctggttgcctaatattgcccaactcttgttcgtcacgtgcggtgggtgtaaggacacatggagaggattctctatgatggccttcaaagatttatggcccgtcttcaaactttctatgtcttccggtggaatgctttggtaaggtttcctctatttttttaagcagcaaaccatataattatcaattagtctaggatttgatcctaaagttttggttacaatagaaattcatatgaatagctttacatgtaggtgatatgaagtttctaattaaactagtaagagtcaagtcaaaaccacatgctcttaagttttttacttactaggaatgactttcaaagactgacagtttgaaataatcaatgtcgtataagtagactaccttactaaactatatttacatgtacgcatattgagaagtttatgattatacaataataattatcactttatggccgttattttgggcagcttggaactatggtacaactcaatcttggtactgctcactggaaatttgaaaaacgcagaagtggctcttgatgcactagcaatctggtaaactaacacgacatgaccaataccgattaattcaaacatctattcattttatttaaaatgtagtatgcgtaaataaactattcttaaccatttattttatatagcctcaacataaatggactggagatgatgatagcacttgggtttttggcagctgcaaggtacatacatatattaattcatacatatacacttcactttattaattctatttatgtatcggtcttcttccttgtcttttctctagcgtaagagtgtccaacgagctcggtagtggaaaccccaaaggagccaagtttgcaacactaaccgcggttttcacatcactctctttaggaatagttctattcttcgtcttcttgtttctgagaggaagagtttcctacattttcactacaagtgaagctgtcgcagccgaagttgccgatctttctccgcttttagccttttccatcctcatgaatagtgttcaacccgttctctctggtatgtatattagctagttggcgcgagatggttattattacagtatcgaatataaaccgatatttgaaatattatgtgtcttggatcggttttaaccttaacaggagttgccgtcggagctggatggcaaggatatgttacttacgttaaccttgcttgctattaccttgtcggaattcctattggtattatccttggttatgtcgttggtttgcaagtgaaagtaagttttattttctttataattttctccttctttataacggtcttgaaaacaaaaatgtgtgaaagtaaaaaaattaacataaaaaaagttattctctaaattttcttagggcgtatggatcggaatgctctttggaatattcgttcagacttgtgtgcttaccgtcatgactctgagaacagattgggatcaacaggttataaatcgattactatgttttctaatttgttcctagcaagctatgtttttggtgcttattcttataccgtttgttgccaaatatattaggtgtcaacgtcgttgagacgtttaaatcggtgggttgtaccagaatctagagacgtaaaccaagtatcatcagaggaataaattggattctagattgtctttagcaccgtcacattttattcttaaaagctaaaatgtaacttttaggctatgttccaagattgtgaagacaagaatatgacaaatttgggtcgatttgatgtcctcgcaactaacttgtaataagattctaatgtttaaccaaaaaacgaaaacgagatcctaatttttggattaacactagatagtgttacatttagctatgattcatcaaacacaaaattattttggggtttataaccaaaaaaataaaaataaaaataaaaaatttactatttatgtgaaaagaataacaaaaattaaaatatttgggtgaccttctcaaatagtatagaaaatcacaccaattttattttgtactatttgagatattcatggtaagaaaccatagagcgatgctctaaagtctaaatagtgacagtttggttttaaaacatttaaaacaaatttgttgactaatagaactgaatttttttttgtctcatttaacaactgcaattgtaacatatatatatttttaatagaaataaattaacaaactttttttgatgatttatgaaaactatttaatgatataaatgtttggatactaaacttgaattatttctccgtcggctttgtttgaaaatatatagaaaaaacaattaacgggccatgtgcttgttgcaaataatctatttatttttcattttaggaattttgtttctcggcacgagttgggctgattttgataagcccacatgacattgttttagggtttctgtttttcttctttatactttttaaaacgcggccagtgaataattttctaaggtttatgctttaatcaatgagatcagttagagagagagatagagagttttgtacagaaaaactccatagtggttcatattcacaactttatccttcaagtccaaaaaatacaaaataatcttatgaagtccaaaataatacgcaatataatctttttttcactattgtcaaatttaaattttttgataaataatataccaaatcaaagatctctagataaggagttcaactttatcttcagaattctcaaaaactaatgtatgagatcgtgaaaacattctaatatatgtaaaattaaaaaatggactatattgcgtattattttgtatttttaggacgtataggataaaattataaaaatagacgattttaaggttttttttcataaaaccttttttttaatacaagttaaataatttttttgtaaataattttttgttggaatgtcaaatttattcaacaaaagaaaatgattacaaagagttttgaaagctaaaaaatagagaaaataaacgtgaaaagtagaaacaaaaataatggaattggcgccacttacatcattacagaaagttcaaaaggcctaattctgacacaatattattaacgggccatgggcttaatgacaataataaacttttctcacttttgagttttaataagcccacatttgctttagggtttctgcgtctctacctttaaattgcttccgacgattcataaactagggtttctgcctttagccgtcgtgagagagagagcaaatcgaagagagagcaaagagaaaataatatgttgtttgcgtttggtacggtgactcgatctgtggctaattcagtggtggtttgctacggctttctttcgacaatggtgttttctttcgacctaaacttgatagaccgaaccaaactgaaccaatttttatatatatttactcaattaaatcctaaactcctctatttgatctgaacccgatcaacccgaatacataaatatctaatcttatccatctgaaaggatactaaactctctaattcgaattacccgaatccagaaaaagccgaatagcatgcattctattggtacttgattatattaattggcatatatatgacctgttattgccaataatatattttgggtgtttcctgggcttcagttttattgggctaggaatgggtgtacttttaaacccacttctgattagtctcttagtaaaacccacttttaaacccacttctgacccacttctgacgccgtcatttttcttgagaaggagagagagcaccacttccgtcattccagcccaatatttttaacgggccatgggcttattgtaaataatgtatttttctcatttttggttttctttatgggcacgattttagtgggctgaattttgataaaggcccacatatgaaagatatttagggttttttctcttgataccttttaaaacgccgtcgagaaatctccctctagggtttctttgatcaaaccagagagccgtcagggagagcaaaacaaagatcggagaagatgaagacgattctttcttccgaaacgatggacatccccgacagtgttaccatcaaggttcacgctaaagtgatcgaagtcgaaggacctcgcgggaagcttgttcgcgatttcaagcatctcaacctcgatttccagctgatcaaggatccagagactggaaagaagaagcttaagatcgattcgtggtttggaacacgcaaaaccagcgcctccatcagaaccgctcttagccacgtcgataacttgatctccggtgttaccagaggtttccgttacaagatgaggttcgtgtacgcccattttcccatcaacgcctccatcggcggtgacggaaagtctatcgagatccgtaacttccttggcgagaagaaggtttgttttatcttcttcatctctgatttgattctcatagattcgtgtagatctcggaatgaaatagactgacactagattcaactttatgattggacgatgatgattgatttctgagtttgcgagcactgaacttacatagaaatgtgtttattggaataataggtgaggaaggtagagatgttggatggtgtaaccattgttcgatctgagaaggtgaaggatgagattgttcttgacggtaacgatatcgagcttgtttcaaggtcgtgcgctctgatcaaccaggtactccattctttaactagtagatatcacaattttgttttaatgatctgaagatatcacaattctctcatagtctactatatccacaacaacttgaaattaatcttgggtcgaaaagatagagccgttgtgtagtataggagacgtagatttcttttgttttggttgatgtttgagtttgggatcacattttgcatagtgaaatcgaactgattcatctataactgatttaatgcgctctggtcaaccaatattttattggttaaaatgtgtttctcatagtcttgtacaatatcaactaggaatattctgagctaacttggccgagtttgcatattgttgtatgaaggaaagcataagcgattgtgtttaaaaatgattctttgttgacaatttaactttgttgtcatatatttcatagttgaactgacttgattctttatgttttactgtcttatgtaactgctatggtttgcattattgtgcagaaatgtcacgtgaagaagaaggatatcaggaagttccttgacggtatctatgttagcgagaaaagcaagatcgtagaggaagaatgaatactcatattcccctcttagctcatatttcttgtgtttggaatgttgttagttttgttttatggaccaaatccaccggtgatgtaaaccttgccttttttttgttcgagaatttattaacttatgcaacaagttttggagacaattagagacccattcactctcacacttttgccaaattacatcttctcggatgaattttgaattctgaagaatttggttgtgtttttgaattccagaacattataatccattgtcctgaatgaaaacgcccacaaatttagagggtgttatcggttcctaatttacaagaaattttgatgactttagttaaatctttgaaagtaaagaaatgaaagattataaacgattgttagagagttttttgataatcttgttgattagttttttataattttgtaaagttttccaaacaatctctctattttaataatattttccatgactttccatgacttcattttgtaaagaaaagtgtaggaaatcatgaaccaataacacaataatttaaatcattaacaatcattaaaaatcaaagattcttttgttttaattgaataacacaaaacttttaatgatttaataaaagttcgtatctaataacccaaaatttatgaagattttagattactttttacaaatcttaaacgaataacacaaaactttaacatactttaaaaaagtcttgattgaataacaacagattttacatgacaatttaaatcattaaaactcttttgaaatcataaacgaataacaccctattaatatttagtcaaattaatactcatactttttctaacttaaatttaatactcaaatactttttcaaatactcaaatttaatatttaacaaaactttttcatttgttactcaaataaacttttataattctagctgggaaaatttccaaaaataaacttcaactatttaatatttgccagaattctttttttttcttttctcgttgcctaaaataatctaatctagtttacggcccataaaacaaagggttattgagtttatagtcataaactaattgcattctcagattttcctcaatggattataaaatcagccataaaccctataaaatcagtcaattttttttttcatcctaaaacaaacacaaactattctttattttctaatttctcttcgtcttcgttatggccgttaacgacatcgttgacgtcgttactatttttgagaaaatttctaacccaaattatgaaattttgcttgaaaaaaatacctgaatttctatttccttgccataaaataacacatatcaacatttttttttctcttcttttattccattaacaatgtaagatggtcaaatgtcataactttatgtgctctcttgaacctcatacaagttctcattactatttaggacaattaaattcaacaacaaaaatacacaattagattagtctatttctatttttttcaatacccaaactaaacccatatcgaaaaaacccgatttgggcgagtaagagtttcaggaatgtacctcattggatagagttcgggtcggtccggatcagagattgcccattacacacaccggatatccataaacccgatataaggtatgtgtatatatacggtatagatatagttttatacatttatagactagtttaccttttgcatgcttgattgaattacccatgcatcagtttccaacaaggctacaatcctacttctcgttgtagttctatactttttattttcagatagtcggatttatgttttcaaattcattatcggattactcactcttaattctaagtattacactttgtgattttggattggatttggatgtcaagtttgaagtgttttattctctttattactcacattttgggtttacggttaatttttatccattcagacccgaacccgaaagaattcaaaattttcaagtatttaccggttctcagacttagtacccaatctaacccgaatccgggtgtacctaatccgaaccggaactgaatatatgcaattaccctaagagtagtaaatccattacccatttaaccggaacgggttatctatatgcccattcctagatttgatcttagatctatacaagctttacaaattttgagatttcatcgacactggaattctaaatttcatgagagcttaaaaaaactttgtagatcttcgtagattctctatataaaacgaaaaaattaattcaatcaagcaaaactcaccaaaattgaagctttaaaaccgcaacatgagaataaagcaaagagaacaaaacaaagctgatattcgaacgggacataaatatctgatatatttgtaaatgttttgagttttgtatccaattatacccaaaatctagcaaaagatctgaaatttaaccataatccaccaaaaaaacataccagtatttcaggtattcaggtacttgttcaggtatgagatacaatcaagtatgaaatacacgaactgattagtacccatttttagggtatttataacttctaaaagtctaaacctgattcgtcctaaacttgaatgaccgaatcaaactgaaccaattttgtatatttactcaattaagtcctaaaatcctctatctgatttgaacgcgatcgactagagtacatgaatacagaatatccaatcatatccaccataaaggatactaaactctccgatttgaattacccgaatccaaaaaagccgaataacgtgcattttgtttgtatttgattatattaatttgcatatctatgggctgttaatgccaataatatattttgggtgttcttgggcttgaactttattgggctaggaatggttgtatatttaaccctacttctgattagtctcttagtaaagaaactagggttttcgtcgccgtcatttttcttgacctaaagagcgatcaattgagaaggagagagagaacaaaacttccgtcattccagccttatattttaacgggacatgggcatattgcaaataatgtattttctcatttttggttactaggctgcgttttgaaaaacccacctgaacgatgtttagggtttctgtttttcgttatactttttataagggcgccgataaatcgttttctagggtttatttgattaaaaagagagccgccgtaaaacattaacgttgtttagggtttgtatttcatatatttttaaaatgccgtcgacaaaaccttttcctagggtttctgtctttgatcaaaccaaaaacaacaaatttgataaagatagcaaatcaggaatcagagaaattggtgtatgccggtgaccaaagtattctcaacatactagaatgattcataaaaatacgaggattttttttctttctttcgggtatttctttcattccatacaattcaaagtcaaagatgaacacctaattgtgcgttgaaaaaaaaagacataatgtgcacattttgatctatatataattaattatgtaaattttatacctcatgtttatttttaatcagtttatttatatagacaaaaaaatgattcacaaatcacaatgatggatcttgttgttaaattatttaactacaaattatattaaagtaaattaggatagtccgatgtgcgagttttaaagttttataattaaattcttaaaatataccgataatcttttagttagagaagataaatatttatatattctttataacaaaaaaatatatttttatatttgttttgctttaacttatttgcagctctatattttaattttattgtaagattatattacaataaacactacaagaaaactgtcattttgcgagggaagaattactcgctaatccctcgcaaacagccatacgcgagggacttgcgaggaaatcaagttcctcgcaaatggtaaaaagttgcaattccctcgcaatttttgcgaggaactgttttcctcgcaaaacacacgcaacacagttctagtatttccctcgcaactgttgcgagggatttgcgattcttttctttctgcctagcaaatccatcacaaacaactgatttcctgatatattaaggcttgattagtggttaattagactctaattatctggttaattagttgttgattagagattatttttgattcttaaataaagacacaagaagaagaagaagctgaaattatcattatctaaaatgtattctacaatgccaatatttgaaaccatgttctaaaaagattacaaggaaaaaagagaaagacaatgttctcaaaatactgatgatggagaggatcctgttgcaaggttagctagggcagcagcagcaggtgtctcctcattggcttgctgttctggagttgtagctacaggtggttcatttgcgctaaccggtcttgtctgtgtcgaggaacctcatcgaagaatggcagctaaagctggatctttctcagcaagatagtcaaagaggatatcaaagttgttgatcttctcagcctgattttgaatgcaagcttcagcggcagccagcttcgcagaaagtataaccggatcatcactaggaagtgttggaccactatgaactgaggatgcttcaaactgcagagatccaacaccataaatccttcctttctttctcggagcaacctgcaaaggtcacaaaaactcacaaggacacaacagaaaacaagtgagaaaacaagttcaacacaagacaaaagaattcaaacacaataagctgtcaagatttcagacaacacaataagttgtcaataagatttcagacaacacaataagatttcagacaacacaataagttgtcaataagatttcagacacaactagacaacgctaacagtgattatcaagtagacaacacaaccacacttgcaatagaaagcaattcaaacacaacactacacaaagtataatgaataagctgtcaagatttcagacaacacaataagctgtcaataagatttcagacaacacaatcagatttcagacaacacaatcagatttcagacacaactagacaacgctaacagtgattatcaagtagacaacgctaacagtgattatgaagtagacaacagaaagagcacataaaatttacctcagtaaatatcttgtttttggcatgaacagaaagtccacctgatccagtgctctccggattgtcccctgaacccatatgagactcttcctcttcaatcctagatgttacttgcttgtagatctcctctgacttcccatcgatgaagcttccatccgcttttctgtgtgtctcatctagcagctcaaggaaatcaggagttttttctccagtcttctcacactgaaacacaaagagataaacaagatgtcagtatgtaattctagattaagtaatggtaaggagagaagaatacttatcttactcgttttcttgcacgggctttgtatgaggtctggcctgaacggtgtttatagatgcctttgccatccggatcatgatacctagcatttctgctgttgttactcttttttttctgactttggatcttgccaaaacagtacaagacctttccacacatcaggatcaatccattttggcttagcttcatcacctttctccttccaatttcccttccaccgtgacacttgatcagtcatcctagactttagctttgcttcaaactcaacccttactcttttgttaattgaacggtcccagttatatacttgctacaaaagagaagctaacatcagaaatgaaaccatacacaaaacaagcataaacatcaaaagagcacagaacttaccgcaaacgtttcataccatcgatcgattgtagcctttgatgtttgtgaccaattggcatgaggttctttgaaatctctttcaaagatgatgcggactgttgctgcaactgcagggtcatcgtcaaacctacaagaagaccaaccagcccacacataaggatttctatgtctttaaacttctaagacatcacaatgctaagtacaaccaagctgttctatttgttgaaacttctaaggcactacaacctaaggcactacaacctaattccattacgctccaaggcactacaaagttctaaggcactacaacctaagctgttctaggacaatgaatttaaccttaccagagagttcccggaggacgctttgggtctagccttgtcaagccagcacgaccaggactatcaagaagctcctccagtgtgagattgttgagacgctcagcttgagaatcacaatcattgacagaaggctgagtggttggcgttggaggcgatggtggatggcgtgaaccttgaacccctgaaatattcccagcactgacaggagaattgacatgcaacgagtctccctgctgtgacctatatcgtgcataagtattctccgacgacgacatcttgcaaaacaaacaaaacccagaagcgatgaagaagaagttagatcggagagaagcagaagcagaagcagaagcagaacaaatgattgacagagtttagatccgtaaactagaacagattagatctggaaaacaatgtcagatcggagatgaagaagaagttagatcggagtgaagcagttagatcggagaagaagacgttaccttggaggcaaaagagatcgagtcgcgacttgtgctggagaagaagagtcgcgacggctgctggagaagaagagtcgcaacggctgctggagaagaagagtcgcgacgactgcaggagaagacgagacgcgacggagaagaagaagaagttagatcggacggtggaagttggaatggaaagaagaagttatatcggagaagaagaggttaccttggagaagaaacagatcgactcgcagctgaacctggagaagaagagttgcggcggctgctggagaataagaggcggcgacgtaatcagatcgaagaagaagagaggcgacggcgaagaaaatagatcggagaagaagagaagccggcgacgaggaaaacagatcggagaagaagagaatcgaagaaaaaaaattaggtttagtatatataagcatatatatcctcgcaaatccctcgcaaaccttgctaggaaattgcgaggaaccgtcttttaaaccaatcaaaatgcagcttacattgcgagggaactgcgagagcgcctagcaaatccctcgcagaccttgctaggaaattgcgaggaatcgtattttaaaccaatcaaaattcaataattatatttgattcagtctctcctatttctagtaagaccctcagcaaaataagaacatgactaaaaattctaaatattttagggtttagtgtaaatattgcgagggaactgctacgcgtactagcaaacacctcgcaatttcctcgcaatgtataatcaattttgaaaaatacaacaatcactattcaaaatcatttggattcattttttttaatcattagaacgttaattatctacatttgaacctattttatcatcatataattcgaatgtgttttttccccaaatacatcaatgatgatcttatggttttcattaagtatgaatcatgaatgtttaacattttcaaaatgaaatgttgatattgaaaccaatacaatatttttttgttcaaaccatataatcaacttgaatgattatatggtcacttagattcatatctataaatgagaatcgaagattgcaatacacttttatgtattttagggtttagggtaaagatttgcgacgtatctgcttgggatttgcgacggataatatctttcttgcgaaaccatcgtacttccatcgcaaatttgcgaggaagtcttccctcgcaagttttgcgacggaattgctactcgcgtgcggtacgtagcaagtttctcgcaatatcctcgcaataattgcgaggaatgccttccctcgcaaaccttcctcgcaaattgactgttttcttgtagtgaaactagtacatttaaattactaatctttaaaactttttgccatatatattcatcattaatttattgcctaatctcaaaaaatagtttcgcagtctcgcctaaaatatgaatcaaccacttcttgagaaaatgttttacctgtagaccaccagtcaggttattttaatctatttacaaatctactatctacgttacaactaaaaaacgtatctatgagtacattaagcctatcagtttcaatccaatcatattttactactgaaatatgttctatgaacacctacaaaatgtatatatgaacacattaagccaattatattcttattttgtttatgtccaactatatgtctcttcatttacacttttgcatagtttcttcaaccactaaatgttttgactcaacaaatattttgaacaaaaaaatatatcatatagcaataattgatgatgtatttacaagaaaactaaattaagtaaaaaaactacttgattagaatgcgtttatgaccaaccaataaactaaaggttgagaaattaaaagaaattaatttgacgtaactaaaaaaataatataaatgagtcttagataattcaaagatagaaatataaatgaaagtaacaatctaaaatacgaccactaaattaaaagtaaatagacaaagaaaaatcatatatcgatcttaccatatacaaattacaaatttgtttcaaatcaacacatatttctaattaaaaaaaaacaaattgaaatatataatgtaaaattttacattaaatcatgacacatgtagtagtctaatttttttagtacaatgatatatgataattaagttttatataattcaaatacaaaaaatcaatacaaataatcttgaaaacaaaaattaaattataaattttaggaagacgatgatttataaatctttaataattcaatgcatgccacgataatgtgataactttgtagctgtgtataagcacacctagagatggagataacacctagagatggagatagagagagagaaagcttcaggaggagatgaagaagatgagaggaggtgcagatttggggatgtttttttctttttttttcggtccaatttttttttttctggatggattgatcaactttacaaaatctctggcaaatatttggtagatttttattttattttcattgctttaacttatgaataaatctatattttgaaaaataaaaagcttgtgtacttctcgaatgtttatggtcttaatattgctgcttgcttcgttttggtcgcatgattttaaatttactaggttataaatccacgcgtaatttttttatcaaaattgattcttaactctattgatttttataatttttaatatggtatatttaaaataaaatgtttactttattagaaattttaatactataatcaataatatatacttttcaccaaattatattacgcgtgggttcaaaaccaagtgttaattactttgaaaagcaaattttatataataaaattttaaagtatgatatactcataacttgatttttttttttttgccggctactcataacttgatttggtgctatttatgacaatttctctaatttattcgacttttgttattttgttctttaaagcaatgataaattattatttggtctggcccggaacggactgctttcaaatggaccgggccgccagcccacatactaactcatttagatataagtttcttctaacctctctttctctaaaaagctgtcggcgagtgggagaagcgcagagagagcaaacaaagagcaaacttgaattatttctccgttggctttgtttgaaaatatataaaaaaaacaattaacgggccatgagcttgttgcaaataatctatttatttttcattttaggatttttgtttctcgacacgagttgagctgattttgataagcccacatgacattgttttagagtttctgtttttcttctttatactttttaaaatgcggccagtgaataattttctaaggtttatgctttaatacaagttaaataatttttttgtaaataattttttgttggaatgtcaaatttattcaacaaaagaaaatgattacaaagagttttgaaaggtaaaaaatggagaaaataaacgtgaaaagtagaaacaaaaatgatgaaattggcgccacttacatcattatagaaagttcaaaaggcctaattctgacacaatattattaacgggtcatgggcttaatgacaataataaacttttctcacttttgagttttaataagcccacatttgctttagggtttctgcgtctctatctttaaattgcttccgacgattcataaactagggtttctgcctttagccgtcgtgagagagagagcaaatcgaagagagagcaaagagaaaataatatgttgtttgcgtttggtacggtgactcgatctgtggctaattcagtggtggtttgctacggctttctttcgacaatggtgttttctttcgacctaaacttgatagaccgaaccaaactgaaccaatttttatatatatttactcaattaaatcctaaactcctctatttgatctgaacccgatcaacccgaatacataaatatctaatcttatccatctgaaaggatactaaactctctaattcgaattacccgaatccagaaaaagccgaatagcatgcattctattggtacttgattatattaattggcatatatatgacctgttattgccaataatatattttgggtgtttcctgggcttcagttttattgggctaggaatgggtgtacttttaaacccacttctgattagtctcttagtaaaacccacttttaaacccacttctgacccacttctgacgccgtcatttttcttgagaaggagagagagcaccacttccgtcattccagcccaatatttttaacgggccatgggcttattgtaaataatgtatttttctcatttttggttttctttatgggcacgattttagtgggctgaattttgataaaggcccacatatgaaagatatttagggttttttctcttgataccttttaaaacgccgtcgagaaatctccctctagggtttctttgatcaaaccagagagccgtcagggagagcaaaacaaagatcggagaagatgaagacgattctttcttccgaaacgatggacatccccgacagtgttaccatcaaggttcacgctaaagtgatcgaagtcgaaggacctcgcgggaagcttgttcgcgatttcaagcatctcaacctcgatttccagctgatcaaggatccagagactggaaagaagaagcttaagatcgattcgtggtttggaacacgcaaaaccagcgcctccatcagaaccgctcttagccacgtcgataacttgatctccggtgttaccagaggtttccgttacaagatgaggttcgtgtacgcccattttcccatcaacgcctccatcggcggtgacggaaagtctatcgagatccgtaacttccttggcgagaagaaggtttgttttatcttcttcatctctgatttgattctcatagattcgtgtagatctcggaatgaaatagactgacactagattcaactttatgattggacgatgatgattgatttctgagtttgcgagcactgaacttacatagaaatgtgtttattggaataataggtgaggaaggtagagatgttggatggtgtaaccattgttcgatctgagaaggtgaaggatgagattgttcttgacggtaacgacatcgagcttgtttcaaggtcatgcgctttgatcaaccaggtactctctctaactagctggtatcaaagagatttaggtgttatctagccaaatttgcattttcttgggactaaaaggttgagagattgtgttagataggtgacacggttcagttctaggaatcagattttgcataaatgaagtgaaaatcgatttgtattatctctataggtctctaatagacgattagattactcgctaagtaaactttgccaattttgcctattgtttggcttcttaagcttttcagcattgtgtatgaaagtgtttttttggttgatgtttgagtttaggatcacatttttgcatagtgaaatcaaaaggatcatttcagtgattgatttacgtgttcaagtctttgttgtaatcttttatgttgtgattgttgtgcagaaatgtcacgtgaagaagaaggatatcaggaagtttcttgatggtatctatgttagcgagaaaagcaagatcgtagaggaagaatgaatgcccatatcatcgtcttagctcctatttcttgtcttttgaatgttagtttcgttttatggaccaaatccaccggtgttgcaaaactctggctatcccttgttccctttttgtgttcgagattttatttacttatgcacaagttttggagacgagctatcattttcacctttgcttaattaaatcatatcgtgtgaatttgggattgttctggatttggcattgtgggttgtgcattcaaaattgatacttcagtcactaaactaaaatcaatttctcgcaacgctgtgatcaaacataaagataacttgagacaacgaaagcgagctttgcaatttgagaaaagctacgagacgccctgatggtcaggtgatcaatattagtgcagaatgattctgctttccagaagtcctctttcaaccatcgtttatcatattggaagcaccgaggattcatgagacaacttataatttaatcatgaaatgtgatttcgacatcagaaaggactagtatgttaacattgtgctcagtggcggatcaaccatgtttccaggaattgctgatcggataaccaaagagatcacggggttggcacctagcagcaggtggttgcaccacctgagaagaatattggaggatccatcttggcttctcttagcacattccaacaggtaccgtaaactctttaaccgtgtgatgatgattcaagttattcacacaaagtactgatgtttggtgtggatatcaaaggcagattacgagggatcagggccagccatttttcacagaaaatgcttttagacaacctctttatgtagcttgttgattgatgaaattggcttaagattaatatttttagtctttagtcgtggcttgttttaagttttgttcctttatgtttcttcatatgtttgagaaaagcggagatgggtgtgtaactttatccaaatgttcgtcaagttcaagaacagtataattttgaagatttgatataatggttgaaaaggagacttgaagaacaaggtcaaatgtgttttggtaatggttatgttttatatgttttgatcctcagtatcctctctgatcgacacttcaaacattttgtacttattttatctctttgtttattttttatggatcgtcagctaatagagaaccaaagtttgaaaccaaaggtattagagaacaaaccaaaagccaaaaagagagcaaactagagataaatactaaatgtgtcgttattcttcaaaacaaagatggtttcacaagtcttgcagccatacctcattaaggctgacggtatccgaattgtgatggacatgctcgtattcaactaagatttgtgaaaaagtcagattacacaacagttttctaaaaagtgttggactccaccatagtataaccactgtgcaaatcaccatctaccgtcaacaatttcaatgtcttattcactctgaaacgagtagagtttatatagagtgagtgagagagaggtcaatgtagtgtcacttgaaaactgcaatttttactctcgtttttttaccggttttacttgtcttttttactttttatatattatcttctatttattacccattttgatgttgccttattcatggtcaaataatgcacaaccacgagtaataccatcacagtctctttggttttgttacgaattactagtagtatctaatccgtatgtcaatgggttagaagtgataaattccattatgtatatatagtaaatactaaatacaacaatatcactttaaaaaatccaaaactatatatttaaaacggaattctcttgaggaaaaaaataaatggaattctcttttagtgtttgatatatacaaattaataggattggtaataatcccccttgatatgaatacaacagaaaagactaacaatcagtttatcaaactattgtacatttcctctaccaaccaccaaacaagaaggaatcgattcaaaagcagagtaactcatgtcacttagccactaaggtcaccgacgtttcccctcgaaggaatggtaaacaatgcttatcaaacacccacaaaccatctctctagatattcacgtatgtttagataaaagtatctcttgatacatgaatatgtatgtcacgtgtgaagaattcttatgctcagtcgacaaatctagcattggtccggtgggacatgaaaaccctgacattatgctcgacttgtctagaatactatgccccatttattatccttttacatagtactgtatcaattacaaaaatggggataggacaagatcctaattatcaattcctcgagtccaaagttatgggtaccacgtgaattattttacgaattttctttattatcttgacttctttacctgattttttatattttcaactacatggagacatggcaaaacgaaaaatgaggctattcaatctccaactttatctcaaaattttatttttccctctctttaagaccacttctaataataagtgtggttcttggctttttggtaaagaatagacaccaattgtccttttttattacaataaattcggacaaatttgatttcttgtgatggtggatccctttttctcgtgcttcgagctccaataaacttttcttacatttttaatccatttttacgttgatatttttttataaaatttccaccaccttacaaaagattttagctttttgtgttactaattaaaatcagaacaaaagttgcaagtctttcatctctatgcacaaatggcgaaagagaacagtagtcatagccttgcagaagcaaagagaaagagactcacttggattctttgtgtaagtggactttgcatattgtcttatgttcttggatcttggcaaaccaacactgtcccaacttcttcctctgaggcttactcaagaatgggatgtgatgaaacatcaacaaccactcgggctcagactactcagactcaaacaaatccttcttctgacgatacttcttcctctttgtcttcctcagaaccagttgagttagatttcgaaagccatcacaaactcgagctgaagattacgaatcaaaccgtaaagtactttgagccatgtgacatgtctttgagtgagtacactccatgtgaagatcgagagagaggaagaagatttgataggaacatgatgaagtacagagagagacattgtccttctaaagatgagcttctttattgtctgattcctcctccaccaaactacaagattccattcaagtggcctcaaagtagagattatgcttggtacgacaacattccacacaaggagcttagtattgagaaagctatccagaactggattcaagtagaaggggaaagattcaggttccctggtggtggcacaatgtttccacgtggagctgatgcttacattgatgatattgctagactcattcctcttactgatggagccattagaacagctattgatacaggatgtggtgtaagtttcgatttcttgttaccatttttatatgcatctatctatctttgatttgttttttaatagttctgttttcttagtttatttttttaattacaacaaatgattatgttaaaatacgacttcttgattggttaccaaatcggaaggataatagtttaattaattcggtatcatttggttgtttaggtggcgagttttggtgcatacttgttgaagagggatattgtggctatgtcatttgctccaagggacactcatgaagctcaagttcaatttgcgttggaacgtggagttcctgcgattatcgggattatgggatcaagaaggcttccttatccagctagagcttttgatcttgctcactgttctcgttgtttgattccttggtttcaaaatggtaaagaacattttcttgacttgttttttccataaggtttcttgattggtgtagcaaataaccaaaaaaagaattggatgtgtgtagatggtttgtacttgaccgaagtggaccgggttttaagaccgggcggttattggatcctttcgggtccaccgatcaactggaagaaatactggaaaggctgggaaagatcacaagaggatttgaagcaagagcaagattctatagaagatgcagcaagaagtctttgttggaagaaagttacagaaaagggtgatttatcaatttggcaaaagcctatcaatcacgttgagtgtaacaaactcaaacgagttcacaaaactcctcctctatgcagtaaatcagatttacccgattttgcttggtaataatctcaacccctcctaaaagtttcatatttacttacattttttttgtattataagttttacgtgaatgcgaattaaatcaccgaatttagatattaattctacatttttctttttaaaatttagagttttggtaaaaaatgttttttcttacaaagtttagagttagtatctgaatttcgagatttatgagataaaacatgaatgttgcatagaacttttatatttttttctctgttttcttgtataagatgttttacctatttgtttctctttcttttaattttaattttctatgcaacattcaaatttatttagtgtaaattgttctatgcagcattcaattttattgtagttagttagttagttctagaaattgaaaaaaaaattagaaataaatcgctaaaacatcttattctactcaacggaaaaatgatttttgataataggtacaaagatttggaatcttgtgtaacaccattaccagaagcaaacagttcagacgaattcgcaggcggtgcattggaggattggccaaaccgagcttttgcggtgccacctaggataatcgggggaaccattccggacattaatgctgagaaattcagagaagacaatgaagtgtggaaggagagaatatcatattacaaacagataatgccagagctttcaagaggaagatttaggaacataatggacatgaatgcatacttgggaggatttgctgcggcaatgatgaaatatccatcttgggttatgaatgtggttcctgtggatgctgagaagcaaacgttaggggttatctttgaacgaggatttatagggacttatcaagattggtgtgaaggattctctacgtatccgagaacttatgatttgattcatgctggtggattgttcagcatttatgagaacaggtaaacacaaattactacattttaattgcgtttatgttatacttatatagtagataaatctatacactgaaacattttaaggaaaaaattatttgttaatggtaaatgttaaacacacatgaaaggtagatctttcgtttgcgtttgcaatttacaaaatattatatgaaaataaactcacaaatttgtgcgtccaatactccaatcatttacaagggatatataattaatttatattatgaatatatgtttttcaaatattatcatttaaactatatgataaaaaaacatgtacattttcgataacttgggcttttaaatatgaactatctttatttattttttatttttttaaaagaaactaagtaatcttttttttttctgttcttaaaattctagtgtactagaaattgtgcacttgcatttttgtttgcgttctcactaacgtgaatcctaatgttgttgttgttgttgttgttgatgaaaggtgtgatgttacattaatactacttgagatggatagaattttgagaccagaaggaaccgtggtgtttagagacactgtggaaatgttgacgaagatacaaagcataaccaatggaatgaggtggaagagtcggattttggatcatgagagaggtccttttaatcctgagaagatccttctcgctgtaaaatcctattggaccggtccttcttcttagctagttctagctttcttggaactctctactctaatctttttcttatcttgtgtgtctcatctttgttttatttttaattgtttgttttaaaagatttctatgattatataagaaaatacagggaggatcaacatcttcagagacatgttgcttctcgagaacattttacatgcatttgaggttttgaatggttgtcataaagccaactcctctagccgaatcactcttaaaatcgacatatatatttctaaagcttttgattcggttgagatgagactttttactaagcttgcttcatgtattaaactttcaatcggagtttatggaatgcatcagagcgtgtagttgctccccttccttctcactcactagcaacggtacatcctcaagatttttaaaaggcaaatcagggctgagacaaggtgatccgctctcgccatctctttttgtcatgttaatgaatgtgctatctctaatgctgaatcaaacaagcatgtttttacggtgtttttacggtgctctccaagtttgaacagatctttgacctctcggttaatctagcaaaacaattagcatgttttgttcgggtgttgatgacacgatactgctgcaagtccaaaacaagttttttctctctctagttgcccctctaatctgttaccttggtttgtcgtggtgttcaaggaaattttcagttgcagactgtgatcctctagtaccttagctttgcaaaaaaagaatagttcgtcatatttgagtctcgcatgtggatatacgctcatctcttcgcgggatatcatggataattgttttatggagctttatgttcatgctaccaaagctgattatacgtcatacaaacacactttacaacacctatttttggcatggctctatttgggtggcttggcattctctttcagtaccaaatcactcaaaatacaagatcgaatacaccccggcctacatttgtattgcaccaaaattaagaacatattcatgattttatttgttattttaatttattggtagctcgacaattactaaagaatattgtttacattacagaaaaatctagaatcaattcattattattctttatgttgtttttcatttgtatgcatccttagtatgtacatgcttcgtcttgtgatgcatcatttcatctcaataacaagttataaaaaaaaagtttaacaacaaaaaaagaaaattatacatgaatgataacactaaattttaccatgttttagattatgctttccatgcatttagcttagtttcatgactattttcatgcattcctagtcattttctttcacatttcatgttttgcattgcattatatagcatatttgcatatggagtgatttgcaggtaaaacatgtgcttttggacctgttttgggagtttctagcacaaggagaggatttgctcaaatttgcacatgaagggaaggacaaggagctatgctcggggattttgctcggcctgttgatcgagtaccaagccgaagagttgtcgtctgaagaagtgaagctgctcgacctaaccttcacgagaagaagtcgagttcacctactcggtatttctactcggcttcttgtcgagtggtgcttcaccgccttagttatttgtcgttttactttttaggggttccttgtatttactataaacagacctcttaggttattgtacaaaagcatatttgctttgtccgctggattatagattttctttgtttgtagttcattttcctattgatctattgagtttttgagttttattttttctgcaaagttgttcatcttgtttagatgattagatctataacatactaagtttataatgatttatgggttttatgatttttctgggttttgtatgatgatgttcttaagtgttcttgagtagtgttcttcatagctcttgaggatgggttaggtttaggcgtatttctctgtttctttagctaactaagtgtttatatgtatgatttccttccagattaggtgttcttactgctatttccttttttgatcaattggaggttgatctcagacttcccacacccaaaaggtgtttgatgaaatgtctgaactaactaattccactgatttacatactctagcccaagagattagatgtttaaaatactaattgattttaatagattgttgtttaatgtctgctttgctatgtttcatcaatgacaattgatattaggaagtagtaaagtgatgaggatcattgtcacgagagtggattgatctgattttgaatctattgtgtatggatagcttgattgaggttgttagttagctaaatggattgaggagtcaactagaatccattcgccccattcttaagacctatgttccttctgattgattgaatttcttgttcatctgctcgaattttgtgttccttctgtttagttcatctgctcgcttgacttgtttactcgacatgcatgttcaatatgctcggccgaataccttgtatgttctctatttagtttgctctttagtttatgcatttgatagcacctgtctttagtctacttattgcattgttgccttgtttagttcctatttagtttattttctgcatctagtacttatcgtgtttagtttttgctattgttctttaatttctgcttagtatagttgcatttgaaatttggtattgcatgttaaccttttgcttagatttagtagaaacacaccaaacatattcacatttgacttgacttagtataaactcgataacaaatacactcatttgaattgacaccttaaatactagaatgacatgatagtattataggaattgatctataaaacacataaagaatcacaagttttactaaccaatcaattttctggtcaactattgagattaaattggaagttaactttagctttcttatgacacttttctaatttaaatttaaaatctaaatcgtctatttgtgtgttgaaattgtattaatgcaatatgagatttcacatttttcattttgccaaattacctcactaacttttcatttcgtatgaatgcttattttatatacatttctcattgttcttctttttgaaaaaataaatcaaaacttaaatgatgaactaaattaaaatccaaaataaatgataaattaaatttcttattcaaaaaacaacaagcacgctatatattttttcttaagatctccaaactataccgtctgatagatactatattatgaaaaataagatcttaagtagatttaatgacttattatatatatttctctttaaaaatatcatcaaagatatctatgctcaaaacaaaattagcatcaaatcgttaaagacataaacaaattttcttaaaacaatgaagagatgcattatagtttttaaaacaatgaagacattgtggacaaaaaaaatagaaagtcatcaattacactttctgaccatttttgaaccatttgtaaatatttaattttttgtatttttcagtcgatttaacaaaactccaaaatatgacaaaactagaaaaaaaacatgtttgagagaacttgttctagatttcattttctttacctcttcttttgagaatatgaatattttcttcgtcatattacaaaactcactgcatgaacaaaaccctcaacatcaaatatttttttcaattccttaacacatttttaatatatagaaaactaaaggaaacataaagtcatgtatcatctcaacaagcattatatctcatgcattggttttaaaggtcatttctcattgattgtggattcgtaacttgcttttaagatcaaaatttttctctagttccactttcaattgatcatatccatgtaaagcatttaaatccacaatttttcttatggctacatcgtatctgaagatgtttagtgacaccatataaagatcatgtgagccgagtagagtcatcaaagctttacacaaatatctttctaatatatttttgatgtcttaatatattgaggcacaacaaatgtttgttcaagtgcactagtttcacataattacaaaaagggatgtcgtagataaatagtacaaaaatgattattttattcttaccttagtacgacttattgtaaaattgaattgtgtaatttggacctcttttagtgatgtatgagttttgaatatgttcaatcattttattttaagagagtttagaaacttcagattttttatttgatccaattaaacccatggggtctttgatctttaaggttgtggcgagatcaactttaaacaatatgtaaattagtattttctttattggttgaactatttattcgttgttattgttttgtttcgatatggctgggattgagccactcattatccaaccataaagagacttgccttacaatgactaaactaatgaacactaaagagagaatcaagctcagttgtctaatttcttgccatgtctgaaaattcgatgatattgaatataaatataggaaatagcaggaatgagaaatgcattcacaaaaacattttagcttatcgaaaaaatgataataaaaatgttacattttacttatatcattaagatgacgagaacattttttattgaggaaagttgactgagaaataattgatgaaagcattaaatgctcgatattccatgttgaaaccttatcaggtaaaaatgaaggacctgacaaagtttcaccatgggacatcgagcatttaatcccttcatcaaatttcctgtcaactttgctcaagaaaaaacgtttttttgtcgatttagtgaaattagtaaaatgcaaaattcttaaaatcatttgtttcattagttaaaacttctttgtaagtaccttttacattccatctattttcttatttatgttctaaatcactgaatctttggacatgccaagaaattaaacaaccaaacatgtattctcccattagtattcttcggtacagttaaatattccaagtgtcattcttgtcggctaatgagttactcaatctcaaccatgaacacaaaaactataacaacagccaaatggttcaaccaatgaaagaaaaattagttgcatattatttggagttgatatgacaacacttcaactcacaaatatccaatgactctaattgaatcaaaccaaaaatctgaaatttctaaactttctcaaagtaaaatgcttgaccataaatcaaaactctaacatcactaaaagaggtcccaatgacataattcagatttagtggaagtcatactaaggcaaacataaaatcaccgtttcgtactatttatctatgacatctcttatatatgcatgtgaaataagtgtatttaaacaagcattcgttgtacttcatatttttaagaatcaaatatatttatagaaagaaatttacgtaaagctttgatgactctactcagctcacatgatctttatgtggtattactgaacatgtctagatgccatgtgtagccatgggtaaactatagatttaaatgctttacatggatatgatgaacagttgagagtggaacaagaggaactctttgatctcaaaggtgaattacaaatcctacaatcaatataaaattgtctttaaagacaatgaaggagatatgatgcttgttggggtgatccatggttttgtaattcctttatctttctatatattgaaaatatgttaagacattaaaagaaattatttgaagttgagggctgtgttcatgtagttaattttgcaacatggcgaataaaatagtcatatgaccaagagaggaagtctagaaaatgaaattcgaaaactcggagacagagattagaaagcaacatgccacatgcaagatcatggtgtgtcaaacacactacgactaataatacgaggagattacaaatagtcactatcaagagatcatgtgacattgaaatgaattcattagtctcaatggtcgctgacacgaaccatgaaaagtagttaagagtctgcaacagtttctcactgtacgagtaggaatccatggatagctcggtaaaagagttgtctccataacataggagggtggtgaaagtttctctaagtagtagcattgttgtaacaacaatttcttgtatcaaaagtgaataggattattttgaccctcaaggtcaggtcagataggtatcgttatgttgtgttaagttgaagcttggactccctcgggaagatgatttgagggagttggatctgtaactgagaagaggaggcaactaaagacatggttaacttgggatcacaaaaggtacaagctagaatataaacatttaagccgataataatggtctcatcctaaaagaagggagcttggggcagttgaactgatatcctttgtgctaaaaagttcttcagacaaaagccgagatgagcttgcgaataggaatcgagataagaaagtacaataccaaactagactaaatgattcaacgctataatgatgtcataagtcaatcaacacaaagaataaaaaaatccaataaaataattgagaatacaaaggaaataaattggagatgtgcaaagtaattgtagagagtgatagggcacataaaaaggagaaagctttcttggaggaacataagggccatagttctacagatgagaacgtgggtcaaggtcattaaggatcatctctagagagttagggttttgcccagccaactagtgatctactcattacaaaactgggccaaaacattaataatgggccacaactggagaacatgcccactcactaaaaccctagcttctttttgcaagtttgaatggtgtcgttttttggtgattgcactgtagcaaatcaaaggtaatagatgggttcatccacgctggaaaggaaggcagttttgggggttttaaaccctcagaaagaggggcgaaggagatgaaaataagtatccataataagacggcttcatgcaccgttaatgactccatcagacatggtgcaaatgacagtccaagagtaaagattcctgccatcaacaaagtccggtggcaaagagtaaagatgtgcaaagtaactagatagagtgacgggggacaaacaaaagagaacgctttctcgtatgaaagggacatagttctacacatgagaacgtgggttaagctcattaaggatcatctctagagagattaggattttgtcaaaccaactattgatctactcattacacaactgggccacaactgggaaacatgcacactcgctaaaatcctagcttctttttgcaagtgtgaatggtggtcgttgcttggctgttacactgtagcaaatcaaaggtcatataagggttcatcgatgctggaaaggaaggcagttttggggtttttcaaccctccgaaagagggatgaaaattaggaccaaaacgagactaaagtggtaatacgattacaaaagttgcgagcaagaagagaaaaattccgatgctggcgagtcaaagcttcatcgacatcggaaatcaaggctagggtatcattctcaatataagagcatgggagcgatttctattttttcctaaaacctcaattataatcttaaatttgttgttacttgaacaaaaattagagataaattactatcttttaatgaccaaatttgttatttcgttgggatgttttactaattgattattaccgattatgatgaataaacgataaacttaactatttgaaaatgatatgtcatatttacctggaatgtagatttacttaaatcaatctacgacaaattaatttttgttgctatattgatgtaaaccctatttacaacgaattaacaacaaagtggatcgctattataaatgtgtttcttgtagcttaaaataattcaatccaaattttgaagcaaagttttatttaaaaactgaccgatatttgtcagcaacgacgatataagcattgtaagagaaccacgtaggttgattgttcaatgcattatccaatatcgtctttgcctcatatttctccacatcgattgtttttgctcttatagtttcctttttgatgttttccgctctagatctgtcaatttgcattcattattcgctcttagttatactctacaaggtataaaaatattgatgaagaaacatattaaacaatactataacacatcaaaaactgattaacgaatttccaaatattaccttaaactcttgaactgaaacaaagtttgaaaaagtttttatccaaatcaaaaacgtcaaccatttatcccctaatctgataacaatttaaaattttcaaaaaagatattttgaatagaggatatcaaaaaatttctatgaagaaaataatttcaaatcaacataaataaatatttgaacagatggattgaaagcaaaagctcgttaagatccaaagatattgttcctctaaattacatgcttgcataagaaataatccatcaaaagttaaagaaatacatggcagatctaaaaaattgtagtaatatattggacacaaaaagttgttgcaaaaagtgatctaaagagattttaggcacaaaaactcattagatattaaaaaaataataacttgatgtacaaaatttgttgaaatacaagaagcttgaaaaattacgaaacaaaatcggattttaaaagtaatttcatttacaatctaaaaaattgatgctttcaaaattgaatatagttgtgaacaaaaagaattgaagatacataaaggtgaaaaaagcaatactgattataccaattcatgcaacaaaacaaggattaattgattagatggtttcgctccaaaattcgttaaaaacgaatctccaacagacagtttgcccacgaaaaaccgttggaaaacttatgaaacatttcaggaaaaggtaattaaaatttttacaatgaattaaacatgttgatctctttctactaccccaaaatatattatatactaataaattaaaaaatggtcaaagtaaaatgatggcaagttggcattagataccctaatattaatgcaataaattaaaaagtgatcaaagtaaaattatctactatccatattatcttggataattaataatatagatatttagaagattttggttgagatttaaaattattttttttctataatttttgtttaatttatttgaatcatcatataatagagatttaataaaacaaaaatcagcatatgttgtgattcaaaattttaaaagcggatatatattgttcaattataaagggaaaaaatgtatgttcttacatcgactaaaatgtttagacaatggatcagtgtcatattataagtaaaaccaattgaattcaaatctgagtgaaaataaagcttaacttaacaagcatccaaaattaacaaggatataataaattttaaaatcttaaaaagttgaaaatatatttattgatatattttgaaaaatattacaagactcaggttatatggtaaaataggtttaattgacattaatacggtgtcataagatagataaataaatattttattgttttgttaacattagcgatattaaaatattagatatgtagaattaagctgattcaattatgattgtgtaagaaagtatatattgctctttttcataagcaaacatactttgtatcaggtttttataaccaaccaatccaatatcagtttacaccgtgtaatgaaaaactatctttttatcacgaatactagtttcatgtgtactttaatatttgcagaattatatattttaaatacattcttaattagcagtaacatatttaactgaatctaaatttgaatataattggaaattagaaataataattaatctaaagcctaactgtaaaaatatacttcattaaaatttgttcacaaaccaaaaccaaagcctttaaaagcgttatataaaatgtaattcatacactttactaaggaaaacccaaaaaatatgacgtttaaccaaaccgaaaatcgcattagccttaaacatattaaccattttcaaccaataaaaatatataaataaacaaaagattaaaattttgatttttgaactgatatgtttatatgtttcggatagattgaatcaatttgattattatctatatagagagacaaaaaaatgtgtttacaaagtcatataaatatttttcgcttgcacatcattttatataaaaacaataagtggacgcctaactgtttttttttttttttgcctgtaatgaaaaatatcaatcatgcaacttccttcttttgtcaaaggatcatgcaacttccttcttagaccaattcaaagtcaatttaatagtgactgttttttttttttgtgaacacaatttagtagtgacttaattcattcttcttcggcacatcctctccgctagggttttcaatttgtctctttatttcttttatctcgtcttcaaacatgaatatgactacttgtgttactagaagaacccattagaagattgaatcgtacttgaatttgattcttaatgtaacatcgaagtttcatgaaatatggtggtgcatgtagaatgatttgaaagaactgatttgagtacttatatcactaaaatgcaattattttttcagtcaaacaatcagagagaatttcacaattaagcatgcttaaactagaaaaatttcaagataagtgaccttttgcgatgtgattgtggagactatgtgagtgaagacaaaacacgtgaaaatataatgttgtgaatttgtaggatctgtaaaaaaaacattaaaacatctcagagataacgaaccagctgtcggataaaaatgagctgacaagcgcagaaaagacatggggtccataaaggatggcggtctgggcatacacttgatacccatagaaataacatacatttcaatccaatccatttcccaaggaaacatcagaatcatataactgatcaagttcatagtcacttcttcaaactcctatgaatcatttttaaaccagtaatttttaaataaattgtgttgacttaagttacttttcgtctttttctattaaaaatcaaaccttgtatataaatcgctaatttctgttgactttacaatgaataaaactgaagcaatatatttgtcgttaatctaaacagtaatttaggatgatttaagttaaaatatttctatcactaatttacgacgaatgaacgttgtattttatattcctcctaaatgccttgtaaaatggacataagtttacgaaaacattttgtcgtaaaatgttgatggttaatctatttttttgaagtgaaattaactttctaatgttacctagattagttttttaaatctaaatattgattaattatcttaaataactacatctaatacagcgacatggtagaaaggagtatgcttttctcatgaaacactgaaatactccttttgtgtatggctggcggttcatgataggcttgctacaggcgctaagatactaagatggaacagggacgcaacaggggtctgctatttctgcaaaaactgcattgaatctagagatcatctcttcttctcttgcacttttactttggttatctcgacaggctcgctagaggtttgttcaagcgggagtatacaagtgattggtctcagctcatcaatacagtctcagccccgcgaagtaatagagttgagaggttcctgatgtgatacttatttcaagtcatactctatacagtttggagagaaagaaacggaaggcgtcatgatgaaaaaccaaattctgcagctatgtatattcagtggatcgataagcaaatacgaaatcaattatccatcattcgaatgatgaaagaccgacgatgcgatgctagctatcaaggctggctccaaagtcaagcttaataacaatacatctcaaataaattttttttttaattttttctatcaaattcatgaagaattaatcgtaaaaacgttattttttctttgaatttaatttaacattatttaaagaaaaaaaataattatctaaaataacagttgactatccaaataaacatttaattgactttaagatatacaattaataaaaagctaattgtcggtcatcaacctcctttttgagataattatctttttattaattggtattcaacactgaaatatttgtttttttttggaaaaaacttgaacatgtttcatagtgcattgcttcagttgatcctataaactatgaatcatgttattttctcggaaattatatgttcttatttgcttatgaataatttggtctacaactttcttagtactgagaaaataaaaaagctaatttagaattacacaaaagaaaaagatttttttttgacccagcacaaaagtgtgaaatgaactacacgttttgcccacataaccttatcaatagttgcatcttgcaagtggatcttcgttgaatgtcaattaattggttttgttgaatgcataattaggttttctgatatgaaccaacaagattatttgttagattattcgactgattactttctaagccattctgtttttcagtttttgttgtcggtattttataatcgactataattggataggataatttgggttatttgattttatttaatcaagatatattcaattttagttttttattcttaatttcaaaattatgtggctaggatcatgcagctcccataatcgagaccaggaattaataaattatcccttccaacaagataccaaactcgtgtccgcataggtgcaaagaaaacaaatgttggcctatgataagatatatgacttttacaaaaacatgtaactatatcttccaaaaaatgaactttatttcagcattaaaacacacaaaatcatattttgaagaagattcaaaatctcaaatcacgattttaagagttcatttccgagatttcttgataatatatgtagcatgccattgaccacgaatagatactttgtttctttgttatgactctccaatttggcataggtcgaaagagaaaattcatccaccttagggtaagatttattgatcagtttaatgatttatgcatattggcgtaaaattcatgtatctttatagtttagtttgtaacttatacaaaaatatcaacaatacatgaatttattaattacgtatattatgtatcaattactcaaattcatgtactttcgttacgtttcttctagacaactcaattggattgattttaagtttcttacgaaatagtaagattcagttaaacaaaaataaaagtgtagatgggaatactcgtcgggtcattgacatgggaataccgttggtagccactctggcaacagtcttgcaaacgcatcgaagtcgtcgacaccgagctgaactttacaacaaaatagaagcagaaattcagagattacaacaacaagtacaagaagcgggtaaagatgtatcactttggagatcttagggaaatgatttcagaaaccagtttataactaaagtcacctggaataatgttagattgcctcaaccacagagaagctggtacaagggcgtttggttcccctactccacgcccaagtactccttcattttgtggctcgcaatacacaacagactttcaaccggagatcgcatcaaaacatggaactccggtcaacaagtcgcatgcaatttctgcaacgatgccgaggaaacaaggaatcatctctttttttcctgcaggtattcctctgaggtttgggaaaatttggctcaacgcctcctctccactgactactcgagtcactggaatcatctaattgccaaagaatctgctcttcctgttccggtatgtctttcaagcttccatctcccatatttggtgagagagaaatgcaagacgtcatggggaactcagcttaccatcaaacaggctcatcaagctcattgataagactgtccgcaatagaatcagttcaatacgagacaccggaaaccatagctacaacacatgcctgcagttatggttctccacacggccacgctcatctctgcaacttctctaaagtctcctctgtttttgtaccttctgcttttgcaatttcagcttttgtatcctctgtttttcttttaaaacactcaacacacggttgcattcattgtacaaaggattttgattgaagaaaattttacattctttcaaaaaaaaaaaaaaaagtgtagataaatataacctagtgaaaaaagaaaaaaacaaatttgtaaatacatcgacggctaagattacacatagaaccaaaataaaagaattttactattatattgatagaataatactggaaatagatctcagatatgtagctatataaatatatacacacatttgcaacctatattttgcaacgtaacaaaacaaataaagaaacaaaattttgttccttcctcttctacaagcaagtacgatcttttgctatattttgcagacaaaagtttcatcatggtctattcctctaagaagctgttcttgttcttcctctcgtgcattatgctgactttcaactataacactagtggcttcgtagccgcagcaaatagcataggcttgaactacggcctcctcggagataacttcccaactccatccaatgttctcaacctttacaagtccataggcattacaaaaatccgaatcttcgacccaaaaacagaggttcttaacgccttacgcggccaccgtaatattgaagtcactgttggcgtgagggaccaggacttgggtgctctttcagctaacgaagaagctgttaagggctggtttgcaaccaacatcgagccttacttagccgatgtcaacattgcgttcattactgttggtaatgaagtcatccccggaccaatcggtcctcaagtgcttccggtcatgcagtctcttaccatcctcgtcaagtcgatgaaccttcccatctcgataagcaccgtggtggctatgtcgaatcttgagcaatcatacccaccttctgctggagagttcacgtctcaagcgcgagaacaacttgtccccgtgctgaaactattgtctcaaacaagtacgcctattctcgtcaatatttacccttactttccttacgcatccgacccaacgaacatccctctagactatgctaccttcaacactaaggccaccgtcgtccaagatggaccattgggctattcaaacatgtttgatgcaatctttgacgcattcgtgtgggcaatggagaaggaaggcgtgaaagatttacccatggtggtgtccgagaccggatggccatctgccggaaatgggaacttaaccacaccggatatcgcgggtacttacaacagaaatttcgtgaaacatatagtaagcgggaagggaacgcctaagcgacccaacaatggaatggatgggtttttatttgcaacgttcaacgaaaatcaaaagccggccgggactgatatgaagcccatctataagctattttaagtttgaaagctgcttggactttccctattcactaataataatctctgctagtttgttagtgaactaagattaacacatgttattggctattggcttatgtgaaagtgatgagatctggtagcgagcttagttgactttttaataaatctgaaattggtagttgatcctcttactgcgtcgtttatggttgagccccaattttgtttctcgttagttaaaacatctttagcaaacatattcaaagttaatcgtcttctataatccaaattaaaattttcacttctcactttgaaatataaacattcttaaatggtcttgttaatcattactccgaccccaaaaaccattacaataaggtcaaaaccttataatgtcatctcatgctaatgtatatttgtacacaaatgttccttctcaatccaatgaatctctttttttactccacattggcaatccacaatagtagattaagagtttaaaagaagacattacatagacaactagacatgcattgccattactacaacacgttttcacatactaacttcgattccaaactaccacgaatgcaatttaccattgcttcttatttacaattttcttgagactccttcattttgaatccatgtcttctccttcctcgcatttatcaaaacacattaaaagcctgtttttagaattgccgacaaggaaaaaaaaactattctacactaagccacaaaaataacttaaaaccaaaataaaaacaaaaggaaagtgatgcttagattgcgatgtggtagggactcggtgagggttttggaagagcatgacaaaagatccgtgccattgatctctattaacacaccaaaagcttcttcttcttcttcctctcgtctctaaaaatccttcctttctttctgggttttctcgaatcttcatctctcattcaaacccacaagtccgatctcgcgatccaaacaccatggaagaggttgaagaagaagtgagacgaatcgtcgaacaagttaaagagcttcatgactcttccacatccttcgtctcttcttcttctcaagaagagctttctctccgtaacagagcctccgtcgttgactcatcaatccgccgtcttcattctactcttgcctctgacaaacatctcgatcccaagcttttcgaaaaggttaatcttttataacctatctctctgtctctgtttttcgatttctccgattcttaattttgttctcttgttacagctagaagaggatctgcaacgagctagatgcatgcttgcagatggagacacttcatcgtttcttccatctaaacctcaaggtttcgataatcaaatctcagattcagtttttgatttaaaggaataaactttgagttcttttgtgttatgattggaagcaggacgttttgtgagaatgtttttgggacctgtgaatgttagagcttcacgaaaagatatacagcttaaagttaaagaagaatataatagctacagagttagtgttttgcatttttcccacattaatgtcgttggttggttggatctttgcttcaatgtcgaatgaatctgtgaaatgacttgtcttttccatggaaacaggataggacagctcttctttttcttgttttccctgcaatacttttgacactaagatcttatgtttgggatggatgtttgcctgcattccctgttcagctctaccaggtatataattaggtttgaagttgtgttgatttgagttacttaagttttgttatgtgttttgtattaatatgtgaacttcctttgatcaggcttggctactgtttctttatgctggtttggttatgcgagagaacattttaagagctaatgggagtgatatccgttcatggtactcttatcatattcctcctgagttgattatagttgtattgatctcttaagttgtggttggctattgttatgcagtgttttaaatttgaagtatgctaggttgatgcagttgttatgctattgctgaaagtcacatgatataaagtttggtagagtggatcgttaggttgtgttaggctacactgattttaggctctaaattcattaggttaatcctaactttgaatgcatggttcattttcttttggatcatctctctttcctatagttagatcatgtgtgccgctaactctccttattcgctcttttatgactgcctgtggctgtgaaaaattactatttactttaggttgttagtttgactacaagaaattcatcaaatcaattgtcgctgcctcactggtcaatgttttgctacccgttgtgttttgctctgtttttggcacctcttaaagcctatactgattgcactgctgaatgacgggcatccgaatttagtggatgataggaatttctataggcaatgtaatgcagaaggttgcgcaaagtgactttcctataaaatgtctcttgtttggtatcgaatacaactatgggagtgctgttacagaggagaggtagcttatttttgttgtcagttagaaattagatctttatatcatgtagagaataatgagaaactttttggccgtccataaaggccttagtgggttgatgatttggatctgaagttatcttaatgtatatatcctctcaatcgaagatgactaaaacctcttcattgatatgcttttgcaggtggctttatcatcattattttgcaatggctatgtcccttgtcagtctcacttgggaaatcaaaggtcaaccaaactgcgttcagaagcaggtattgggtattaacttattatcatacatgcagagtaaaatctatccaacaaatgttatagattattctaaatctattgcagaaaggagtgcgtcttttcctccaatgggctatgatgcaaggtgtcgcgatgcttctgcaaaatagatatcagcgccaaagattatacactcgcattgcacttggaaaggtgccatactatttacatttttctctctccaaatcatatccaccactatgaaattgctgtaaaaatgtgtgtggtggtcattttcaggctaaaaggatggacgtcgtatggggagaaacggctggagtagatgggcaactattgctattatttcctattttgttcactttacaggtaacagttctacttttgttgcacagaaggctatgctaaagcatctttaagcttcatatttccttcataagaccaggcttgtgtaattagctggtgatttgtagctattatttttatacatggcttccataaggatatacctaaaactcaaatatggctttgaaaatatttactaagtaaacaaaacttcatgatgtcctcttagacttgtaagatgatctgaacaatgaatgatctttgcttgctctcaccagttcaaaggaaacttcagacttattctaagttcataagcttgtttatcatactgtagttaaacatgtttgtattctactatggaaactcagggctttgaagcatacgtgggattccagttgcttaggacagtgttgatgggggtagtcgctgaatggcaggtataagtctctcttccggcagcacttgcgcagtatctcctctggtttattcatgcaccaatctgacaaaaaacataacataatgatgtatacaatagtagaatagatataattgatactgaaaactcaatgtcttgttggttttgtttctcatttccaaacaagtaacatatcttaaatatgcatcaagtatcatacggtttatcacaatggttttctaatgataacgtgaatgctggggcaggtattggtttgtggcattcttctggttgtgatggccattggaaacttcataaacacagtagagacactaatggtgaagtcgagattcaaggcgaagatgaagagaagtaaaagcagagcagaactttgattaaacttcctaacttatatgactacacctttatagtttccaactgtggatctttctccccattatttgcttcagtcgataaattttgtttcttggggcaaaagtaacctaagtctgaaaaaaaaaaaaacagggagtgccctttgtttgtgtaaatggaagttgggatttgatagttgattgattaaactgtgttttgtaaacttttcaactaacacttgttcggtttccaatgatcagattttcataaaatggtgttgaaattagatttttatctttgtcttagtgcttggaacttgacactactagtttgaaaaagggtaccttcctagtcaaggttcccaatcaacaactaaacaactaaaggattcgtttttttttttttgggttttaccaaaaatttccgggcctataactgtagtctagtctcctcagccttaaaaaacttttggatggtcaactagtacaccggttaatgaatggagatttaattagagtctgaatggtaactgcgttttgcggtgtggtttaaatagtaacgaaaatacataaatatatatatatatatatatgtaaagattttgatatttgtgatgcggttttgagtgcggtgtatgtcaccattcatgaccttagtctcttcaaaagattaaagacagagagaacattaaggttttgtagacaagaaaagaaaggcaaagactaatcaaaaaggaaactacatgtgatcacagatcttaatctttgagttaatggtgagatcacatgttggctttctttttttaggttactctcaatatacgtaattaaaataaaataaagagagatagaagaaagtgtaatttaataagaaagaaaacaaaacaaatgcacatgggtaggacaggctcattggtgtattttatacacaacaaaatacattgtaataatatcttttgtataattagatacatacattttatatgtataaaatgattgcacgttggggcagctgtgttaagacacaaagaggtgaaagcaagttggcaatcaaagtggtacttactctttcttacctgtacccatttcctccattattactctctctatcaaaaagatacagaatcttttctttttcttcttcttctttatttttttttggtgtgatcatgctgtctcaatccatctttctatattctcaaaccattatttttattttgtaaatttacacgagtagttttttactttttgatacagtttttttgaaggtaaagaaaaaagttatagaaaaaaaacagagagatgaaaaatgagttaacatgagagtggcacgagtcttgtcgttgtaagtacaaaagcctgcacatgcttttgattgtaagaaaaataaagtttgaaacaaaagaacaaaactttgagcgaccctgtttaattgatagtgacaccaaaaatgaataatggcttatcggattgtttttgtgggcgccgcaaaaaggattaaacataaaaacacacagattctctcttcttcttctcctctcaattacttatggctttgagtctcagtcaaaaaagcaaagtgaataaaccaatctttgtcatatatcaattcaaatagtagtaataatcagtcatatatgtttatctttgtctgataaactaaatgattctaattcttaccttaaaggaagaaaaaataaaataaagactctttattccccaattaaccaatcaacaaatgttttaagagaaaaaaaaaaagtgtgagacttgctgatgaaattacaactccaaaataatctaaaagaccttttagctagagttttttgttcatgtgggggttggaagaagaaaacaatgaacaagaagaaacaaacaagagacagtgagaaagaaaagaacaaaagggaaagaatgtgaaaaagaattgtattcactgaaaaatcgaagatcgatgagaccttgatatttcagtttgtggtgtcagatgtgtgtgtgtgtgtgtttgtgttttgtgtttttgggtgttttgtttagaaaactatgcacacataagtacattttcttgaaacaatgattctgattttactgaaccattgtcaagaaaggtggttccgtatggccattgcctcctctgtttgcagggctttgaaacgcaatctcgaaagccgcggacttctcatcctcgtctagttcttcctcatccatttcctgatcttcctcttcctccatgttattataattgtgagactcttcaatcttttcatactcacctatcattgattcttgttgttgtagttgctgttgttgttgaatcagctctctcatcacaaggtcttctggcttcaattccaacaaatcatatttcagttatcaaagaacattaaaccaatcacattttgacaaggaaaagcaaagtttgtaccttttctgttccttgtggactttcctctataggctcttcttcctcagttgaagctgacccatgagtttgttgaacattaacaagtccttcttgtggcggtttcatcgcagtgaccggactctgtttttggtcttgaggtagaccagaagtgctagaaccaccgccactaccgagtactttgttgcggtaaagaagatcgaggcggtgaaagtaaggacaagtcttagcatcttgaggacgtttcttgttgctttctttaactttcttgtagtatttgtttatgttttcccatttctctttacatctcttagcgtttctgttgtatcccattctcttcattgaagttgagatctcttcccatagaagtcctttaggtacattatcttggtaccttggttccattccacttctcaggtttataagcgctagaatctctgcctttggccatcttgatgatgatggtaatgatgattgttccgagctcatgaccatctcttgttgtggttgttgttgttgtttctgttctggttgatgagcgtgaggatgagaaggaggaggaggaggaagaatttgttgttgtggaatcgccattattggttgttgtgattgagattgagctgttgataatggtggttccgccacacgtttagtgaccgcgggtggcggttgatacggtggaggcggttgagatgacaaagaaggaggtaactgaatggtatggccagtaattttctgaatcaatgaaatgattgcggcgtcacgagaagcagaggcggctcgttcttgagacatgacctcgtgttctcgagctaaccgagccatttcttgacgtttccaagcttcttcacgatcaagacgttcttgctctctcttctcaagagcttccaagaaactcctttgcatagccgcttgcttttgcattacttgtctcaccaaaccttcaaacaattccatcattttaccgcctccaccgcggtttccacgtttgcgttttcggctactagaacccgcaatgttagcctgatcaacgtccatatcgtcgtcatcatcatcagaccccattcctgaagccgtcgatgagctatgagacgagaaagtaacaccggtaaatatcggacccattgaaggaagtggaagaggtggtggagtaggagtaaaagagacattatgcgtttgaggcggttgcgtttgcgtttgcggttgcggttgagagaatacgggaaatggagaagaagaagaagaaggcatgagaatgggattagcgacggagagaggagtaacgtcgagggaagatgaaggaggagtagtgttgagagcttcaagctgagagaagaacttgtaagctttaccatcatgacgaccaccgcgagtttctttagtacgtttgtaatatttctgaacgttttcgaatttctctttgcatttctttgaacttcgtttgtaacctaactccaatagcttcctgtttccaaaaacatgaaaataattcagattctctagttttattttatttttggttgtcgttattagctggaaaatttttatggttactgttcgatcggattttttttttttttttttggaagtaaagagagtcttgggattttcaaaatcgaaaacgtcccagaaactcatgaaccaacttctgtaataaacaaacagttcttttaatttttcttggggatggtgaagatgctttgatctcgaatatattactatttatatatacctaacactaaaaaaaaaaagttaacaaaaaaaaaacacatgcaaatggatctctatcaagaaacaccattgatgaaaatggaagagaagagaggaagagagacctggaaacatgttcccaaagaggagctttgagagtagcatcacgaaaagtagaatccatatcggatcggatccgaagaagagctaaagtttcttctctcggccatcgatttcccgatgaagaagaagcacttcctcctcctcctcctccacctccacctcctaatccaccgtcatccgcggcggctgagaatctcataagctcttctaagttgttagcaggaggtcttgaactaataggtgaagcttcctccacaacttcattaccaccaccacctcctccttgctccatcaatcttgatgatgtttcaatctttttctacacacacactctctctttctctctagctcctcaatgttttttgatataaatctcataaaaccattgatgatgatgatgagagaaataagaaagagaagcagtctttttttgtttgtttaaacagcaactaggaggggtctgaaggagaaaggagaggattacgaggatgatgatgatagatagagagaaagagaatgaaagcaaacaagaagttaataaagctgaagcctcttctaactttgcagcaaattattgttaaacccacttttcttcactctctctttttctttatttattttattttcttccttcttttatattatttagaaaaaaaggtccacatctatttaattaaatccaattttatgtgtattattattattgttataaagcaaagagtaaggaaggctttaaaagttaaatttggatccgcaaacatctcattgctcagtgatccgattaaattgtttttgggtaaaaattgtgttttggagaaatataataaacacaaaatcatgtgcctcccatgttgttgtcctctcccaccatcatgtctaaggtgtccacgtggcgttgtctgattggtagggtatgtgacaatcagatttttggggaaagggagggacagaattggaatttgataatagtttttacccgatttgagctggaccagccttgacatctttccccccactctctttcctctccaattcaacagtttctttctctctttttttttgttattgtgtaaataatacatttatagaaacatatcaaacaatagtgttttagtgatgtcaagaaaagaaaaaaatagtaagtccaaagccagtgaaattattttatgaatcatacatagtgcataattaattaacataaccatgtaattttaaactcggaactatcttggcaggtcggatcgataacctgacccatgcattagtttatgcgaagccaaagccaaacccactcactaccaacactataacagatttcgtttatgtcattttaaacatactttttactgaatttgcagcgaatttagcatacatgaattgatatgatggcttggtcacgataacaaagttgctagactcatttggacgctacaattttacaagtgattcttgtatgttggcataatttggaatcaagaacatgcatggtctgcaaaatcccataaataaacaaacgtgacgtcaagtgatctttgatatgttctttgaatttatttttttctccaaaaaataagacattcgtttagttaaatgttgatagcttgacatcgcttttttttttagtaactcgtttggtttttaattaaaaatgaaactgttaatttcctttgcacatatatatgtgaatcaaaacaaaagtcaagatgatgattttatgtattggtggtaaccagaattttcgacaaaagtacaagataacaaactaataaagaaaccttataacaattaggtgaaaaataatgaaaataagtacattttttgagatagtaaagctgtggtgaagatagacataagtgatcaatcaaaaattgaatagcctcatatctaaaattagttgcaaactcaagacatcgatgcagacactcatactatcacattatacaactctttaatacctctcacctacacaaacatacacaaaataaaaaaaaaactcattttcattaccaaatcacactctacacaaaaacacaccgctcatttctagttatacacaaaaaaggaaaacaaactatttccttctaacaacaaaatgaaagatgctaattaataataatggttagagaagaaggtgaagaagaagaagaaggtgggcggtggaagtggagaactttcttgaaggggaaagaaagagagagagcggcggatacacagctgtcttctcttcttcttccccccactttcacatgcctctcctttttcactatatttattacttattacatgtgatatgttcttttttttcctaattatacaactttaatattagtacaagtataataagaatataattatacgaggtggtaagaacatgctcacggagtttccttccttgatttctgactgaatgaatctctctttttacataagagatctagatctcatgagggagttttgattaagactttgattaacacactaatcttaaacacacaaaagcaacgtctctctctaccaataaatctaatcttattaggacacaacaagttgtcaaactcattactttcccaacttgtgtcatacgaggacttaccaaagataacgagtcaacatcattttgacggggtcacaaaacaaatttatagttaaaatggtccagcgatatttttttttgtaattccatgaattttcacacccacgtaaaatccatattcctcctctcacaaatatatctacaatttcagtggcagccaaataaataaatacctcacaaagtcaaaatccaaagaatttacttacactactaactcaccaaaaatctaactcggggctattttgatcattgcattaactatatgaccccctttaaatagaagccatgatgcatcataatgtcaatttcaaggcttacgacaaaacaactagcaaaacctgggctcactttgccagtgtgtcagagagttcatgacaagtcaactcacaccacaacactcttgattttaaacccttagttttagaacacacacacacatcttaaaaatctatccaaccaaagacctttccttaaatccgcactaaatccacaatcctatggaccacttacctcaccctctactagtggatatattcttctttaatatatttaacccacaaatatttatgtggctatatcaagattgccaatgtagtagatatggaaaaaacaaaacaaaaccattcttacttaacacacagatggataggtttcactggtaaagatttgttgttgtacacattacactcgtttctcaacaggaaatgttgagttcgtgaaatctcagatgtacaaaaaaagaaagtggaacatggaacaaacaaaagagtgacaaattcaattttgggcatattagcattctaggtcagacaacagtcaaggttctggatcttacctatgtacaagtacaggatagagctgaaacaacatgcttagagagatccagtattcaccataagtgttcattgagaactaatcgtggaacccaaaattatcttaccacactgcccaactgttaatctgagaggctcgttagtagtagttggggttgctctgcaacacaaccgtctcggcgcctgtcgttaagaagagtggagaatcatcaattagcaaaatcataaagaaaatgacagaaacattaggtgataaaaagataaacaagaaaacctcaccaagtgccaatttttactcagaggaaaccctgagacctggattttatccactttgtgcagaggtagagagcgtggaaaacatagaagctt

SEQ ID NO: 1161 - DNA, 81609 bp, Arabidopsis thaliana
aagcttgttcgcgatttcaagcatctcaacctcgatttccagctgatcaaggatccagagactggaaagaagaagcttaagatcgattcgtggtttggaacacgcaaaaccagcgcctccatcagaaccgctcttagccacgtcgataacttgatctccggtgttaccagaggtttccgttacaagatgaggttcgtgtacgcccattttcccatcaacgcctccatcggcggtgacggaaagtctatcgagatccgtaacttccttggcgagaagaaggtttgttttatcttcttcatctctgatttgattctcatagattcgtgtagatctcggaatgaaatagactgacactagattcaactttatgattggacgatgatgattgatttctgagtttgcgagcactgaacttacatagaaatgtgtttattggaataataggtgaggaaggtagagatgttggatggtgtaaccattgttcgatctgagaaggtgaaggatgagattgttcttgacggtaacgacatcgagcttgtttcaaggtcatgcgctttgatcaaccaggtactctctctaactagctggtatcaaagagatttaggtgttatctagccaaatttgcattttcttgggactaaaaggttgagagattgtgttagataggtgacacggttcagttctaggaatcagattttgcataaatgaagtgaaaatcgatttgtattatctctataggtctctaatagacgattagattactcgctaagtaaactttgccaattttgcctattgtttggcttcttaagcttttcagcattgtgtatgaaagtgtttttttggttgatgtttgagtttaggatcacatttttgcatagtgaaatcaaaaggatcatttcagtgattgatttacgtgttcaagtctttgttgtaatcttttatgttgtgattgttgtgcagaaatgtcacgtgaagaagaaggatatcaggaagtttcttgatggtatctatgttagcgagaaaagcaagatcgtagaggaagaatgaatgcccatatcatcgtcttagctcctatttcttgtcttttgaatgttagtttcgttttatggaccaaatccaccggtgttgcaaaactctggctatcccttgttccctttttgtgttcgagattttatttacttatgcacaagttttggagacgagctatcattttcacctttgcttaattaaatcatatcgtgtgaatttgggattgttctggatttggcattgtgggttgtgcattcaaaattgatacttcagtcactaaactaaaatcaatttctcgcaacgctgtgatcaaacataaagataacttgagacaacgaaagcgagctttgcaatttgagaaaagctacgagacgccctgatggtcaggtgatcaatattagtgcagaatgattctgctttccagaagtcctctttcaaccatcgtttatcatattggaagcaccgaggattcatgagacaacttataatttaatcatgaaatgtgatttcgacatcagaaaggactagtatgttaacattgtgctcagtggcggatcaaccatgtttccaggaattgctgatcggataaccaaagagatcacggggttggcacctagcagcaggtggttgcaccacctgagaagaatattggaggatccatcttggcttctcttagcacattccaacaggtaccgtaaactctttaaccgtgtgatgatgattcaagttattcacacaaagtactgatgtttggtgtggatatcaaaggcagattacgagggatcagggccagccatttttcacagaaaatgcttttagacaacctctttatgtagcttgttgattgatgaaattggcttaagattaatatttttagtctttagtcgtggcttgttttaagttttgttcctttatgtttcttcatatgtttgagaaaagcggagatgggtgtgtaactttatccaaatgttcgtcaagttcaagaacagtataattttgaagatttgatataatggttgaaaaggagacttgaagaacaaggtcaaatgtgttttggtaatggttatgttttatatgttttgatcctcagtatcctctctgatcgacacttcaaacattttgtacttattttatctctttgtttattttttatggatcgtcagctaatagagaaccaaagtttgaaaccaaaggtattagagaacaaaccaaaagccaaaaagagagcaaactagagataaatactaaatgtgtcgttattcttcaaaacaaagatggtttcacaagtcttgcagccatacctcattaaggctgacggtatccgaattgtgatggacatgctcgtattcaactaagatttgtgaaaaagtcagattacacaacagttttctaaaaagtgttggactccaccatagtataaccactgtgcaaatcaccatctaccgtcaacaatttcaatgtcttattcactctgaaacgagtagagtttatatagagtgagtgagagagaggtcaatgtagtgtcacttgaaaactgcaatttttactctcgtttttttaccggttttacttgtcttttttactttttatatattatcttctatttattacccattttgatgttgccttattcatggtcaaataatgcacaaccacgagtaataccatcacagtctctttggttttgttacgaattactagtagtatctaatccgtatgtcaatgggttagaagtgataaattccattatgtatatatagtaaatactaaatacaacaatatcactttaaaaaatccaaaactatatatttaaaacggaattctcttgaggaaaaaaataaatggaattctcttttagtgtttgatatatacaaattaataggattggtaataatcccccttgatatgaatacaacagaaaagactaacaatcagtttatcaaactattgtacatttcctctaccaaccaccaaacaagaaggaatcgattcaaaagcagagtaactcatgtcacttagccactaaggtcaccgacgtttcccctcgaaggaatggtaaacaatgcttatcaaacacccacaaaccatctctctagatattcacgtatgtttagataaaagtatctcttgatacatgaatatgtatgtcacgtgtgaagaattcttatgctcagtcgacaaatctagcattggtccggtgggacatgaaaaccctgacattatgctcgacttgtctagaatactatgccccatttattatccttttacatagtactgtatcaattacaaaaatggggataggacaagatcctaattatcaattcctcgagtccaaagttatgggtaccacgtgaattattttacgaattttctttattatcttgacttctttacctgattttttatattttcaactacatggagacatggcaaaacgaaaaatgaggctattcaatctccaactttatctcaaaattttatttttccctctctttaagaccacttctaataataagtgtggttcttggctttttggtaaagaatagacaccaattgtccttttttattacaataaattcggacaaatttgatttcttgtgatggtggatccctttttctcgtgcttcgagctccaataaacttttcttacatttttaatccatttttacgttgatatttttttataaaatttccaccaccttacaaaagattttagctttttgtgttactaattaaaatcagaacaaaagttgcaagtctttcatctctatgcacaaatggcgaaagagaacagtagtcatagccttgcagaagcaaagagaaagagactcacttggattctttgtgtaagtggactttgcatattgtcttatgttcttggatcttggcaaaccaacactgtcccaacttcttcctctgaggcttactcaagaatgggatgtgatgaaacatcaacaaccactcgggctcagactactcagactcaaacaaatccttcttctgacgatacttcttcctctttgtcttcctcagaaccagttgagttagatttcgaaagccatcacaaactcgagctgaagattacgaatcaaaccgtaaagtactttgagccatgtgacatgtctttgagtgagtacactccatgtgaagatcgagagagaggaagaagatttgataggaacatgatgaagtacagagagagacattgtccttctaaagatgagcttctttattgtctgattcctcctccaccaaactacaagattccattcaagtggcctcaaagtagagattatgcttggtacgacaacattccacacaaggagcttagtattgagaaagctatccagaactggattcaagtagaaggggaaagattcaggttccctggtggtggcacaatgtttccacgtggagctgatgcttacattgatgatattgctagactcattcctcttactgatggagccattagaacagctattgatacaggatgtggtgtaagtttcgatttcttgttaccatttttatatgcatctatctatctttgatttgttttttaatagttctgttttcttagtttatttttttaattacaacaaatgattatgttaaaatacgacttcttgattggttaccaaatcggaaggataatagtttaattaattcggtatcatttggttgtttaggtggcgagttttggtgcatacttgttgaagagggatattgtggctatgtcatttgctccaagggacactcatgaagctcaagttcaatttgcgttggaacgtggagttcctgcgattatcgggattatgggatcaagaaggcttccttatccagctagagcttttgatcttgctcactgttctcgttgtttgattccttggtttcaaaatggtaaagaacattttcttgacttgttttttccataaggtttcttgattggtgtagcaaataaccaaaaaaagaattggatgtgtgtagatggtttgtacttgaccgaagtggaccgggttttaagaccgggcggttattggatcctttcgggtccaccgatcaactggaagaaatactggaaaggctgggaaagatcacaagaggatttgaagcaagagcaagattctatagaagatgcagcaagaagtctttgttggaagaaagttacagaaaagggtgatttatcaatttggcaaaagcctatcaatcacgttgagtgtaacaaactcaaacgagttcacaaaactcctcctctatgcagtaaatcagatttacccgattttgcttggtaataatctcaacccctcctaaaagtttcatatttacttacattttttttgtattataagttttacgtgaatgcgaattaaatcaccgaatttagatattaattctacatttttctttttaaaatttagagttttggtaaaaaatgttttttcttacaaagtttagagttagtatctgaatttcgagatttatgagataaaacatgaatgttgcatagaacttttatatttttttctctgttttcttgtataagatgttttacctatttgtttctctttcttttaattttaattttctatgcaacattcaaatttatttagtgtaaattgttctatgcagcattcaattttattgtagttagttagttagttctagaaattgaaaaaaaaattagaaataaatcgctaaaacatcttattctactcaacggaaaaatgatttttgataataggtacaaagatttggaatcttgtgtaacaccattaccagaagcaaacagttcagacgaattcgcaggcggtgcattggaggattggccaaaccgagcttttgcggtgccacctaggataatcgggggaaccattccggacattaatgctgagaaattcagagaagacaatgaagtgtggaaggagagaatatcatattacaaacagataatgccagagctttcaagaggaagatttaggaacataatggacatgaatgcatacttgggaggatttgctgcggcaatgatgaaatatccatcttgggttatgaatgtggttcctgtggatgctgagaagcaaacgttaggggttatctttgaacgaggatttatagggacttatcaagattggtgtgaaggattctctacgtatccgagaacttatgatttgattcatgctggtggattgttcagcatttatgagaacaggtaaacacaaattactacattttaattgcgtttatgttatacttatatagtagataaatctatacactgaaacattttaaggaaaaaattatttgttaatggtaaatgttaaacacacatgaaaggtagatctttcgtttgcgtttgcaatttacaaaatattatatgaaaataaactcacaaatttgtgcgtccaatactccaatcatttacaagggatatataattaatttatattatgaatatatgtttttcaaatattatcatttaaactatatgataaaaaaacatgtacattttcgataacttgggcttttaaatatgaactatctttatttattttttatttttttaaaagaaactaagtaatcttttttttttctgttcttaaaattctagtgtactagaaattgtgcacttgcatttttgtttgcgttctcactaacgtgaatcctaatgttgttgttgttgttgttgttgatgaaaggtgtgatgttacattaatactacttgagatggatagaattttgagaccagaaggaaccgtggtgtttagagacactgtggaaatgttgacgaagatacaaagcataaccaatggaatgaggtggaagagtcggattttggatcatgagagaggtccttttaatcctgagaagatccttctcgctgtaaaatcctattggaccggtccttcttcttagctagttctagctttcttggaactctctactctaatctttttcttatcttgtgtgtctcatctttgttttatttttaattgtttgttttaaaagatttctatgattatataagaaaatacagggaggatcaacatcttcagagacatgttgcttctcgagaacattttacatgcatttgaggttttgaatggttgtcataaagccaactcctctagccgaatcactcttaaaatcgacatatatatttctaaagcttttgattcggttgagatgagactttttactaagcttgcttcatgtattaaactttcaatcggagtttatggaatgcatcagagcgtgtagttgctccccttccttctcactcactagcaacggtacatcctcaagatttttaaaaggcaaatcagggctgagacaaggtgatccgctctcgccatctctttttgtcatgttaatgaatgtgctatctctaatgctgaatcaaacaagcatgtttttacggtgtttttacggtgctctccaagtttgaacagatctttgacctctcggttaatctagcaaaacaattagcatgttttgttcgggtgttgatgacacgatactgctgcaagtccaaaacaagttttttctctctctagttgcccctctaatctgttaccttggtttgtcgtggtgttcaaggaaattttcagttgcagactgtgatcctctagtaccttagctttgcaaaaaaagaatagttcgtcatatttgagtctcgcatgtggatatacgctcatctcttcgcgggatatcatggataattgttttatggagctttatgttcatgctaccaaagctgattatacgtcatacaaacacactttacaacacctatttttggcatggctctatttgggtggcttggcattctctttcagtaccaaatcactcaaaatacaagatcgaatacaccccggcctacatttgtattgcaccaaaattaagaacatattcatgattttatttgttattttaatttattggtagctcgacaattactaaagaatattgtttacattacagaaaaatctagaatcaattcattattattctttatgttgtttttcatttgtatgcatccttagtatgtacatgcttcgtcttgtgatgcatcatttcatctcaataacaagttataaaaaaaaagtttaacaacaaaaaaagaaaattatacatgaatgataacactaaattttaccatgttttagattatgctttccatgcatttagcttagtttcatgactattttcatgcattcctagtcattttctttcacatttcatgttttgcattgcattatatagcatatttgcatatggagtgatttgcaggtaaaacatgtgcttttggacctgttttgggagtttctagcacaaggagaggatttgctcaaatttgcacatgaagggaaggacaaggagctatgctcggggattttgctcggcctgttgatcgagtaccaagccgaagagttgtcgtctgaagaagtgaagctgctcgacctaaccttcacgagaagaagtcgagttcacctactcggtatttctactcggcttcttgtcgagtggtgcttcaccgccttagttatttgtcgttttactttttaggggttccttgtatttactataaacagacctcttaggttattgtacaaaagcatatttgctttgtccgctggattatagattttctttgtttgtagttcattttcctattgatctattgagtttttgagttttattttttctgcaaagttgttcatcttgtttagatgattagatctataacatactaagtttataatgatttatgggttttatgatttttctgggttttgtatgatgatgttcttaagtgttcttgagtagtgttcttcatagctcttgaggatgggttaggtttaggcgtatttctctgtttctttagctaactaagtgtttatatgtatgatttccttccagattaggtgttcttactgctatttccttttttgatcaattggaggttgatctcagacttcccacacccaaaaggtgtttgatgaaatgtctgaactaactaattccactgatttacatactctagcccaagagattagatgtttaaaatactaattgattttaatagattgttgtttaatgtctgctttgctatgtttcatcaatgacaattgatattaggaagtagtaaagtgatgaggatcattgtcacgagagtggattgatctgattttgaatctattgtgtatggatagcttgattgaggttgttagttagctaaatggattgaggagtcaactagaatccattcgccccattcttaagacctatgttccttctgattgattgaatttcttgttcatctgctcgaattttgtgttccttctgtttagttcatctgctcgcttgacttgtttactcgacatgcatgttcaatatgctcggccgaataccttgtatgttctctatttagtttgctctttagtttatgcatttgatagcacctgtctttagtctacttattgcattgttgccttgtttagttcctatttagtttattttctgcatctagtacttatcgtgtttagtttttgctattgttctttaatttctgcttagtatagttgcatttgaaatttggtattgcatgttaaccttttgcttagatttagtagaaacacaccaaacatattcacatttgacttgacttagtataaactcgataacaaatacactcatttgaattgacaccttaaatactagaatgacatgatagtattataggaattgatctataaaacacataaagaatcacaagttttactaaccaatcaattttctggtcaactattgagattaaattggaagttaactttagctttcttatgacacttttctaatttaaatttaaaatctaaatcgtctatttgtgtgttgaaattgtattaatgcaatatgagatttcacatttttcattttgccaaattacctcactaacttttcatttcgtatgaatgcttattttatatacatttctcattgttcttctttttgaaaaaataaatcaaaacttaaatgatgaactaaattaaaatccaaaataaatgataaattaaatttcttattcaaaaaacaacaagcacgctatatattttttcttaagatctccaaactataccgtctgatagatactatattatgaaaaataagatcttaagtagatttaatgacttattatatatatttctctttaaaaatatcatcaaagatatctatgctcaaaacaaaattagcatcaaatcgttaaagacataaacaaattttcttaaaacaatgaagagatgcattatagtttttaaaacaatgaagacattgtggacaaaaaaaatagaaagtcatcaattacactttctgaccatttttgaaccatttgtaaatatttaattttttgtatttttcagtcgatttaacaaaactccaaaatatgacaaaactagaaaaaaaacatgtttgagagaacttgttctagatttcattttctttacctcttcttttgagaatatgaatattttcttcgtcatattacaaaactcactgcatgaacaaaaccctcaacatcaaatatttttttcaattccttaacacatttttaatatatagaaaactaaaggaaacataaagtcatgtatcatctcaacaagcattatatctcatgcattggttttaaaggtcatttctcattgattgtggattcgtaacttgcttttaagatcaaaatttttctctagttccactttcaattgatcatatccatgtaaagcatttaaatccacaatttttcttatggctacatcgtatctgaagatgtttagtgacaccatataaagatcatgtgagccgagtagagtcatcaaagctttacacaaatatctttctaatatatttttgatgtcttaatatattgaggcacaacaaatgtttgttcaagtgcactagtttcacataattacaaaaagggatgtcgtagataaatagtacaaaaatgattattttattcttaccttagtacgacttattgtaaaattgaattgtgtaatttggacctcttttagtgatgtatgagttttgaatatgttcaatcattttattttaagagagtttagaaacttcagattttttatttgatccaattaaacccatggggtctttgatctttaaggttgtggcgagatcaactttaaacaatatgtaaattagtattttctttattggttgaactatttattcgttgttattgttttgtttcgatatggctgggattgagccactcattatccaaccataaagagacttgccttacaatgactaaactaatgaacactaaagagagaatcaagctcagttgtctaatttcttgccatgtctgaaaattcgatgatattgaatataaatataggaaatagcaggaatgagaaatgcattcacaaaaacattttagcttatcgaaaaaatgataataaaaatgttacattttacttatatcattaagatgacgagaacattttttattgaggaaagttgactgagaaataattgatgaaagcattaaatgctcgatattccatgttgaaaccttatcaggtaaaaatgaaggacctgacaaagtttcaccatgggacatcgagcatttaatcccttcatcaaatttcctgtcaactttgctcaagaaaaaacgtttttttgtcgatttagtgaaattagtaaaatgcaaaattcttaaaatcatttgtttcattagttaaaacttctttgtaagtaccttttacattccatctattttcttatttatgttctaaatcactgaatctttggacatgccaagaaattaaacaaccaaacatgtattctcccattagtattcttcggtacagttaaatattccaagtgtcattcttgtcggctaatgagttactcaatctcaaccatgaacacaaaaactataacaacagccaaatggttcaaccaatgaaagaaaaattagttgcatattatttggagttgatatgacaacacttcaactcacaaatatccaatgactctaattgaatcaaaccaaaaatctgaaatttctaaactttctcaaagtaaaatgcttgaccataaatcaaaactctaacatcactaaaagaggtcccaatgacataattcagatttagtggaagtcatactaaggcaaacataaaatcaccgtttcgtactatttatctatgacatctcttatatatgcatgtgaaataagtgtatttaaacaagcattcgttgtacttcatatttttaagaatcaaatatatttatagaaagaaatttacgtaaagctttgatgactctactcagctcacatgatctttatgtggtattactgaacatgtctagatgccatgtgtagccatgggtaaactatagatttaaatgctttacatggatatgatgaacagttgagagtggaacaagaggaactctttgatctcaaaggtgaattacaaatcctacaatcaatataaaattgtctttaaagacaatgaaggagatatgatgcttgttggggtgatccatggttttgtaattcctttatctttctatatattgaaaatatgttaagacattaaaagaaattatttgaagttgagggctgtgttcatgtagttaattttgcaacatggcgaataaaatagtcatatgaccaagagaggaagtctagaaaatgaaattcgaaaactcggagacagagattagaaagcaacatgccacatgcaagatcatggtgtgtcaaacacactacgactaataatacgaggagattacaaatagtcactatcaagagatcatgtgacattgaaatgaattcattagtctcaatggtcgctgacacgaaccatgaaaagtagttaagagtctgcaacagtttctcactgtacgagtaggaatccatggatagctcggtaaaagagttgtctccataacataggagggtggtgaaagtttctctaagtagtagcattgttgtaacaacaatttcttgtatcaaaagtgaataggattattttgaccctcaaggtcaggtcagataggtatcgttatgttgtgttaagttgaagcttggactccctcgggaagatgatttgagggagttggatctgtaactgagaagaggaggcaactaaagacatggttaacttgggatcacaaaaggtacaagctagaatataaacatttaagccgataataatggtctcatcctaaaagaagggagcttggggcagttgaactgatatcctttgtgctaaaaagttcttcagacaaaagccgagatgagcttgcgaataggaatcgagataagaaagtacaataccaaactagactaaatgattcaacgctataatgatgtcataagtcaatcaacacaaagaataaaaaaatccaataaaataattgagaatacaaaggaaataaattggagatgtgcaaagtaattgtagagagtgatagggcacataaaaaggagaaagctttcttggaggaacataagggccatagttctacagatgagaacgtgggtcaaggtcattaaggatcatctctagagagttagggttttgcccagccaactagtgatctactcattacaaaactgggccaaaacattaataatgggccacaactggagaacatgcccactcactaaaaccctagcttctttttgcaagtttgaatggtgtcgttttttggtgattgcactgtagcaaatcaaaggtaatagatgggttcatccacgctggaaaggaaggcagttttgggggttttaaaccctcagaaagaggggcgaaggagatgaaaataagtatccataataagacggcttcatgcaccgttaatgactccatcagacatggtgcaaatgacagtccaagagtaaagattcctgccatcaacaaagtccggtggcaaagagtaaagatgtgcaaagtaactagatagagtgacgggggacaaacaaaagagaacgctttctcgtatgaaagggacatagttctacacatgagaacgtgggttaagctcattaaggatcatctctagagagattaggattttgtcaaaccaactattgatctactcattacacaactgggccacaactgggaaacatgcacactcgctaaaatcctagcttctttttgcaagtgtgaatggtggtcgttgcttggctgttacactgtagcaaatcaaaggtcatataagggttcatcgatgctggaaaggaaggcagttttggggtttttcaaccctccgaaagagggatgaaaattaggaccaaaacgagactaaagtggtaatacgattacaaaagttgcgagcaagaagagaaaaattccgatgctggcgagtcaaagcttcatcgacatcggaaatcaaggctagggtatcattctcaatataagagcatgggagcgatttctattttttcctaaaacctcaattataatcttaaatttgttgttacttgaacaaaaattagagataaattactatcttttaatgaccaaatttgttatttcgttgggatgttttactaattgattattaccgattatgatgaataaacgataaacttaactatttgaaaatgatatgtcatatttacctggaatgtagatttacttaaatcaatctacgacaaattaatttttgttgctatattgatgtaaaccctatttacaacgaattaacaacaaagtggatcgctattataaatgtgtttcttgtagcttaaaataattcaatccaaattttgaagcaaagttttatttaaaaactgaccgatatttgtcagcaacgacgatataagcattgtaagagaaccacgtaggttgattgttcaatgcattatccaatatcgtctttgcctcatatttctccacatcgattgtttttgctcttatagtttcctttttgatgttttccgctctagatctgtcaatttgcattcattattcgctcttagttatactctacaaggtataaaaatattgatgaagaaacatattaaacaatactataacacatcaaaaactgattaacgaatttccaaatattaccttaaactcttgaactgaaacaaagtttgaaaaagtttttatccaaatcaaaaacgtcaaccatttatcccctaatctgataacaatttaaaattttcaaaaaagatattttgaatagaggatatcaaaaaatttctatgaagaaaataatttcaaatcaacataaataaatatttgaacagatggattgaaagcaaaagctcgttaagatccaaagatattgttcctctaaattacatgcttgcataagaaataatccatcaaaagttaaagaaatacatggcagatctaaaaaattgtagtaatatattggacacaaaaagttgttgcaaaaagtgatctaaagagattttaggcacaaaaactcattagatattaaaaaaataataacttgatgtacaaaatttgttgaaatacaagaagcttgaaaaattacgaaacaaaatcggattttaaaagtaatttcatttacaatctaaaaaattgatgctttcaaaattgaatatagttgtgaacaaaaagaattgaagatacataaaggtgaaaaaagcaatactgattataccaattcatgcaacaaaacaaggattaattgattagatggtttcgctccaaaattcgttaaaaacgaatctccaacagacagtttgcccacgaaaaaccgttggaaaacttatgaaacatttcaggaaaaggtaattaaaatttttacaatgaattaaacatgttgatctctttctactaccccaaaatatattatatactaataaattaaaaaatggtcaaagtaaaatgatggcaagttggcattagataccctaatattaatgcaataaattaaaaagtgatcaaagtaaaattatctactatccatattatcttggataattaataatatagatatttagaagattttggttgagatttaaaattattttttttctataatttttgtttaatttatttgaatcatcatataatagagatttaataaaacaaaaatcagcatatgttgtgattcaaaattttaaaagcggatatatattgttcaattataaagggaaaaaatgtatgttcttacatcgactaaaatgtttagacaatggatcagtgtcatattataagtaaaaccaattgaattcaaatctgagtgaaaataaagcttaacttaacaagcatccaaaattaacaaggatataataaattttaaaatcttaaaaagttgaaaatatatttattgatatattttgaaaaatattacaagactcaggttatatggtaaaataggtttaattgacattaatacggtgtcataagatagataaataaatattttattgttttgttaacattagcgatattaaaatattagatatgtagaattaagctgattcaattatgattgtgtaagaaagtatatattgctctttttcataagcaaacatactttgtatcaggtttttataaccaaccaatccaatatcagtttacaccgtgtaatgaaaaactatctttttatcacgaatactagtttcatgtgtactttaatatttgcagaattatatattttaaatacattcttaattagcagtaacatatttaactgaatctaaatttgaatataattggaaattagaaataataattaatctaaagcctaactgtaaaaatatacttcattaaaatttgttcacaaaccaaaaccaaagcctttaaaagcgttatataaaatgtaattcatacactttactaaggaaaacccaaaaaatatgacgtttaaccaaaccgaaaatcgcattagccttaaacatattaaccattttcaaccaataaaaatatataaataaacaaaagattaaaattttgatttttgaactgatatgtttatatgtttcggatagattgaatcaatttgattattatctatatagagagacaaaaaaatgtgtttacaaagtcatataaatatttttcgcttgcacatcattttatataaaaacaataagtggacgcctaactgtttttttttttttttgcctgtaatgaaaaatatcaatcatgcaacttccttcttttgtcaaaggatcatgcaacttccttcttagaccaattcaaagtcaatttaatagtgactgttttttttttttgtgaacacaatttagtagtgacttaattcattcttcttcggcacatcctctccgctagggttttcaatttgtctctttatttcttttatctcgtcttcaaacatgaatatgactacttgtgttactagaagaacccattagaagattgaatcgtacttgaatttgattcttaatgtaacatcgaagtttcatgaaatatggtggtgcatgtagaatgatttgaaagaactgatttgagtacttatatcactaaaatgcaattattttttcagtcaaacaatcagagagaatttcacaattaagcatgcttaaactagaaaaatttcaagataagtgaccttttgcgatgtgattgtggagactatgtgagtgaagacaaaacacgtgaaaatataatgttgtgaatttgtaggatctgtaaaaaaaacattaaaacatctcagagataacgaaccagctgtcggataaaaatgagctgacaagcgcagaaaagacatggggtccataaaggatggcggtctgggcatacacttgatacccatagaaataacatacatttcaatccaatccatttcccaaggaaacatcagaatcatataactgatcaagttcatagtcacttcttcaaactcctatgaatcatttttaaaccagtaatttttaaataaattgtgttgacttaagttacttttcgtctttttctattaaaaatcaaaccttgtatataaatcgctaatttctgttgactttacaatgaataaaactgaagcaatatatttgtcgttaatctaaacagtaatttaggatgatttaagttaaaatatttctatcactaatttacgacgaatgaacgttgtattttatattcctcctaaatgccttgtaaaatggacataagtttacgaaaacattttgtcgtaaaatgttgatggttaatctatttttttgaagtgaaattaactttctaatgttacctagattagttttttaaatctaaatattgattaattatcttaaataactacatctaatacagcgacatggtagaaaggagtatgcttttctcatgaaacactgaaatactccttttgtgtatggctggcggttcatgataggcttgctacaggcgctaagatactaagatggaacagggacgcaacaggggtctgctatttctgcaaaaactgcattgaatctagagatcatctcttcttctcttgcacttttactttggttatctcgacaggctcgctagaggtttgttcaagcgggagtatacaagtgattggtctcagctcatcaatacagtctcagccccgcgaagtaatagagttgagaggttcctgatgtgatacttatttcaagtcatactctatacagtttggagagaaagaaacggaaggcgtcatgatgaaaaaccaaattctgcagctatgtatattcagtggatcgataagcaaatacgaaatcaattatccatcattcgaatgatgaaagaccgacgatgcgatgctagctatcaaggctggctccaaagtcaagcttaataacaatacatctcaaataaattttttttttaattttttctatcaaattcatgaagaattaatcgtaaaaacgttattttttctttgaatttaatttaacattatttaaagaaaaaaaataattatctaaaataacagttgactatccaaataaacatttaattgactttaagatatacaattaataaaaagctaattgtcggtcatcaacctcctttttgagataattatctttttattaattggtattcaacactgaaatatttgtttttttttggaaaaaacttgaacatgtttcatagtgcattgcttcagttgatcctataaactatgaatcatgttattttctcggaaattatatgttcttatttgcttatgaataatttggtctacaactttcttagtactgagaaaataaaaaagctaatttagaattacacaaaagaaaaagatttttttttgacccagcacaaaagtgtgaaatgaactacacgttttgcccacataaccttatcaatagttgcatcttgcaagtggatcttcgttgaatgtcaattaattggttttgttgaatgcataattaggttttctgatatgaaccaacaagattatttgttagattattcgactgattactttctaagccattctgtttttcagtttttgttgtcggtattttataatcgactataattggataggataatttgggttatttgattttatttaatcaagatatattcaattttagttttttattcttaatttcaaaattatgtggctaggatcatgcagctcccataatcgagaccaggaattaataaattatcccttccaacaagataccaaactcgtgtccgcataggtgcaaagaaaacaaatgttggcctatgataagatatatgacttttacaaaaacatgtaactatatcttccaaaaaatgaactttatttcagcattaaaacacacaaaatcatattttgaagaagattcaaaatctcaaatcacgattttaagagttcatttccgagatttcttgataatatatgtagcatgccattgaccacgaatagatactttgtttctttgttatgactctccaatttggcataggtcgaaagagaaaattcatccaccttagggtaagatttattgatcagtttaatgatttatgcatattggcgtaaaattcatgtatctttatagtttagtttgtaacttatacaaaaatatcaacaatacatgaatttattaattacgtatattatgtatcaattactcaaattcatgtactttcgttacgtttcttctagacaactcaattggattgattttaagtttcttacgaaatagtaagattcagttaaacaaaaataaaagtgtagatgggaatactcgtcgggtcattgacatgggaataccgttggtagccactctggcaacagtcttgcaaacgcatcgaagtcgtcgacaccgagctgaactttacaacaaaatagaagcagaaattcagagattacaacaacaagtacaagaagcgggtaaagatgtatcactttggagatcttagggaaatgatttcagaaaccagtttataactaaagtcacctggaataatgttagattgcctcaaccacagagaagctggtacaagggcgtttggttcccctactccacgcccaagtactccttcattttgtggctcgcaatacacaacagactttcaaccggagatcgcatcaaaacatggaactccggtcaacaagtcgcatgcaatttctgcaacgatgccgaggaaacaaggaatcatctctttttttcctgcaggtattcctctgaggtttgggaaaatttggctcaacgcctcctctccactgactactcgagtcactggaatcatctaattgccaaagaatctgctcttcctgttccggtatgtctttcaagcttccatctcccatatttggtgagagagaaatgcaagacgtcatggggaactcagcttaccatcaaacaggctcatcaagctcattgataagactgtccgcaatagaatcagttcaatacgagacaccggaaaccatagctacaacacatgcctgcagttatggttctccacacggccacgctcatctctgcaacttctctaaagtctcctctgtttttgtaccttctgcttttgcaatttcagcttttgtatcctctgtttttcttttaaaacactcaacacacggttgcattcattgtacaaaggattttgattgaagaaaattttacattctttcaaaaaaaaaaaaaaaagtgtagataaatataacctagtgaaaaaagaaaaaaacaaatttgtaaatacatcgacggctaagattacacatagaaccaaaataaaagaattttactattatattgatagaataatactggaaatagatctcagatatgtagctatataaatatatacacacatttgcaacctatattttgcaacgtaacaaaacaaataaagaaacaaaattttgttccttcctcttctacaagcaagtacgatcttttgctatattttgcagacaaaagtttcatcatggtctattcctctaagaagctgttcttgttcttcctctcgtgcattatgctgactttcaactataacactagtggcttcgtagccgcagcaaatagcataggcttgaactacggcctcctcggagataacttcccaactccatccaatgttctcaacctttacaagtccataggcattacaaaaatccgaatcttcgacccaaaaacagaggttcttaacgccttacgcggccaccgtaatattgaagtcactgttggcgtgagggaccaggacttgggtgctctttcagctaacgaagaagctgttaagggctggtttgcaaccaacatcgagccttacttagccgatgtcaacattgcgttcattactgttggtaatgaagtcatccccggaccaatcggtcctcaagtgcttccggtcatgcagtctcttaccatcctcgtcaagtcgatgaaccttcccatctcgataagcaccgtggtggctatgtcgaatcttgagcaatcatacccaccttctgctggagagttcacgtctcaagcgcgagaacaacttgtccccgtgctgaaactattgtctcaaacaagtacgcctattctcgtcaatatttacccttactttccttacgcatccgacccaacgaacatccctctagactatgctaccttcaacactaaggccaccgtcgtccaagatggaccattgggctattcaaacatgtttgatgcaatctttgacgcattcgtgtgggcaatggagaaggaaggcgtgaaagatttacccatggtggtgtccgagaccggatggccatctgccggaaatgggaacttaaccacaccggatatcgcgggtacttacaacagaaatttcgtgaaacatatagtaagcgggaagggaacgcctaagcgacccaacaatggaatggatgggtttttatttgcaacgttcaacgaaaatcaaaagccggccgggactgatatgaagcccatctataagctattttaagtttgaaagctgcttggactttccctattcactaataataatctctgctagtttgttagtgaactaagattaacacatgttattggctattggcttatgtgaaagtgatgagatctggtagcgagcttagttgactttttaataaatctgaaattggtagttgatcctcttactgcgtcgtttatggttgagccccaattttgtttctcgttagttaaaacatctttagcaaacatattcaaagttaatcgtcttctataatccaaattaaaattttcacttctcactttgaaatataaacattcttaaatggtcttgttaatcattactccgaccccaaaaaccattacaataaggtcaaaaccttataatgtcatctcatgctaatgtatatttgtacacaaatgttccttctcaatccaatgaatctctttttttactccacattggcaatccacaatagtagattaagagtttaaaagaagacattacatagacaactagacatgcattgccattactacaacacgttttcacatactaacttcgattccaaactaccacgaatgcaatttaccattgcttcttatttacaattttcttgagactccttcattttgaatccatgtcttctccttcctcgcatttatcaaaacacattaaaagcctgtttttagaattgccgacaaggaaaaaaaaactattctacactaagccacaaaaataacttaaaaccaaaataaaaacaaaaggaaagtgatgcttagattgcgatgtggtagggactcggtgagggttttggaagagcatgacaaaagatccgtgccattgatctctattaacacaccaaaagcttcttcttcttcttcctctcgtctctaaaaatccttcctttctttctgggttttctcgaatcttcatctctcattcaaacccacaagtccgatctcgcgatccaaacaccatggaagaggttgaagaagaagtgagacgaatcgtcgaacaagttaaagagcttcatgactcttccacatccttcgtctcttcttcttctcaagaagagctttctctccgtaacagagcctccgtcgttgactcatcaatccgccgtcttcattctactcttgcctctgacaaacatctcgatcccaagcttttcgaaaaggttaatcttttataacctatctctctgtctctgtttttcgatttctccgattcttaattttgttctcttgttacagctagaagaggatctgcaacgagctagatgcatgcttgcagatggagacacttcatcgtttcttccatctaaacctcaaggtttcgataatcaaatctcagattcagtttttgatttaaaggaataaactttgagttcttttgtgttatgattggaagcaggacgttttgtgagaatgtttttgggacctgtgaatgttagagcttcacgaaaagatatacagcttaaagttaaagaagaatataatagctacagagttagtgttttgcatttttcccacattaatgtcgttggttggttggatctttgcttcaatgtcgaatgaatctgtgaaatgacttgtcttttccatggaaacaggataggacagctcttctttttcttgttttccctgcaatacttttgacactaagatcttatgtttgggatggatgtttgcctgcattccctgttcagctctaccaggtatataattaggtttgaagttgtgttgatttgagttacttaagttttgttatgtgttttgtattaatatgtgaacttcctttgatcaggcttggctactgtttctttatgctggtttggttatgcgagagaacattttaagagctaatgggagtgatatccgttcatggtactcttatcatattcctcctgagttgattatagttgtattgatctcttaagttgtggttggctattgttatgcagtgttttaaatttgaagtatgctaggttgatgcagttgttatgctattgctgaaagtcacatgatataaagtttggtagagtggatcgttaggttgtgttaggctacactgattttaggctctaaattcattaggttaatcctaactttgaatgcatggttcattttcttttggatcatctctctttcctatagttagatcatgtgtgccgctaactctccttattcgctcttttatgactgcctgtggctgtgaaaaattactatttactttaggttgttagtttgactacaagaaattcatcaaatcaattgtcgctgcctcactggtcaatgttttgctacccgttgtgttttgctctgtttttggcacctcttaaagcctatactgattgcactgctgaatgacgggcatccgaatttagtggatgataggaatttctataggcaatgtaatgcagaaggttgcgcaaagtgactttcctataaaatgtctcttgtttggtatcgaatacaactatgggagtgctgttacagaggagaggtagcttatttttgttgtcagttagaaattagatctttatatcatgtagagaataatgagaaactttttggccgtccataaaggccttagtgggttgatgatttggatctgaagttatcttaatgtatatatcctctcaatcgaagatgactaaaacctcttcattgatatgcttttgcaggtggctttatcatcattattttgcaatggctatgtcccttgtcagtctcacttgggaaatcaaaggtcaaccaaactgcgttcagaagcaggtattgggtattaacttattatcatacatgcagagtaaaatctatccaacaaatgttatagattattctaaatctattgcagaaaggagtgcgtcttttcctccaatgggctatgatgcaaggtgtcgcgatgcttctgcaaaatagatatcagcgccaaagattatacactcgcattgcacttggaaaggtgccatactatttacatttttctctctccaaatcatatccaccactatgaaattgctgtaaaaatgtgtgtggtggtcattttcaggctaaaaggatggacgtcgtatggggagaaacggctggagtagatgggcaactattgctattatttcctattttgttcactttacaggtaacagttctacttttgttgcacagaaggctatgctaaagcatctttaagcttcatatttccttcataagaccaggcttgtgtaattagctggtgatttgtagctattatttttatacatggcttccataaggatatacctaaaactcaaatatggctttgaaaatatttactaagtaaacaaaacttcatgatgtcctcttagacttgtaagatgatctgaacaatgaatgatctttgcttgctctcaccagttcaaaggaaacttcagacttattctaagttcataagcttgtttatcatactgtagttaaacatgtttgtattctactatggaaactcagggctttgaagcatacgtgggattccagttgcttaggacagtgttgatgggggtagtcgctgaatggcaggtataagtctctcttccggcagcacttgcgcagtatctcctctggtttattcatgcaccaatctgacaaaaaacataacataatgatgtatacaatagtagaatagatataattgatactgaaaactcaatgtcttgttggttttgtttctcatttccaaacaagtaacatatcttaaatatgcatcaagtatcatacggtttatcacaatggttttctaatgataacgtgaatgctggggcaggtattggtttgtggcattcttctggttgtgatggccattggaaacttcataaacacagtagagacactaatggtgaagtcgagattcaaggcgaagatgaagagaagtaaaagcagagcagaactttgattaaacttcctaacttatatgactacacctttatagtttccaactgtggatctttctccccattatttgcttcagtcgataaattttgtttcttggggcaaaagtaacctaagtctgaaaaaaaaaaaaacagggagtgccctttgtttgtgtaaatggaagttgggatttgatagttgattgattaaactgtgttttgtaaacttttcaactaacacttgttcggtttccaatgatcagattttcataaaatggtgttgaaattagatttttatctttgtcttagtgcttggaacttgacactactagtttgaaaaagggtaccttcctagtcaaggttcccaatcaacaactaaacaactaaaggattcgtttttttttttttgggttttaccaaaaatttccgggcctataactgtagtctagtctcctcagccttaaaaaacttttggatggtcaactagtacaccggttaatgaatggagatttaattagagtctgaatggtaactgcgttttgcggtgtggtttaaatagtaacgaaaatacataaatatatatatatatatatatgtaaagattttgatatttgtgatgcggttttgagtgcggtgtatgtcaccattcatgaccttagtctcttcaaaagattaaagacagagagaacattaaggttttgtagacaagaaaagaaaggcaaagactaatcaaaaaggaaactacatgtgatcacagatcttaatctttgagttaatggtgagatcacatgttggctttctttttttaggttactctcaatatacgtaattaaaataaaataaagagagatagaagaaagtgtaatttaataagaaagaaaacaaaacaaatgcacatgggtaggacaggctcattggtgtattttatacacaacaaaatacattgtaataatatcttttgtataattagatacatacattttatatgtataaaatgattgcacgttggggcagctgtgttaagacacaaagaggtgaaagcaagttggcaatcaaagtggtacttactctttcttacctgtacccatttcctccattattactctctctatcaaaaagatacagaatcttttctttttcttcttcttctttatttttttttggtgtgatcatgctgtctcaatccatctttctatattctcaaaccattatttttattttgtaaatttacacgagtagttttttactttttgatacagtttttttgaaggtaaagaaaaaagttatagaaaaaaaacagagagatgaaaaatgagttaacatgagagtggcacgagtcttgtcgttgtaagtacaaaagcctgcacatgcttttgattgtaagaaaaataaagtttgaaacaaaagaacaaaactttgagcgaccctgtttaattgatagtgacaccaaaaatgaataatggcttatcggattgtttttgtgggcgccgcaaaaaggattaaacataaaaacacacagattctctcttcttcttctcctctcaattacttatggctttgagtctcagtcaaaaaagcaaagtgaataaaccaatctttgtcatatatcaattcaaatagtagtaataatcagtcatatatgtttatctttgtctgataaactaaatgattctaattcttaccttaaaggaagaaaaaataaaataaagactctttattccccaattaaccaatcaacaaatgttttaagagaaaaaaaaaaagtgtgagacttgctgatgaaattacaactccaaaataatctaaaagaccttttagctagagttttttgttcatgtgggggttggaagaagaaaacaatgaacaagaagaaacaaacaagagacagtgagaaagaaaagaacaaaagggaaagaatgtgaaaaagaattgtattcactgaaaaatcgaagatcgatgagaccttgatatttcagtttgtggtgtcagatgtgtgtgtgtgtgtgtttgtgttttgtgtttttgggtgttttgtttagaaaactatgcacacataagtacattttcttgaaacaatgattctgattttactgaaccattgtcaagaaaggtggttccgtatggccattgcctcctctgtttgcagggctttgaaacgcaatctcgaaagccgcggacttctcatcctcgtctagttcttcctcatccatttcctgatcttcctcttcctccatgttattataattgtgagactcttcaatcttttcatactcacctatcattgattcttgttgttgtagttgctgttgttgttgaatcagctctctcatcacaaggtcttctggcttcaattccaacaaatcatatttcagttatcaaagaacattaaaccaatcacattttgacaaggaaaagcaaagtttgtaccttttctgttccttgtggactttcctctataggctcttcttcctcagttgaagctgacccatgagtttgttgaacattaacaagtccttcttgtggcggtttcatcgcagtgaccggactctgtttttggtcttgaggtagaccagaagtgctagaaccaccgccactaccgagtactttgttgcggtaaagaagatcgaggcggtgaaagtaaggacaagtcttagcatcttgaggacgtttcttgttgctttctttaactttcttgtagtatttgtttatgttttcccatttctctttacatctcttagcgtttctgttgtatcccattctcttcattgaagttgagatctcttcccatagaagtcctttaggtacattatcttggtaccttggttccattccacttctcaggtttataagcgctagaatctctgcctttggccatcttgatgatgatggtaatgatgattgttccgagctcatgaccatctcttgttgtggttgttgttgttgtttctgttctggttgatgagcgtgaggatgagaaggaggaggaggaggaagaatttgttgttgtggaatcgccattattggttgttgtgattgagattgagctgttgataatggtggttccgccacacgtttagtgaccgcgggtggcggttgatacggtggaggcggttgagatgacaaagaaggaggtaactgaatggtatggccagtaattttctgaatcaatgaaatgattgcggcgtcacgagaagcagaggcggctcgttcttgagacatgacctcgtgttctcgagctaaccgagccatttcttgacgtttccaagcttcttcacgatcaagacgttcttgctctctcttctcaagagcttccaagaaactcctttgcatagccgcttgcttttgcattacttgtctcaccaaaccttcaaacaattccatcattttaccgcctccaccgcggtttccacgtttgcgttttcggctactagaacccgcaatgttagcctgatcaacgtccatatcgtcgtcatcatcatcagaccccattcctgaagccgtcgatgagctatgagacgagaaagtaacaccggtaaatatcggacccattgaaggaagtggaagaggtggtggagtaggagtaaaagagacattatgcgtttgaggcggttgcgtttgcgtttgcggttgcggttgagagaatacgggaaatggagaagaagaagaagaaggcatgagaatgggattagcgacggagagaggagtaacgtcgagggaagatgaaggaggagtagtgttgagagcttcaagctgagagaagaacttgtaagctttaccatcatgacgaccaccgcgagtttctttagtacgtttgtaatatttctgaacgttttcgaatttctctttgcatttctttgaacttcgtttgtaacctaactccaatagcttcctgtttccaaaaacatgaaaataattcagattctctagttttattttatttttggttgtcgttattagctggaaaatttttatggttactgttcgatcggattttttttttttttttttggaagtaaagagagtcttgggattttcaaaatcgaaaacgtcccagaaactcatgaaccaacttctgtaataaacaaacagttcttttaatttttcttggggatggtgaagatgctttgatctcgaatatattactatttatatatacctaacactaaaaaaaaaaagttaacaaaaaaaaaacacatgcaaatggatctctatcaagaaacaccattgatgaaaatggaagagaagagaggaagagagacctggaaacatgttcccaaagaggagctttgagagtagcatcacgaaaagtagaatccatatcggatcggatccgaagaagagctaaagtttcttctctcggccatcgatttcccgatgaagaagaagcacttcctcctcctcctcctccacctccacctcctaatccaccgtcatccgcggcggctgagaatctcataagctcttctaagttgttagcaggaggtcttgaactaataggtgaagcttcctccacaacttcattaccaccaccacctcctccttgctccatcaatcttgatgatgtttcaatctttttctacacacacactctctctttctctctagctcctcaatgttttttgatataaatctcataaaaccattgatgatgatgatgagagaaataagaaagagaagcagtctttttttgtttgtttaaacagcaactaggaggggtctgaaggagaaaggagaggattacgaggatgatgatgatagatagagagaaagagaatgaaagcaaacaagaagttaataaagctgaagcctcttctaactttgcagcaaattattgttaaacccacttttcttcactctctctttttctttatttattttattttcttccttcttttatattatttagaaaaaaaggtccacatctatttaattaaatccaattttatgtgtattattattattgttataaagcaaagagtaaggaaggctttaaaagttaaatttggatccgcaaacatctcattgctcagtgatccgattaaattgtttttgggtaaaaattgtgttttggagaaatataataaacacaaaatcatgtgcctcccatgttgttgtcctctcccaccatcatgtctaaggtgtccacgtggcgttgtctgattggtagggtatgtgacaatcagatttttggggaaagggagggacagaattggaatttgataatagtttttacccgatttgagctggaccagccttgacatctttccccccactctctttcctctccaattcaacagtttctttctctctttttttttgttattgtgtaaataatacatttatagaaacatatcaaacaatagtgttttagtgatgtcaagaaaagaaaaaaatagtaagtccaaagccagtgaaattattttatgaatcatacatagtgcataattaattaacataaccatgtaattttaaactcggaactatcttggcaggtcggatcgataacctgacccatgcattagtttatgcgaagccaaagccaaacccactcactaccaacactataacagatttcgtttatgtcattttaaacatactttttactgaatttgcagcgaatttagcatacatgaattgatatgatggcttggtcacgataacaaagttgctagactcatttggacgctacaattttacaagtgattcttgtatgttggcataatttggaatcaagaacatgcatggtctgcaaaatcccataaataaacaaacgtgacgtcaagtgatctttgatatgttctttgaatttatttttttctccaaaaaataagacattcgtttagttaaatgttgatagcttgacatcgcttttttttttagtaactcgtttggtttttaattaaaaatgaaactgttaatttcctttgcacatatatatgtgaatcaaaacaaaagtcaagatgatgattttatgtattggtggtaaccagaattttcgacaaaagtacaagataacaaactaataaagaaaccttataacaattaggtgaaaaataatgaaaataagtacattttttgagatagtaaagctgtggtgaagatagacataagtgatcaatcaaaaattgaatagcctcatatctaaaattagttgcaaactcaagacatcgatgcagacactcatactatcacattatacaactctttaatacctctcacctacacaaacatacacaaaataaaaaaaaaactcattttcattaccaaatcacactctacacaaaaacacaccgctcatttctagttatacacaaaaaaggaaaacaaactatttccttctaacaacaaaatgaaagatgctaattaataataatggttagagaagaaggtgaagaagaagaagaaggtgggcggtggaagtggagaactttcttgaaggggaaagaaagagagagagcggcggatacacagctgtcttctcttcttcttccccccactttcacatgcctctcctttttcactatatttattacttattacatgtgatatgttcttttttttcctaattatacaactttaatattagtacaagtataataagaatataattatacgaggtggtaagaacatgctcacggagtttccttccttgatttctgactgaatgaatctctctttttacataagagatctagatctcatgagggagttttgattaagactttgattaacacactaatcttaaacacacaaaagcaacgtctctctctaccaataaatctaatcttattaggacacaacaagttgtcaaactcattactttcccaacttgtgtcatacgaggacttaccaaagataacgagtcaacatcattttgacggggtcacaaaacaaatttatagttaaaatggtccagcgatatttttttttgtaattccatgaattttcacacccacgtaaaatccatattcctcctctcacaaatatatctacaatttcagtggcagccaaataaataaatacctcacaaagtcaaaatccaaagaatttacttacactactaactcaccaaaaatctaactcggggctattttgatcattgcattaactatatgaccccctttaaatagaagccatgatgcatcataatgtcaatttcaaggcttacgacaaaacaactagcaaaacctgggctcactttgccagtgtgtcagagagttcatgacaagtcaactcacaccacaacactcttgattttaaacccttagttttagaacacacacacacatcttaaaaatctatccaaccaaagacctttccttaaatccgcactaaatccacaatcctatggaccacttacctcaccctctactagtggatatattcttctttaatatatttaacccacaaatatttatgtggctatatcaagattgccaatgtagtagatatggaaaaaacaaaacaaaaccattcttacttaacacacagatggataggtttcactggtaaagatttgttgttgtacacattacactcgtttctcaacaggaaatgttgagttcgtgaaatctcagatgtacaaaaaaagaaagtggaacatggaacaaacaaaagagtgacaaattcaattttgggcatattagcattctaggtcagacaacagtcaaggttctggatcttacctatgtacaagtacaggatagagctgaaacaacatgcttagagagatccagtattcaccataagtgttcattgagaactaatcgtggaacccaaaattatcttaccacactgcccaactgttaatctgagaggctcgttagtagtagttggggttgctctgcaacacaaccgtctcggcgcctgtcgttaagaagagtggagaatcatcaattagcaaaatcataaagaaaatgacagaaacattaggtgataaaaagataaacaagaaaacctcaccaagtgccaatttttactcagaggaaaccctgagacctggattttatccactttgtgcagaggtagagagcgtggaaaacatagaagcttcgtcttcaaatcatcctttaccaaggatcttgagtacgttccaagtgtagcattaccttcttggccaacctctttcaagaagaagaggataggcttcttacagagagacgaaattggaagctttatgtcaagatcaaactcactgggttgacttatcccgttccaagcagagaaagaaagttcagctcgctcaagatcccgtggtaggagaatacttgggaaaacttgtacaacataaccaagagatatcgcaaatgtcagtttgtgagtatgatcatagcagatcgatcgctgcaaaacactcctaggatccaaactcatagctcttgtcaagagtttcaaactatctaatgtagataatcccggatagagaggattaacagcttcaacgtgatgaattgagacaaatggtgcaataggatgagaggacaagagaccatgagcatttcccttaatatcccactgtcacaaaaacctaacattagcattatcatcagattgaagatccaagagatcatagaagcagagatgatgaaacatacctggtgaaagccaggctctctggacaaaggaactccgagttcagtgatgcaggcgtggagacgatcatcactaccgtatagcttcgggtatctatcgagacaatcgtcgtgaatccgggagagagcttccgctaaagggtagctaatggcaatgccaccgcctccaaaagccatgttatgactaaagtaagagttagcagagtggctctccgaggggtttccaatataaaccatctccgaaggatcatacttgcttaacacagcaagaagattatgaacattgaagatagtatcatcatcaccaagaacaaaccaccgaacattagggagagagagacgaaaagactccatagcaatacgagagattcgaagtccagaaggatgaccagtaggattagtgtaacgaaaacgagagctgtcttcagagacaattataggaggaagagaatcatcaccttcctcaggagaaacttgctcttcaagccagacatgtccacgcatctgagaaggtttccaccataatctcacaagttccttacgacgttcccaaagctgtgaagatccagcaataccaaacatcaagtgattcatagacagatcaagtttatcaatctctgagagactacgatttctaaattcatgatcgaataacggaagagctggaagagacggcggcgacggcggcggcggaggaggagttacaattggatgatggtaccgtttgttccagagatgattgtcttcccaatctttaagaagatgccaacaacgggaagtggttggtgagaagacgagagaaagccaagcgacggaagcgagaagaagagcggaggtagcgactaatgcggtggcgaaacgactgagacgacaaggacggattcgaggaggaggacgagagattggggaagagcaaggacggtgaggagaagatgaataaaggtaaggaatgaatgagcacatgacggtgagaattaaacgcatcgccccaagcgcacatttccgccgccgggcgacgcagaacggcggcgaaccaagtttccgtttaaattagggcacagggtttcgatcgccaccgtcgtctcgtttttttctctctctcttcttcttcctttcgccgtcgctttgacttttcaggggtttgattttgatttttcaaaatttaggggcggattttggtaagaaaagtttttgcctcggtgaatgggcttagatctaatttaggcttgtagtaatcgggcctaatatgggcccagtatggtacaaaagattctcaaacatcacagtccggtgaccccaatttatgtacacttcagttcccaggtggcatttggttgtactatcggaaagcccaacaaccgtcactgtcatgtcagaattcagattcgttatcccatctttattatcctttttgtttttatttaactttgaaagatgactactttttttcgaagaaacgcttttatttctaaattcttctagtatcattattgatggtttcttaaaacaattattaagttaagagacatgtcttataatagcttataactaacaaaagtctcttaaaacacttttgttagatataagatatatctcttaactaagagttatgttaagagaccatcaataaggatagtctaacgtttattatgaaaacatataaaaacctacgatttcagggtattagaatccgtcaaatctgtttataactttttgaactttaagttatgttgtttcaagaatatagatacagatcaataaacataaaatatatgttcacttaactgaataagtaacaaatagaaaaaccaatttttacagaactgaaaacttactttaggattttttctccttctagtaaaaacaacgtataaatagcctctacaataatatacaaagctttctataggtttctatttttacatgatacaattgtagatctctgttttaacaccgtaaagagattctattaaactctactttgaaattcttacaaattgattagaaaaaaaagaagatgagaatctcaatttttctctcatttacttcttttgtattgttcttctttcttgtttctctttctctttgtctctacatcgtcacgtttttatacattatttaaacgatgtttgatctaaaaaatgtttcttatctcggtcggtatttttctaatcgatataaatgtaactaaaaaacataatgtattttgcacaagtagaagaagatttacataaacacaaatgttcatgtaaataaacaccaataaattagcatgtaattttatacatagaaaaaatgtttaaaaatcacaaaaaaacgaaaaataatataaagtttggatgcataatttttattgtgtttatttatgagaactcgtgttcgagtacatttttgcgtttattgtaatgatcatttgttattgtacacagattgtattacaaattagtgaccaacatggagtgtttgtttccccatcctcatctccctctgccacgatatagctatagctagcgattgtttgtgatcttcaatgaatggttttagccctatacaaaattataaaggttggctgaattctataatcggactactcatcgagtttatatcactaggggtagtaaatttatcaaacaacctaatgtaacatgatatacatattattagccgatgacggtatgacatataaaaacctagttactcatgttaatttcagattttttttttctacttcttgatttagaattcaatgagttaattccccacattaaacaatacatcggtatttccgaaaaataactctgctcacctactcgttgttgtcttataaatttatttctcgcaactcataaaaaggaccgcacaaattacgatgagaaatgtatgtgaagaatgatataattagagaaatcatagcattgaattgttaatatcacattaaattaaaatgtagcatgaaaaatgcgtcggtgagtggttgggtatattggggtcaatttcaagagaaatttgtgtatgtacacacaaatgtacaatactcaaggcataggacaagaccaccttacacgttttttgtatatagaaaacgaaagacaacgacattccatctaacatctttacttgacgacatctttggatacaaaattaattaaaacttagaaaactataagtgtattttaatatacttgggacaatgattctcccaccgttttttgccgttgaattaatgtatatacatcatttattattacacagtttgaattgtttaaagtttaggttagagagtgaagaacaagatactcgtatgcatgtatgtactcgtgcaatcttatgtcagtctggttggtggtggtgcctagttacatttttggcgagagcatgtgttttgttctctttgaaaatcatgacgaaaagttgctttagatatgattggatttttaagtcaagagaaatttacgtctttttgttaaaaagaaaaagcaaacaatattttttcaaaagcaattaattagtaattaccgacagatcgaaacactgtcataatttgctgttaaaatctattagcaaatcatttgtaaactttaccgaatttgttgaccagatttcgttgctaatattgctatggttttttgttattttttgcttgctagtattttcactatatcgacgaagaaaaccaaaaagtttcgtttatgcctctttttacttctttttttaattgctaaaccatgaaatctgatgtgatatatatcttgtaatcttacgccacttttctgatctctagtttgtcatgagccatcgataaaataagtgaatgatgaagtaattagatttagaggagataatgaattatcccatcaaaactcgaaacatatattactatattataggatgtttaaaccaacccttcaagttacttcaagttaatttcggttgcaagtttatcttccaaatccgaattatgcaagtcaattccaccatctctaaaatcacccgtaatatagtcctcccgtatagcgatgacgtgacattcgataactctgtttaaaaatataagtgtttatgcaaaaaaaactttaatgtaatttttttttgcaagatatactttcatgtcaaataaatagggatcaaaccacaatctgaaaaatctcatgaaatatagctcttttgtgtatcgataacatgacagtcgataactcatttagaacatgtgcaatgcgtagagattttaagagtcatttatttaggatttttgaatcaataactgtaactaactaaaattttatcatatttgttctggttcgtttgtttctttcaaaataactaaaattaaccaaatttaaccgtcattaaccaaaaaaatataaagaagaaaatattagaaagaaaattaaaattgagtatttaattttgacaaatataactaacaatatttagatattttgattattcaaagtatttgattgttttggttctaaaaattactaatattttgagtttttaattatagttatgggtattaattttggatattttctaagtttctggatattttggttaatcgtttggttatcggttctgttttattttatttaacacttaaataaataactcaattaaattatatgcattaaagtaatatattcgatagacttataaaatctctaaatgagttgtcgactgttatgtcatcgatacacaaaagagctacatttcatgaaaattttcagattgtggtttgatctgtatttatttgacatgaatgtttatcttgcaaaaaaaattacattgaaggtttttttacattaacttttatgttttcaaacagagttatcgaatgtcacgtcatcgctacatgagaaaattgtattgtgggtgattttaaagatagtggagttaacttacataatttggatttgaaagataaacttgtaaacgaaattaacttgaaaggttgttttgtaaaaaaaaattatattatatactattgagtagaaacgacgcttatgattctattaaagatgtaataagaatatgtattagtgatcgcttgattccgctgattatttttttttatctgatgttttactaactttacataaaaattatattataaagataaaagagaaataatacagactatttaaaaaaaaaaagattgtaataagagataaaatacaatattttgttttgtttatatcttgatgtatcttaccgttttatcagttgattacaataaaaaaaatatatctctttttttttgtgagaaaaactatctcttaacatagcgataaaaagttacgctagtttatgccaactatcaattttattagttataacttataaaaaacaaagattttgtgagttttatccataacttaccaaagctttcatccataacttaccactctacataaaattacatatttttttgaaaaaagtcatgtggagtctcaaaagaaagaatctatttgctcatttttttgtgataaattctacatacctagctactcatattcatgaacatggtttcaaatctagaagtctttctacttcagaaataaaataaagaaactagctgctaagtgctaacttcatattttgttctcaaagataacaactttaaaacggataatctagcaagaaatacttgaaaactagaaaatattaatttggtttttttatttattttatttattatcatttatttacggaaccaactatttttcttaatggataaataaaatgcatatttgtcaaacaaacaaaatcgagtagagaaattatctaacacgtgagagataatttacaaaacaatccaacatatattatggtccccatcttgaaacttcccaattaattcgtatttgacggtggcgtgacaacttcgaaagactaaccataagacctagtgcattcactagtcactaccattcaataaatctcacaaattctcttaaaaattcgatacttttcaatcacctttctacaaaaacaatacaaaacaaaatctaaatacgtgagcaaataatacccataaatatatgtgtattattagcaatttgataatataaaaaacaaaacggcaaaaaaaaaagtgttttaagacactgaatcgtagtggttataacgtcagtgcagcttctaaggaaggtttcttcttcttcttcatcttcctcttaatcacaaactggtcaaactctgcctctctcttctctaaacccaaacaaaagaaaaaaaccatttttctcatcttcttcttctttattcacaaacctcaccaaacacacattccttaaaccagatcttcattctccgattctcttgtcccttatttgtctgctgttacaaaaaccctcttcattttcccagaaacccacttatcttcttcttaaattactatcatcctcactcaaaagtctcacactttctcaaaatgtcttgtttcttaagctgtgtccgtttcgaaacaaccaccgacaacaacaaacccacgagtacagaatctggttctgtctccggtgttacctgttatacctgggatgatgttgagtctctcacttccaatttctctagacttattggtactggtggctatagtagtatctacttagctcgtgtgtctggttctatcaacgcagctctcaaggttcatgtcagtagtcatcgtctttatcaagtgtttaggtctgagcttgagattttgcttcgtcttcaacatcctcacattgttaagcttcttggttactttgacgattcaggttcctatccttcctctcttaatccgtttttaaattcttgaaattccctaatcaagaactggtcctaggaattattaacatccatgaaaagtcaaatactttaaagaacagagctttattcttgtcttgtcctaattacaattcttttgtagattcgtttcacttttacactagttggttagcttttccttgttgcaaattgtttatcttttgagtggattcttagtgtgaatctaatgttgttgttgtttttgttgtgtatttttcagaagaaagtggagcactattactagagtaccttcctcaaggtaaccttcaagagaagcttaaccggaacagcaaacaagtgttaccatggagaaacagaaccgctattgcgtttcaggttgcgcaagcaattgaacatattcatgagaaatgtagtcctcagattgtgcacggtgacatcaaatcttccaacatacttcttgacaaacatttcaactccaagctttgtgatttcggatcagctaaagttggtttctcgtctatggttcagccttctaagacgacgtcaactatgtcaccacgatccaagcaagtgatgatgattggttctccagggtacacagatcctcattacttgagaactggtattgcttcgaagaagatggatatgtatgggtttggagtggtggttcttgagttggtttcgggtaaagaagcggttagttctgagagaggtgagatgttggtgcattcaacagcttcgttgatacatgagattcttgattcgaatggagatattggagaagagaaagtgagacagttcttggatccaaggttgtccagggatggtagtattgatttggaagaggttaagacaatgctacgtgtggctgctttctgtcttcgtagccctccatcgctgagaccctctgcttctcaagtagttcaaactcttaacaagaagataccgtctctatctttcctcggttgtggtaaaaaagagtgatacataaaactaacctgtgtgttttaggtgatgaggtttaggtagtgattgtgttgcaggtcttagtagaaagatctgaaacgtttgctgagaagattgagtttcgttgtataggagattctgcaaaaaccaaaaagaaagaaggaagattcaaattcctcttctgctttgtgatgtgtatagtaatcaagcaaaacaacattcatgtgatttgcattttgtaagagttactgtgtggatgtataatacaaatgattggatgaaattcggtaaccggtttggttaggaaccaacaaaccgaaattactataaatttatccaaaattaaatcgagataaccaaacaattgtactgaaatgaaccgaagaatagatgcgtagttattgaaaaagttgataaaaccaaaccaaatcaaaccgaatttgggaatagaaccgaactttgtactctataacccaatccaaaccgaatcggaccgatgaactaaattttgttttgtcatatttgatccatttctcttcactgacgagacaaactcgacgaagcaatgtggtctcttgcgctaacgttaccatctccgtctttggtgtcggtgaggagcactaaactcggacgaagtgttagtaatggtggccggaattggtcgggacttactaagttgtcggagaaatcgaagactaaacgaggtaatggtctctgctgcaaggcggagctgtcggagctagctccagtcgtctctgctacttatggtgtacttcttctaggaggcggtctcttcgcttgtaagttactactgatctcataattcaaattatttatctggatttttggctcaatacactaaaaaatttgaactttgtattccgaaattgaagatagcaaatctggaagcaaaggttctctctttgggggtttgaccggttctgttcttatggcatctgtacgatcttgctctctctgtctctattcttagtgttagtttcaagttactacagagttaaaaatctgaactttgtcctttgaggaaggtagttaggaacttagtgcaatattcaggtcattgtttcttcttgatgtggttctcttgcaagctttatttcaattccttgacaacaatggtgtttttgtctctttagggagggcttaagaaactatctacaacagttgatctgctagaatcttctcctattgttgcataccttagttccttcaaaacatatgattgtgttcctttttactctttgtgctttccatctcggttttatgatccacgactgtatcactgaaagcatccacatcttcttgttcaactgttgaaatgattacacttattactgagcatgccaatgtttgaatttcttctttataggcctacttccttactaaatcaccagagacaagagttctcggcgataccataggtcttggtgctgccttcctcttctcttctgtcttcggtaagcttgacttgtgaagatgtgttttgtgtttgcatatatgccatatgaatctcttctcgttgcactgaattttctgtttttttctacaactttcttgcaggatttcgtttggcatcttctcggaaaccagttccagctggtccactactactcctttccatcggcatgttgtccttctttgtcatggcgtatatgcacgacagtttacctgctatatccatacccgaccctttacctctaccttagcttagatgagagcatgaggttgtaaccagataggaaagctctcaaaagtatgaatcaagaacagttttgcttttgcccccacaccaataaattgcaaagctttgtttgtgaggctaatgtggagagaataatgtttctttcagataaagagttgttgctaaattagagaaatatgcatctcccattcaagattttgttaatggcactttttgaaattgaatgatcaatgctaaataagaaagggggtaataagagaaaagtttgaataaatttgtggacaactctattgagaatggtttggtcttaacagcgactcctcgaagcacatgttattttgatgaacaagtgtatgaactccgactaaaagtgatgtaccatttactttgtttgatctaagaactacaactttctgtgactttaaagccagcttctggaaaactatctgaatattttgtaccgcgataatatatggtactgttatatagtattgagttcgtgagttcttagctagtaggaatctcttgagctgtaggagtatcgtcatagaccaatccctcaactggattcatctcagcccatgtagctgcatctgcgtatcctaactcaaacagcctctccaacacctcgtcctctgctggctcaagtgcccaattcaatagctgaagtcacagaaaaaccaagattaacacacttactcccaaaggagaatgatctcattagaagaaactgagcacttacttgtctagatgttgctctgtttaaagggttgcaatctgggcagatctcaataccctttagtttgaagttactagcggaaaaagcacaaactcgaacctgagaaagatttatacaataagttcattaagctccatggaacatgttcagaagtcaagatggatgaacatatgaaagggcttccaaactttttaaaatgccacacactctgaaggagcagacgcattagaaagagagaatgggaacagaacaacacaacaattgtgatcatactgttttagcagcagctgttggtggcataaacaatgtcaagcctccatcaacacaaagtcgattacggaacattgttgcaggccttggtgcaagatatctgcatttgtttttaattctggttgttaaagttttgttttccggataaactgaaagtttcaaaagcaagagagtgatttaccctggaataaaagaagatgtgaaaactgcatctatcaagtcgcttttggagtcgaactgatccactagaagacctctaggtctccaaaacacttgagtgatggcaactacaatacagttgaatgatcaacaacgtcagacccgaagacaagtcaggcacgaggagtcaaaattgaagaaagaagacgtagttactcaccacgaattctcccgttggacctaatgtgaatatcatcgggcagtaacctctccatggattctctaaggacagcctaaaaccacagcgacttgtatgaacatctttataatgtaacttaaagccaaactcatcacagcaacattggtgggtcttgtgtttcactcataagaaattgtttgaacaaattaacaaagtgacaatctaaagcacaagaccaacacctaggaacttattcaactctatggctgtaaatatttgtgagcacactgagatagaaggctcattaccccaagacggaaagcagtgccattgcgtcgacaatcataagcaagttccttagtagcttcaagggcttctcgcatagtagctcctgaggttatcacagcacagactatagcaccagcagaagatcctgctaaaggagtagtttcctgaatcaacacacaacaaaatcatgttccttcctcaatcataactgttactaaaacacacaaatccatgagaaaatgaagaacctttatgtaacccttttcaataagcaactgagcaactccaagatgataaggaaacaaaagaccagcagcagagaaactaaacccaggacttgtaatgactctcctctctttctccgcttcaacatctttaaccctttgttcccatatcatcgctggctcaatctcatcctcaattacactagctattctatcaccatcatcaatcggcggcgtcttttgattagaactcttcaaaagcctcgacgcgattccgatgaaaagctcaccggtggcaacagcgaatgatctcttgttctcggaatctgtagaaaagttctgattttgagaagacccaccagagcagcatgataacctaagggcgagaattctcggagaaaggttaaagctttttctcgtacggagagagatgaatggagtggaacggagagacatcgccatggattaatgggtcacactcagattatttgagggttttgggaatttcgaaaagttagggatttgaaaatcacacgatcatcgcagctcacaaaacactcatgaggatgtgactctatggtttcgtggagaaatttgttaactttatagttctcccaggaagcaacgtttcgcgacagagagagactctgttgaatcaaaactctgttcaatctgtttttggagagaatctaattttaaggactgattttaagaaggtcaaaagagtaaatatgatgtgatttgatgatttcggtttctgtttcatccataccaactaaaattaccaaaattggtaatgccggtcctatcgacgaacgaattactttttatttattgatccaacaagaaatgtcggcttccaaaagtttcaaacttacacttatttgacaagaaaacaagaaaaattgagacctttttagatgccaatgcttaatgaatgactaatttagtaagtagaagtagcaaggagtacatataaatatatattgaggattagtattagggattttatgaatattttgaatagttttattggtcaattctggtttccgttagagtcaatcgatcattgtaccgtaattgtttgtttatggtattaactacataatgtcgtatagtttatgcatgtggtcatgaaatacatatatttcgtgtatataaggatacatttacttcgtgtacatgagtatagtttggatattattagccgtgcatttagtcaaaataggtttgtaaccaatatcatctccaagcaacaagacggtactgccatcattttgaggatcctgaacaaaaaacatccattcgaccaaggatctccagatctgctgattgcaaacattcataaaaaaaaaatattgttgaaaaattatcaagaatgaaatactaagtaaattgaagtacaatcgaaaacttacttgtgttacttagattttcatcaaataaatcgattccaaagtctttatcttctgagtctaatttagacgacatgactcgaatgctccaattgcggttatcttattacctagaatgaaatatgctaactctacttcactagcgaggaatgacttgataaaaggcgcatcattgatattaggtattacattctctaaatcacaccacatcttttactggagttaccattttcgacaagacaatttgatttccgccagcttaaatctagagttttaatatactattaatgaaaaaaaaatcttcttaccattagttcttaaatcaaaatctaagatttctattaaaccggcccgatgatcttatcaagataaccaaacctaaacctaaaatttctattaaaccggtccggtgattttatcaatataaccaaactttaatctaagatttccattaaatcgatccgatctgatccgatcctatcgagataaccaaactttcatcctaaatataacttaatttattggaaattaccaaaatgcactgaaataaatggaagaatgcaacacaattcgcgatattattggaaaagtagaaaacatacagaaattttgttgcacacaacgtagatcatcatcatccgttgtatcttataagtttaacacccttaaaataaataatcaaaattcaccttactcacgaacgtaatataattggttagaagtacattaatcgtatgtcaacgtacatataccaataccatcaccacaggtccacaagtctccccatgtgcgatgcatgcatgagatttacctacttactcgtccgcttgttaaactaactcaaaattcaaatcccattttcattgagttcataaatccatttatatattggttgcttaagtcaatgaacaatgaatcaaggaattaaacagattgaatgcttgaaagttagacaaacaaaaaaaaaaatcagaaaatatatatcgtaaatgtcactaacacaattggtcaattggcccattgtccactgcatgcccttttttaaagttaactatcgaataaaactagtcgattttaattagattcatattaattgctaaccaaacttcacacatatacacaaatgtggaccgtataataagaattggagttccccatatgtattttttttcattgacgaaaacctttgcttacggagcaattaaaatcaacacggattcgttattaataccatgacataacgataattataattttgttttccaaattcaccgggatcattcgtttaatagatgaataaaaaactagctagggtcaacgttcacgcaagtgtaatacggcttaaatgctgtggaagagtcttgatatttcagctttcacgatagctttttaagcttctccggcggcgttgtcaccggccgtcaacttcttcatcatcatatactattaagatttgattatttaatttgtgataatagagttgacgattacgtgtgtgtaatccctcttaggattttctctaggtctatataaacctagaacacgaagagtgcttgaaacaaaaggcagatcattgtaattctatctagctttgtactcaaacaaacattgatcatttattaaccgaacaatgagttcgtctaacggaggtgtaccgcctggttttcggtttcatccaacggacgaagaacttcttcattactacttgaagaagaagatttcttatgaaaagtttgagatggaagtcatcaaagaggttgatttgaacaagattgagccgtgggatttacaaggtacgttcttttattaataatacatatacgatccaatcctctagttatattagatactatacaaaagcattttttttttgtttttgtagatagatgcaaaataggatcaacgccacaaaatgagtggtatttcttcagccacaaggataggaaatatccgacagggtcaaggacaaaccgtgcaacccactccggtttttggaaggcgacaggacgtgacaaatgcataagaaattcttacaagaagatcggcatgaggaagactcttgtattctacaaaggaagagctcctcatggccaaaagacagattggatcatgcacgagtaccgtatcgaagacactgaagatgacccttgtgtatggatatatatctcttattcattagaaaatttgtgaaagtcggtcgatttttaattgaataaaccaatctatacataatgcaggaagatggatgggttgtttgtagagtgttcaagaagaaaaatctgttcaaagtagggaatgatgttggctcaaacatcagcaataataggcttgaagctcgtagtttcatccgaagagaaagcccttaccaaggaatctcaatgtttgagcttaacaagcctgaagagattagtgttcatcaatatcctcaaccaccaatgtttcaacctcatcacaagcctctttcaataggctatgactattcattggctcttctaccaagagaaagcgagtaccaacaagcgtgtcagccatcaggggttgaggttggcacgtgcaaggcagtaagtgaatggggaatagtgaattgtaacatggtgagtcatgaggactcgtctagagcgatgaggtttgaagatgacggtaacaacacttcttccacggtccagccaccttctaatctgctttcattgcgcggtgaaaatggatttcttgggttgttttaaacagatgctgataatgttatatgtatggatctcttcgtatgtaagttctttgattacatgtatccatttatttcattctgtaattggaagcgaattgcttcactgataagttaataagaatttctttgatccattcgtctcccttcctcttcaaggtatcgaaataaatgataggttaagatatttaatgtaggcttaaaagcccataggcccaaaggcccataaagttttaataacacggtggtggttttggggagccttccttatccgctcggtgggggctgtgaaactatggccggagtttgcgtcccatggggcggcggagcttgtcgtcttatttccccaattcgccggcgttttccggtttcctcctccgtcgcttctcttgctcttccagactcctcctctatgatcgtcgacgacaatctcggcgcatttctcgaggtctaatttacttttaatcacctctctattcgtctttgttctcttctcacactttcgtctttatagattcttccaaaagatcttcgtcaccgtctcttgaacgattcaagaagaaaccagctcgtagaggttattgttactcttgtgaaaacaatttcaaaggctaaaaattgaaatgagaaagtttaatggtgatgaattttgaaaccttgattaggtcataatggatttaggaagaccacctgaagcacgttatctcggagaacctggaggtcaatatcttaggaacaacgaggtaaaaccaattattacgtttgtgtctttactctgttgtgtgtttgtgtgtttaaatatggattcttgtatccatgaaaacactagcttaggtatctatggaagagttagaggatgctcaagagcttgtaggtgagtttggagctgataatagagctggaatagaaggtacattgcacaggatatcagctattcgtaatcggaagggattcattgtcggtttaacttgtcgtgttgggagagctgtgagtggtcacattgacatgctttatgatcttcttcactatggcaaaagcatcttgttcgttggacggtacttgttgcttgttttacacactactctaatgcttcatttctcatctttgatgatgatttaaacttctaaatggaattgataataggcctggtgttggtaagaccactgttttgcgagagattgctcgtgtcttgtctgatgaattccagaaaagagtggtgagtcttgcctatccttcaagttttcttagcctttaggtgctctgcttttaactggttatgtatgtgtaatttgctgtttttaggtgataattgatacaagcaacgaaataggaggagatggtgatattccacactcagctattggaggttcgcgtagaatgcaagtacctaagccatctttgcagcataaagtgatgattgaggcagttgagaatcatatgcctcaagtgatcatcgttgatgagattggcacagaagctgaagcacttgcttgtcgttccattgctgaaagaggagtgatgctaattggcactgctcatggagagcagctacagaacatcataaagaatcctactctttcagacttggtaataatctcttcatcgcttgtctgaatttaatggtatccgttgcaaagttttttctcatgttggttacgttctcattgttggttgtagattggtggtattgagactgtaacgcttggagatgaagaagcgagggcgagaaggagtcagaagagtattctcgagagaaaagctccaccgactttttattttttgatcgagatgagagaaagagattattggattgcacatcaagtaagcatcctgtttcaaaactctgttcttgcctctgcctgcagtcattctcattcagtatcaaagatcatatatactaacaaaacttgtctttcttttcactctcgtccagactgaaaagagtgttgatatgttgcttcgcggaagaaatcccatggttgaggtatatacagtagactcaacaataatcatttgagaatatacataatgattgaccaattaagatcaaaagatactgattcgacttctataaattatggttttaaggtgaggagaagggatgaagagtacaaggtggtgatagaaagatggaaggcatacgacgggcaaggcatttgagtttccttcatcgttgtcaaacttatgacactaacagtaaatgtgtctttcttaaatgatcaaccatttgtgtaaaataatcaaaagaaaacaataagcatgcatccgtctgatcacatagtttcaaatatactcaaatgcactgtaattcataggccaacggttcatggcaccaagcccatcacatgcacacattacatccttctttccacaaaatccctgccccaattcttattcaatacatagcttccagctgaattccatctcttgaaacacaactcatgcgtagttcctttttcgctgtcgaacaccgtgattgttaacccatgaattgtctttgtcttcaactaaattgatctgttcttctgtgaagtatttcagaatatgctcattcatggattccttaggtatttgacgtcccacgtcgctcttagtgagtgttttcctgatatcccatatatctggctctctgtggacagttaattctgttgatacaatctctatgcctctcttcctttgacatgtttctcaagtgtgcgagatgactacttcagaatctatggagagagttaattctgttgatactttatttgcattctttatcccccttgacatgcttcttaagtatcggagactaacttctctttcgtttcttggggtagatggaaccgcacgggccaaatctccactttgacaagaaaagagattgaaaagacatggcgttgttggagtgataacggaaaacagagtaacgaaatagaatacttcgattaatgaaaatgacagattgatacaatgttcataaaacacgatatcaacttctcatctacaagagttcaacatgaaactccggcgaacgatgaggaatgattctctctgagaatccaaaaggaaacgataaacaacaaatccaaaatcttcatattcttctgcaaatgatcctcattagctatatattctcgattcttcctctaacactcccatcgaccaatcttctcttgccacgtctcacagctactgtctccactcatgtattgccccgtatctaaccatatatcaatgcctagtttcctatatcatggagacgatggaagagtatcttcagtgttcattaccattccttcgtttcttgtatcacaagacaccatatttgccaatccttcaccgtggtacggaaagagaggcattgtaggagacaaaagcaaaaaagctttttatatagacaaatacgaacttcacaatactatttggcaaaggtattcacaatccaaatgtgtgtcgaagatggatatatttaacaattaatatcccaatttgtgaaggaaaatagattcttgtcaaaaaatccaacaaaatattttttattgttgtaccgaaaaaaaaaaaaatatatatatatatatatatatatatatatatatatatatatttagtgagagattatcttagatttacattcgagaaacctccacaaatatgcacatttacgggaaaagtattttcaatattggttatttagtcctaataaaaccaatcattccatacttgttaagctagtcatgtactcatgtggtcaattcctataggttgcatggccattagggagagtcactaagctaacatacatggacactctgtccaagttactgatgatgtatcaaatgagaaagaggtgtattgtctcatggatggacatatatatgtctattatgtcccatgaacagaactaagtctcatctctccgccctgtcgttttcacccagattttatctctctaagtctccaagactctctcaattcccattagaatcactggcactactcatttgaattgatttgtgctgaaaaaaaagatggaggacatgaacaatttcaagccctcagtcttgagctctgatgggagtttggctgttcatgctggtacgttacgttatctgttttttctttgtcacctcgtaattactagtaatttgttgtagggctttacaaaaactatagtatttgtttttatctaatttgaaaacaatcgaataaatgtaaaattttcagaactgaaaaagcattggtattgtcttatttttttgaattcatggaagaattgtttatatgaatgatctaagtgttggaagtaaacatcgtacactttacatttgtacactaaaagtgttatacaatctaaatgtacgaatcaaacagtgaaaagtgactactttgcaaattgtgaatagtaaagtgattacttttccaattaagtttgaaaatgactattttgccaacacaccctttttgggtataaataattttacaaacaatgaaatttctgttcaatttaaataattggttttaataatttataatttgattataatatatttacatttgtatatgttaatatcaaatagcttattgtttcgctggttgtttcaactaatctacatctttaatgattgatattattcaatcacccatcttctcagcatgaggaaatttatatatatacatgcatagagtataataatagaacgctggtccggtcatatacatgcttcttgttaaagaactagaaaagttcattactcgaaaacgagaacataacagagaaaccgagacgatcaaagacaaaatgtcttatgaatatttaaaggaaaagaaaactcctaattaagtagctctgagtacgtaaaagacaaaagaatgacaactgatttaggaaatttcttaagttattgtcgaattaggtgtcatttaataatgtgcatggccattaaggagagttgttaagctaattctggatgtgttttgttgtcctatggatgtgttgtgttgtgttgtgttcgttagtgatccaaataaaaaagacaagaaagagttatgtcttatggatggacatatatgtgtccattatgtctcatgaagtctatatgtatcctgttattttcaaccagatttcatctctttaagtctccaagactctctcaactcccactagaatcactggcactcatttgaattgggttttaatttgtttgaaaacaaagatgaacaatttgaacatgaacaatttgaaaccatcattcttgagctctgatgggagtttgtctgttcatgctgttacgttatctacgtccattattgttcctttatgattaattgttctttatttgcttttttggtcacctcgtaattactaataattaatttgttgtaaacaaaatctatgatatttcttttgatctatatgaaaacaatcggataacctcataaccatatatttacagaatataaaaaagctttggtattgttttcagatttcataaaaaaagtgtgcctttaaagatagcagtcaatattaatgaaattacacaatagcaacaatctttgttttactctaaaaatatgagaacttttgttgttggctagaatccatttttactagtcaagtaatacgtaaatggctaaatgctactagttagttgccaaaaatttagatactaataggaaaaatgctttttgcaagttactaaattatatatttacttaagaaaatacatttctcaatattttttattttattttattccaccatcacacctgtactcttttggaaagagtgttcttctatcactttcagtcatattttttttgggttaagttgcaaactactcactttccaaaacttaattatgaaatagggcaggttactatttataattggagatttagccacttccttatgaccccacaaatcagaaaatcaattataccccatggtaacaactttatttaccaacatgccactattatgacatgtagaagagagggtaagagagaaatgtgggtgagattttttatttaattttctttttctttctttactacatttcattctttcaaagattaataattaaaatgttcatttgtaaattttatttttctaaaattgatcatataaataaaaatctatgtttttttatctatcatttgatatgcattttgtttattgatttttaatttttatattacagaacactgtacatataataactatacaaatatagaccactgtaacgatataaactactgtacagatatagaccactgtacagaatgatgcatttataaagaaaaaatattagttcgtataatagtaaattatgatttcgttaaacacatgcatcattctgtacaatgctctatatctgtacagtggtgtatatctgtacaatagtctacgtatgtacatttgtctatatatatacagtagtatatatctaagaaaatttcaaaaacgtattagtttccgaacaaatatctttctgtacaaatgcatcattttgtattgtggtttatatctgtagagtaattgatatctgtacagtagtgtatatctgtacagtggtgtatatctatgtaaatattatttgtatagtattcaatagtataaaatttaaaaatcattaaacaaaatgcatattaaatgatagagaaaaagacatagatttttatttatatgatcaattttagaaaaataaaatttaaaactaagcattttaattactaaactttgagggaatgaaatataataaagaaagaaaataaaaatttaaaaaaaaaactgacacacatcacacatctctcagacgctttatctattcctctttctttctctcctcagccaaagaggttccttgataattttcaaaattcttccactatcccacctctacttctattagccaccttatacacatgagaaacccggactaaccagtcctttgagaggaagccatggcacaaacgtaccaggaatgccagcggatgcgcctcgctcatcactttcagtcatattgaaaaacaaagacatttttttgttctttcctttattgatacactaaataaatttcccactttaattaataaactaaataatatggataaaattaagatatatttataaaatattcaaataaactacgacactttgtttttgtgattgtgaaacaaaataaagtaagaaacatgcaaatattaaaagaaaatgcaagtaaccaacgtttcgtaaccagagaatcagaggtaaataggatttgttgtgggtttaatggttttcaattaggtgaaagattacgtcgtgatatgaagacgagttcgatcacgacccttgtagtcaacacaacgacctacttcttcaaagatactaccgagctaatcgacttcaaggtccgtttatatatgcttctagttaaaaattgtaaatggtgtgttcctttgactgagttaatcaactatagggtttacaaatataagtctactttcaattttgtaggaaaaacggattgacttgtatgagtatgctcgttatggaaacccaacaactatggcactcgaagaaaagattaggtatatctttctcttgatgtctttgtttactgtctctctatatcatgagttttgtaagttgttccattttatgctcagtgtacttgaaggggctgaatcaactttggtaatggcatcggggatgtatgcaagtaatgttatgcttttggctttggttcctacaaatggacatattgtggcaactaaagattgttacaaggagacaaggattttcatggagaattttcttactaaactgggaatcactgtaagaaaatctcaattcataactttcattttgtttcctttccagctccatcgattaacactttgttatatatatgtgtgtgtgtgtgtgtgtgttaatgtctccaggtaacttttattgactctgatgatattgcggggctccaaactcttgttaataaccatgaggtattttaagtgataattataagttcacttagtaactttaaagctggtaagcaatatatgaacttgtgatcttttgtttttcaggtttctttgttctttaccgagtccccaacaaatccatttcttcgatgtgtagatattaagttagtttcaaaaatctgtcatagaagaggaactcttgtttgtatagacgctaccattgcaacacctatcaatcaaaagacacttgctcttggtgctgatcttgttcaccattctgctactaagtacattggaggccacaacgatgtgcgtaaatcagaatgtgtaaccttattattccttggaaaaatggttatcgaagaatgatttatttgttccatgtgtcttctcagtttctagctggaagcatatccggttcaatggagttggtttccaagattcgcaatttgcataagcttttgggaggcacgcttaatccggttagaatgattgatcctcctcgaatgatatgactttgtaaatgtgttgaaatttcagtttttgtcggtttggttttttattagacaattttggttcacattcttctttttagatttagctaggatcggtcctattattcaacctttggataattggttctttgtaaaaagcagaacgctgcatatttactcatacgaggcatgaagacgatgcatcttcgtgtaagacaacagaattcaaccggtatgaagatggcccaagtgttagaagcacatcccaaggtactatatttttcatcaagatcctttctttctttttgtttacacattagttatctattggtacgtaaaattgataaaagagataagacagatttatgattgagtttttcgttaatcactcataatcatttacttgtgggcaagatacataaaagaagaagaagcttacgaggtttcttgccaagcaagtaataaaatgaaaacgaccttaaagagaaactagaagaagatattattgaattaatttgggatatatcttacaaatgatcaagaatcccctatttatacatgcacgtagacaattaaggatcaaacatatataaaaacatcataacgttgcttcataattttcctttcagtttgaaatagatcatcatatcttattagaaaagggttcaatataatcgtgttaggtgagtcgcgtttactatctaggccttccgagtcatcccgaacatttaatagccaagcgacaaatgactggtattggtggcctgatctctttcgaggtaagaaataataaaactccatcgatccaagaaactatattactaataataatctaaagatgtctttgttctttcacgaaaatagattgatggagatctcaagactacaatcaagttcatcgatgctctgaagatcccttaccttgcagcatcgtttggtggatgcgagagcctcgtggaccaactcgccacagggatctggtatatatgattttccactaaaacattgataattttgtttattttggttacataataaaaacgtatttggtgtttgatttagggatataccacgagaagaaaggcttaaagatggattccaagacaacctagttcgcttcagttttggtattgaagactttgaggacatcaaggctgacgttctccaagctcttgaaaccatctgaacatgttggctttatttttataaaaccaagttgcttcccgtttcttctcttttattgtgacaaaagttctttgaaataaataatttacataataataacaatctcaataaatgtcttttgcaactgtaaatcacaatccttaagtaaatataattttttgttacaacatatatcttacaattggatttttcttagaaagatgcaatccgtataaatattttttacgattatgtaactcttcataaacagttgtaaatattaagttgaaccattgaaacttttaatatattttatgatccttgtaacttttaattatctacagttttatgatgcttttatatatgtgtgatcctaacatacacgtagacaaattttgttttattttatttagttcagatgatggtaacgtaaatgtataaagacaaacaacaagcattagtcgtctagtggttgtattgtagcctgccacttgacagtccagggttcgattcccggatggtgcacatgagctgtgatgaaattggcttcagcgttggttgggtccttcgcattattctgattactcagataaaattgccacacttctgagctcaatttttcttttaaagaatttattttctttcaaatttcttataaaatatctaaatcccataaaaacttgtcaaattcaataaatattcgctgaaaccatgtgcgaatgttgcacacatagttaccgtaattcaggatctttataaaggcagtaatcatatatatgaaaattggccaactctctctatatgagtgacaaatcatcacactagtgagtgccacatgtcattctaaattaatatcattaaaaaaataactaaacttagtgataaaaatttaaaagtttcacagtgcattaaatcatccattaatctcactcttaacaaaatatcttcatttaaaagaaaaaatacaaaaaatcatgttaatgtatcaaactattttcattttacttttcttattttgctatttttataatagtcattactcgataatgactagaaattttcgtgtattacaatttaattatttgctatttaaccttttttagtttagtaattttaacttagcctttttttttattatattttttggtttacatgatatggtatttttgtttgtttatgataaattagtaacattaataatgacatgcatattttatgggatgcattttatactagatgcaaaatgatactattgtacccaatgtaaatagataaatgaattttgagatgcaataaaagtttgttatcgccaaaaaaaaaatttcgttattcataaaaaaaaacatttccaataaaatcgacaagtagcatcggtaacccaaaacaaaagaaaaactcaactgaaaaaatgaagtcacttaaatgggccaagcccagtgtatggatagtttctaatgggctgggctgggctgggccaacgatacgtcatcacctcgaaaccaatcccgtcgcggtggttcttctgccatggcgatcatggccgttgccgctctctttcacgcccgcttccctcttctcctccgtcgcagtatcccgttactgtcggctcctacttctgttatttacaatcacagaactcttctatccgatggactcagtactcgattatgctcgattctccgttattcatcgtctgacggcgtcaacggcggaagtagcggtggcgatttcggtaacgataacgattccgttagtgttgtttcggatgttcagagtcctaattacttaaaattcaccgatgaagaattgatgaagcaatgtagattagagacatttagagtttcaggacctggaggacaacaccggaacaagcgtgactccgccgtgcgtctgaaacatctccccaccggaatcgtagctcaagccgtcgaagatcgttcacagcacaagaaccgtgcttctgctctaaaccgtcttcgtacgctcctcgccattaaaggtctcaatcccattctctctcaatttcgttcttttgaactttgaactttgaaaaattgattctagttttgcctttttccagtgagaaacaaagtggacattgaagcttatgctcctcctccagagcttcttcagattctacctcctaagtctaccattagaacttcttctggttcacagattggtcccaacaatcctaaatttgtacctgtatgtatcactctctttctccctctctttctcttagctgctcatttactcaagtacacacttgtttgttgcctacagggaatgcaagctttgcttgatgttatttctgcttctgacggttctatcgctgattctgccaaattgctggggtaacaaatccttcttgaacctgtgtatttgtcttttgcttaactttgagttatcttgttatgtggtttttcagtttgagcactggtggcttatctcgtttgatactctcccatgatggtcttcgtatggctgtcaatagcatgagagcagccaaggtactgtttgttgattaccaatccaaatactttgttatcaagattatgccaataaggtagtcatagcttaaagtgtttctcctttttcattgaaaggtcctgctttttaaattgtttaggcttttatcttgggcaacgaaacaatctgaaaccatgtttacaatttttgttttagtagctgttgcttagtttggtatatcatcactgttggaactttcaacatgctaactagtttctaaagaacttttttctctgagctttcagggaataaagcctctcaaatagttgggatgtatcggcatttgaaagatgacgttcgggccttcgacaagttgtatgtggattgcagcacagtgattaccattttatgcaccatattttgtatacaaaaaaaaaggtgaaatgttgagttcagtttaacatttgttcttctaacatcataaaaatagtcacgtatttgagatgatatactataggttgttcaaatggttactgttgtgattgttgttggaagctaatacagttggaaacatggtggattatattaattattctttctgcttttgttcttgttttctcttcatttaaggaattaaatttcgctggtagagtacgtggaagtggcaatctggtatgtttttgcatttcagagcttttatggtagactctataagggcttgtaccttgcatgcaagtttcgttatcaattgctagatacttgcggtgagggtatctccattttggagatatgaaaattgctttgtgatatagcaatgtagagttgactcttgttaatcaaacaaccctagtgcctttatggcttagtatgcatcagtttcttttcttttcttctattagccacagactacagtgagtgtatttacacgtttacaacacacttaacatttcagtcaataaaatgaagaagaacaggtcagtgcctgcaggaatgttctcaggtatattggacattgaaaatagcaaaagagtttgatgcaggagaatcagattcttgtagaatgaggttcttttcttccccacacaggaaaagaaataacttttatggagttgactcttgagagaaatgttgtttattcatttttatctagaaaacaacaggagttagagcctcgtgggtgcattctgactcactcctgatatattttaaacatggatctgaattctgaaggtctgctcgagagttcttgacttctgacgaagtgaacaacgacaattcgccttcattccctcttatctctgcctctggtatgaatcttatgattctaacaacggattagtatagtgaataatcagctttggtaatcatgttgatgccatagttactctgctctcaaaaaagaaatgtttgatgtttttctggacgttctattttagtcataaagcactagcagcatctctctaaagtgactttgactttcgttaggactaggccctgtttaatatacactatttgcaaggataattccttactttaagttttaaagaaaatatctgattcctcaccaccatttcttggggtttctatttcttttattggcaactttctcctcttggccctcatgtctaattgtatatatatagacatcattacagaaacagtttcttataagatttccaacatccaatagtgtcatttttagtctgtagatatcaatgaggcttgatttatctgccaagtttcggcaagttcttggtcttgccaaagatcatgcatctattggcagagctattgtacaaaactacaatgaaaaagccttttttgacattgaagtggcagtggttcgagccactagccatgatgattgtcctgttgatgataaaaccatgcacgagatactcttccttgtctctaacacaccgggatcgattccttttcttgctgaacagatctctcgccgtctagccaagacaagagattgcttagtcgcgggtaaaacactgttactctttcaccgtctcttgcgtggtagcagtcgcagtatcgagcagcaattgcatattgcacacacatctggtcatcttcaaataggttgctcctggttcatgatgagcctggattctcgatcctttgtttttctgcagaactatgtagcttatctccaagaaagagttggatggatcatcaaccaagctggtaagctcgaacccgtaatgtctggtggtacaaagtttagccgttacaaagagaaatccatggatctggtgttccacatcttaccaaagtgtcaagagtttattgcacaggtgttgaagtgttcaccagttgatgcctggcctatcgataatctggttcaggcagctacgggcaacatcttgaaagagagtttccaagtctacatgacgtattccgatgggatgaccgcgctggttagcatgctctttgatctttcaagacccgcgagagatttagcttgcggaatgttgagaaaagcttctcaacagattcaagatcttcgcatcctgtatgacaagtgtagaggattcgccgggatgaaaagcttggattacccatctgtgcaagccatttctatggatcatatagtagcactagaggaatgctcaagctatggaggcaaaagaggtttctctctttccaccaacctaagagatgcaatcacctgcaatgaactaaaacaagaacagcattctgccagtttttcatctaccagtcctttctcattaccagtggagaccaaaattagcatggtttgggttgtttttgacaatgaagatggtgaagaatcagacaagcaaacagagaaagcatatgaacgttgatcattcatctcaacaggaagtgtctggaacgattatataatactaatgtagtgatgttgtcaatttacacggggtttaccggattttatacgataatttagcgcatatttaagaatcctctctgggtttatgcagtggttttgctgcatatttccagtgtcacaagtgttacgagcatctgaattgtaaaacaaatgtcataagtacttcaaaccattggtacaccttctgattctaaaaaattgccgctccatggatcaacagaaagagatttgttttgtctttgagtattgtttggaccacacaatgcagaaataagacaatagggcctgattagaaaactagaatcatcggcccattttgtattgggtcttctacatacactatagattgacatgaagtgtctggaactggaacagtacagaagacccttgaattctcaaaccaagcttatgtgtagaccattctcaatttctctgtcaagaatctgtgtcactattcacttcattacacgcatatatatattcaccagagacttgcaccttaaccttcatagagaagaaaactacaacaaaggtcatcaccagaggcttgataatgtggatctggactctgtcaaggccaaacttgaaaacggtgcctcaccattaccatcagtaagctttcccaagacaaagtcaaaggtccaagggttgttgatattgcgttcgaagaggatcaaactggcaaagtcagttctgcttagtcacaaaagaactatggttgaatcaagacccgtgtttaatgtctgtagaatctatgtaatctcgttctacacgcgaatatattctgtaacaaagtctctatattgcgtgccttgtttattgatcattctcaataaagatacatgaggaaagtgttagaaaactaaaagatcataattaaatagtactaatgcttggcgtaagagacttcctcttctcgaatgtttgattgtccatggacctgtaaactaaaagttttttgctggaatcacagaaagaaaccacgtgatagcatgttagaaaggaatggcaagacttactttctaatcaagcaacatgttgtttgctggcttatcacgtactagttcctcttcttacagtacaacaaaattaccgtaccagcatttgtgtatcagaaacaaagtatgtaacctgtgtagatcaatgaagaaaatgcctgcttttctctgaagccatacatattgcaaaccaacaatttcgcacgaagctcgctgttataaagcagagtgcagctgtgtcaagtcatatagagaaactaggaccttccaaaagtgtcagaaagagatcagactgtcaagtatcatgtatatctcctcagtctccggatgtgatttgtcaagagagtagaactgatggacctcgttatcgatctcaatccgactccagcctggtggtttataagcattttggtgcttgatcatctttctagctctacgtgcctcttcccaattacccatctctccatataaatttgccatcatagcgacataacctccattattaggatttaaagcaaccaggttttttacagcaacttcagccaaatccagatggccatgtatcttacaagcattaagcagtgatccccaaatagcctcatccgctttcatcttcatcgtggacataacttctaaagcttcatcaaaccgacctgccctgcctaaaagatctattagacagccataatgctcaatccttggctcaataccgaatctgtttgtcatcagatcgaaataacctcggccttttgataccaaacctccatgagtacacgcattgagaagaccgatgaaagtaatgtgatctggtttgatatcgttaatgttcaacttcatcatttcttcaaacacagctatggcttcttcacttctaccatggagtgcaaagcaattgatcatagaattccaagctgttaaacttttcttggatgccatcttaaaaacagagcttgcttcctccaagttaccacattttccatacaagtcaactaaagaattcgaaacaaacacatcagaagaaagatcacgacggtaagcaaaggcatgaatccctttagccagctgaagcgtaccagtttgagcacacgcagagaggacacaaactacagttacctcattaggacgaatgctaggctcattaatcatccttctaaacagagaaaccgcttcaagaaaaagaccattctgagtacaagcagcaagaatcgcattccaggaaggaacatcacgctcaggcatatcttcaaaaagagcaacagcattagagatatcaccagacctagcatacccagaaagcatagcagtccaagaaacaacatttctctcagacatttcgtcgaacagttgtcttgcaagagttatatgagaaacagaggaagcgtaggagtgaagaagagcagtttgaacaacgacatagagatgaaacccagatttaaacaaatgggtatgcaccaaaggagttgaaaaagcagaggagagatatggtgtagacttaagaacaagtgggtagataaagtgattaggccgaggaacagaacgattaaccatgagacgaaagaaggagaaagctgaagaagcatgaagaggaagagaagaagagtaagcagttaaaacggcagcgtaaagatgcgtattggggaaagagaaacgatcaaagataaagcgagcgtaagagagattacagagacgaagcgtacaaaaacgaagaagcttaaaacagaggaaatgtgaatgacttagtccagaaactatcataaaggactgaacttgcttcaaatgattcaaatgtctcgactttgatatcactgcggagatgaattgattcagtaactgctccgccatgtgtgacgacggcgcgtggaggtaagagaattgtgttacacgtgtccccatgtgctcttcttccaccaaacgtgaagagagagaagagagagagagagagagagagagagagagagagagagagagagagagagagagagagagagagagagagagagagagagagagagagagagagagagagatggataaaagtgtgtgtgcttcgtcttttttctctccgagtctatcgttttctttcttcactttctccgtttttatcgtttctcttcttcttctccaaattgatggctttttaaggtttccccactcgatctaatctaacctaacgctccttcattaactttcttcagacagattacaataacgtgtaatatacaagacacagaaacatcattgattccgatctcaagttttgtctttttgatttcatatacacagatacatagataacaaacacacatctttgatcaaatgtctggactttggagattgaggaatctaaagtctctagctttacatgctcgttcgatttcacctgtttccaatctttattctctggaattaggatcatgccctcgtcgtcgtattcaagaacgattcaaatcggaacaaggcggcggaggaggaggaggagatgattttccggttccggtgactcgtcggaagttaagagcagagccgaattgtcctcgttgctcaaagcaaatggatcttctcttctcaaatcgtcaatttccatcttctaatcttcttcaacgtcctgatgattctgattcctccggtgccggagataaaacgaacttccagtctgttaatttctgtccgacttgtaaaactgcttatggattcaaccctcgtggtgtctctcctcttcaagggacattcattgagatcggtcgtgttcaatctccaaccactactaccaccaatgctactacttccaaatccaccaggaaacaacaacaacattcaaaggatccaaatcaaggattcaattacaggaacaagcttagatcttccttttgggatacacttagatcttacggtgctgagccacctgaggattggtctcctcctcctcctcattctcctttgaactcttctcctcctaataccattcctgtgaacgcttctcctagtgccgtggatacttctcctttacctgatgcagttaatgacgttagtcgatggggtggtgctggccttggcagagactttcctactccaaaggagatttgtaaatggcttgacaagttcgtcattggccaaagccgggctaaaaaggttctgccttttcacttaacatctaagtattctgatcatggtcctgtgcttcatttgttacttatgacatggttgtcttgactttgatcctaggtgctctctgtcgctgtgtataatcattacaagagaatttatcatacctctatgaagaaagggttggttctctcactcatccattgtttattttcctggctttagttacatgattcagacgcattatcaccgttcaatccgttatggtttactctgatattgtggaccttgaatcctaggtcagcagcacaaccaattgatgatgacgataatgtagaattagataagagcaatgttctcttgatggggcctactggctctggtatgagcttttgtgttttcctgatcatattctattttttacttcccatttgcactctccctgctgacagtgacatgatagtttatttgattctttaacaatagggaagacattactcgcaaagactttggcgaggcttgtaaatgttccttttgtcattgctgatgcaactacactgactcaggtaagataatgattttctgtattcatataagctcatgattctcactacttcaatcattggctgcacatctttcaatggcttttgtggatccaagttaaatatacgcatagctcctggaattttgatttcgtatgttgctctttgacccagcttttgtatggtgtgttaacaggctggttatgtgggtgacgatgttgaatcaatccttcataagctactaacggtaccacttctaaataagccccgactaatattcccagcacaccttccatcttgttgcattttagaagattcccttatgacttgtaggtcgctgagttcaacgtgcaagcagcacaacagggaatagtctatattgatgaagttgataagataactaagaaggtcagtatgcaagacatgataacttctgaactcgataagaagaagataattgggctttatgcttcctggattctcctttctacaggctgagagtttaaacattagccgggatgtttctggggaaggtgttcaacaggcacttttgaaattactggaaggcactgtaagtggattgctttattaccctttgatgcatatactgaaataattcttcactagacatgagacacttgcatagcgagttatagtgaagtatctagaagtgatcctcattaaaaaaaggtctttgcaatgtacgacaagaaagaatggaaagtttattgatatgtttgatgtatgcgacattacatatgattactaatccatttacacatctgtgttacttctgaggggctttctctgaatggttgtggatccatgctttgcttatgcattgatcgttggatctttttttttttttttccagattgtaaatgttccagggaaaggtgcaagaaagcatccgcggggtgaccatatacaggtttagagctagaaatttgatcattgacctatattgcatctaaaggtgttgttttctcatattaatccattgctggatgtccctatgatgtacagatagacacaaaagatatcctatttatctgtggaggagcatttgttgaccttgagaagaccattgtggataggtaattcattattcgtccttttttttttttgcaatagattaggggttctgttttgacattgatcagcatctctaatgctctgccagacgacaagactcatcaattggttttggagctcctgttcgtgccaacatggctaccagtggagtgaccagtggtgcaataacttcatctttgctagaatcggtaaacactacatagttttgttaagcctagtgtaaacacttctcattcctggaaagagatcttagttttggaatgccggctgcatttcaggttgagagtgccgatctgacagcatatggccttataccggagtttgtaggacgctttcccatattagttagtttgtcagctctgacagaggaccagctcattcgggtactttaacattcttcatagcttttattttatcttgtagtggatggtgtgtttctttgattgctcatgtgcagctagtaaaatcaaagtgagatagtggttgctatcatcgagggcttgatttaattgctcttctcatatttaagggtagctaatatcacctttgctttttgccctgtaggtgcttgtagaacccaaaaatgctcttgggaaacagtacaagaaactatttagcatgaacaacgtaagctccttcaaaatattcagtgttttaagttcaaacttgaccttgtggtccctgactgcatgatctgttacaaaatttcaggtaaagctgcattttactgagaaagcgctggagataatatccaagcaagcaatggtgaaaaatacaggtgcgaggggactaagagccttacttgaaagcattcttaccgaagccatgtttgaggtaacttcagctaccacaaatattgttaaggtactaatataaatcttgctttcacacttctgtttgatttctcttttcagattccagatgataaaaagggagatgaaagaatcgatgcggttatagtagatgaggaatcaacaagctcagaagcgtctcgtggatgcacagcaaaaatacttagaggagacggtgctttcgagcgttacctcagcgagaacaagtcgaaagatgctacagaaccaatggtatgactgcaaacatcatctattgtagtcaatataaactccggttgtgtgtatgtaaacatcactagtctcattctgcatttggctatattgatcactgaaacggtgaaacctgatgggtgtaatttgcaggttgacgaaagagtaggctcggcgaaagcaatgagattgtaaagagaatgagagaagaagggttttaacatgaagagttttttttttattatttgtaaagaacgatagcattcataaaagtgcaagaggaatttatccactctgtacaataaaatgttagcttacagattcgaaagctgaattgttgttacatagaaagaaaagaataggatcggtgtaaaaacaacatttttgtaactctctctgtttcaaaataacaaaagtgttattagtttgtcagttcatgttattacaacattttttagtcaatctcgataatgtatccattagttaggaccccaacagctcaagaacataaccgttctaagtgactcttcagattgctttgacttgtcatcatccttactagaagcgacggcgatggatgaaaagaatctgatagcctcagaagcggatctcatgttgttacggatacgttattcactgatcggatcaagtagttccaccgatacattcctaattggtccttggaagcttccacggctccgatgcttgcagctactaactatgctttgctcgttgaacagttgaactcatcttttttattagaaacaaaagcagagaaactatttgctttttgttttgttttgtatagattatgaatttgtgtttgtgaaaaatgttgatgaagaagatgagactctgattagtcttgttatataataagagaaagtagccgctagttaaagtctaaaaccagatcctttctcccactagtttttcccaggtttctattgtcttggtggtgaaattaccattatgtccacatgagaacaaactgaattaggggcactatcggctttacggaaactatgtgtgttcatgcgctactggtttccgtgattgtttttgagtttgacgagttttgtggaattttgatatctatataacatatttcaagtacaaattttctaattctaataggttcgggtataaaaaaaaaatcggatcggttttaatttaattttaatccgaaattcttcagtcggatatttcgttaaatttaatcaaaattcataacgaacttaatttttaaatctaaaaatatattttttcttaactaattactatatctattttttttatggtatattccttacaaatattatagttaaggaaatgaaatttgattatttaatgttaatataacaaatttgaaataatatcctaagacctacctctctatctaatttaaattaaaagatatgattatctttcatttttatttgattttatatttctattattttgaattatgaaaaagtatgtatagataataaattctttagcatatgatgtaattcaactttttttaaacgtacgtgtattactcaatctataaagaaaaaaaaatgcgtacaatacccacatctgagaaaagagagctcagaaatgtgacaatttcatctgagaaataagaataatgcgaaggacccaaccatcactactgccaatttcatcacagctcaactacaccgtctgggatcgaacccgggttagatagtggtagagtattaatctaccactgaaccattggtgctacttgttgtgtatgtatttaaatatgtgttaatattgtttgagcgaattcatcaatcatcaatcacctctcttcatgtaatttgttattataagtttggaagtaacaatctacatatacatttttgcagccattttatgaaataaatcctgtagttgggacttatttacaatggctgccactagattttaatgtttgttttttaaattagaaaaaaaaattttgattaaatatttgacatttaacaatcttccctaaatctctccacattaaatatacgattagttactaaaataaaacttccaaaatatttaatatcatttaattactacaaaattatcatttttgatattgcttttctccatgactataaaaattcgattataatcatcaaaccgcagagatatttgatagcatttaattactacaaaattacaaaatatttagacaataattcataaacatatcataaataaaatcaacattaataaaataaatggtttttttacgggacgggttggcgggacgggtttggcagtacgttacttaataacaattgtaaactataaaataaaaatattttatagatagataaaatttgcaaacttttatgtatactaactttaaaaaataaattgttcccgcagtgtaacgcgggttaaaatctagtggttttgtaaaattatagctaattcagccatgctcaaataaactagattttttttcctgaaatcactagaataaatcatttaaaagtaattagaggtgaactattcatataacaaagcttaagacttgttggtaggctgatctgaaaaaatcttgttgttctcttctcccgccccatctcatttttttcttttttattatttctctttaaaacttcccctcaaaatctaataattaaattactcatcaatgaaaatttgctttctaaaaaatttgaagtatataaaatctatgttttttttctataatttgacatgcattttcttaatgatttcaaatactttacatatacattttatgcgcatagtaaattaagtgtagatatgcttcgaaatatacacatttttatccgtacttcttattaagtgtataaatatatagaaatgtacacatttttatatgtaaagctcatttagtgtacataattatatcaaatatgtattcaaatatacacattttatctttacttcttatttagtgtacattaaatgagtgtaagaataaaattgtgtatatttatgagatttacaaatcacattatgtagctattcctctctaaaaatcaaatataacatttctactaccattaggattatttgttattaaacatgtgattaagtacttgagaggcatctaaatagtgtttaatagtgaaaactgggtattttgctaattttgagtagtaaagtgactatttaagtttttaaaattgggtattttgcaagttatcccaagaaaagaaattttaattttgtatgattttggtctcgtgttgtgtataaaacttttggaaggatacgaggttattcggctggtgttatgaatttctaaacgttttcattagtcaaagtgtcttgtatctcacagagtctaaatcatttttactatagattatctttcttaaatgttgtggaagctacttaccttctctaccataatagtgatctttgaagagacataagtgttttttttatgtgatgttcagtttgaattaggcaaatgaataattcatctagatttccagtgatatccaacaattacgagcttttagaggaaattggccatagtttgcaccgatcatgatgtattatccctctctcaagatgacatgtatattgaaatttaattcatgttgttaataaaagcatgaaattaacgatgaaacaaaaattttgtgaaaacatcaggtatttattgatatgttcagacatgtagcgtctttatcaaaccactagtaacttttttgatgaccttgagacaatcaaactcaagatgtttggttctctcatgatatcagggccgaccatgaaaatttgggtccaccaacaaataattttgaggttattacaaagatttagtaaattaaaggtttttaatgtataattaaataattaggggtcctattgcaaataagcttctgctgtagattttacaaaattttggaggccccaaagccaataatgctcaagttcataagaattaagaaagacactattaatgctcaagtttaacaatgacaactatggacggaaaactcaaatgcctttgatcgtagcttttgttctcaatcgatcaactaaaatttctctgatacacttttaagtttctaacaaaatttcctttcaaaatagaataaaaaagtttaaacacacttatctcctctaacttcttcgaacgtgagcttcctttagcattgtctgccaaaggtctttgacacgatgacgaaactttttctgaaaccaaacttcaatctctgaataaagcacattcggattctgttcccaattctttctcaaactctccaaagtatcaatcttcttctctgtcaaaaccatcaccaaactcccaactctttctaaaccccaagcttctctttccaacaacgtttcaggtttcccagccaacaaagccctgaagcttttcaaacaagttaatacctctccttgaagcaaagcgcatccgaaagccgctgctcggtctctatcctctgttattgccacactgtgagccggaagttcccaattatgaggaccgaaactcggaacgacccagcacaaaactctatcctcctcacttgagtaatatggtttcgggtccttgagcggtgcagagaacacgcagagagactttgcgtgcttcaccagccattctggcctcacccgagtcgctccgtgcatgtatggtctgttggtgagtaggagctcgctgtagaccaataactccggagctgagtttatgagagacgaccaacggtgcaagaaaacaggttcttgaaccgcacatgcttggtattctgtcgctctggtctttctggctacacggtctgcccatcccgcacatatggcttctcctaacagttcttcttcgttctgtagaagaggggtttttgaggaagtcgatgtggtgattctccatgacttctctacgtcttgtatagtcccatgagtccatgaaaagctgtcttcggtttcggagggcttacaacagttgaaaacaagtcgcaaaagctgatctttgagcttagacatctcgtccatggtcttcaaatgcaacccattcgcctcgcagaagcccatgccattctccgagacctcaaaggaatgcaatgcgtaagctacagtcaaagcatcgctgctcgggttggaaaatctgtcccgagcagctttaatcttctctttccgatcctttttccgttgtttatcttcttgtttgacggttttgtcagcatctttggactcgtttttcttctctccttcaaactccattatcaaagggtttggtaagctcaacgcggctactgctgcaaccgcatatccaaggatgagattcgcgcgtgagtaattccgggtctcttttagcatttggatgactgttagaagcattcttgagtgacgtggactcataggatagtgagacatagcctttcctaatggtgttaaccctccgttgctgtctagagcctctaaagcttttaggcatcgttctgcttctctaatagctgatggctcaggcggagttggaaacgggaaattctcaacctgttagcaatagaaaaacgcaaagattcatcaaaaagtcgagcgagacagaaaaggagatctagtccattgacaatggtggctacaaacattttacctttggaatgttcatagatttcatgagaagaatgactccatcaacaggaactttcatgatttcaggaagcgaagattcctcaaatatattgctaaaaactgcagatgaatagagacgataacagtgaccaggtccagttcgtccagctcttccagctcgttgactagccgaagcttggctaatccaatctacctcataactttccataccagtcttagaatcataattctttactttaacccgacctgtatcaaccacatactttataccaggaatagtcagagaagtttccgctacattagtcgccacaaccacaagtctttcttctttctcaacttcctcaaacactcgaagctgtgcagctggagatagcatagcataaagtggaagaacacgtaattttcctggagaaaacttgttttttacctgctcagcctcttgattctctgctgcaatggactttgccggctcagcagatacggatccatttttgtctgccaaagcattaaacgctgctcggagagcatcaagcttcccttcctctacaaatgaacttgcaaagccgtcatcaacagtttcccagtccctgtcttcatcagactcatacatgtcttcctcttcaaaatcatcatcatagttaccatcaccaatatcagaaggatcttctccatgcgagctaaacctggaattttgattgttggagtcatcatcaaatgcttcagcaatctccttcatgtcaacaccaccaaatgaaccatcatcgcatttcttcttcacataagcatctcttttagcagcttgaacaacaagttcctttgaagacttacgtaacttctcacataaatagtcaacttctctctgcccagtcacaaaaacaagtattcctccttgtggtaactttttgtgaattgacatcactttcttataagcttcacctatataatcaacaatctcagtcttcttggagaaatgtatagttactggatactgtcgagtgggaacctctataagaggaggtatattagggaataaccttttccccgatacaaaatcttccactcgcaaagtcgcactcatcaatataagtttaagtggcgtgatttggcattctgaggttactgtgcctccagattgaagactcttttgttgttcctcgtagtattcctgtcggattttgatgactcgagtgagcatcccaattagaatgtctgtgttcaagcttctttcatgggcttcatcgagaataatcacagagtaacgcctcaataagaagtcattctgcagcagaagaacttatacaatcaagtaaccatgataaaaatggaaaagaatgtacaaaacaaaccaggcgaaaaaccgtcaattacctgtatctcacgaagtaaaatcccatcggtcataaacttgatagaggagttttcgccaatctttttgtcgtacctaacttgaaacccaacctctttaccaagacgaacaccaagctcaaatgccactctcttggcagtggcaagaacggcgacacggcgtggttgggtaatcccgataatcccacttcgagaactgaattgctttgaaccaaaaccagcttcataaaggaactgaaggattcagaaacaaaaacagggttagataaagaaaggactttctaactgagaccaaaactcagctatcagaaaaccgttacaaatgcagcaaactgacctgaggaacttgagtggttttaccacacccagtttgtcctgaaataataactgcagggtgacgattaatagcttccattatctcctgctccatcattactattggaagatccttcctcgtctcttcaacttcggctggtcttgaaacatgaactacaaacgcgggcacacgaggtccttgtacagttacatcttcattctcaatgagcccatcctgtttcataataaacccattagaaacaatcaaatcaaatatataaggcagcaataatagctcaatcaaaaaaaaaaaaaaacatcaaattttcagagttgacaaaccattgagtcttcatcatcatcacgacaagttgtcagtgggatcatatccacagtgtcgtctacctcaagcttgctactactttcttcagcagaaatcattagatcagcatgaaccagttgctgctcagaatcagttacaaaagttggagtttcaatttcaacatgttccggtgttgtaggttcatccatacaagaatcatcatcattgtcattttgctcgactgattcatcagaatgctcagtctcaacaccagctttagaaagttgcattgctctccttcttttttccagcttagtagctgactgagtaaaagattaaccaccaaagaagaatcagaacatctgtaagaaatcgtaatgtaagaacaaagaaagaaaatttcttactcttcctataacttttgatgattgtaatagcgacgatacatcctcagatattttgtacttgctgtaaaaattcaataccaaattcattcatataaagaaaacaaacaaacaaagaaaatcatatatttgaatgaagcgttgaacatactctaacaactcggcagtttttgaaaagaggatttctttctccttatcttcctccaatttcttcagcttccgtttctgagatttgcacgctaccgtgtttacatttgaattcagtttccgtttccgagatttcttcgatcccgtgttattatttgaattcagcttatcctgcatctgtccaccatgaaaacaaaatttccaaatctcatcagcgttaaaaaacctcaaaatcttattgaagaatggtttgattagagctaataccttattggatcctttattcttcttcttcctaggaggcattacatctaaattgcaatcatctcccaccacacttgccataatcgtaccaattatatcaactagaaaacaaaaactgtttgtctactcagggatcttcagacaacctgacacagaagagagataaacttaaaggggattctgattaacaacaaccactttgtttctacacacaaaaaaaaacactcaggtcttaaaatcaaacaaaactaattgattcaacaactggaaacactttacaatccctcaaagagatatagctttcaaattcataattagaatggagttttcactcaaaagctatgtaattctcgccgaaatcacaacaagggacatcaaatttttgcttcccacagattacactaaacccaaaaccgaaatccgtaataacgatgaaacaagcatgcatttactcaaatttaaagcgaactctaaacccaagttatgtcataagaaacgatcatgtgggttacaaagaagatcgagagagagactgggtaaaacctttgacaattcgattctacttgtcgagcttgtcgtgtctacgccgtttggctcggagaaggttgaaattcgtgtgttcgtctgtcgttttggaacttttttggttggagactaaaatatttgcccaaatcgtcgtcgttttgcaaaagtaaaaccttagtcccaaaaacttgttaaaaccctaagtcaaagaaagtacgtcgttcggacagggaaaaagaaaggcttaagagtgtacaaactaaaccggacacaaactaaaccggcctaatatttttgtattaacaaagctattatattatacaacagaaattcttgggttaagaagttgacaaattcacagctttggcagtttcttgcttaagacatgggagataagagaagagagtctcagcatgtgacccgtaatactttgagaatatctgagacgatctctttgtagtgtcccaagctccactggaatcacctgatgcaagctgaatcgacgcaagctt

SEQ ID NO: 1162 - DNA, 97242 bp, Arabidopsis thaliana
gaattccatctcttgaaacacaactcatgcgtagttcctttttcgctgtcgaacaccgtgattgttaacccatgaattgtctttgtcttcaactaaattgatctgttcttctgtgaagtatttcagaatatgctcattcatggattccttaggtatttgacgtcccacgtcgctcttagtgagtgttttcctgatatcccatatatctggctctctgtggacagttaattctgttgatacaatctctatgcctctcttcctttgacatgtttctcaagtgtgcgagatgactacttcagaatctatggagagagttaattctgttgatactttatttgcattctttatcccccttgacatgcttcttaagtatcggagactaacttctctttcgtttcttggggtagatggaaccgcacgggccaaatctccactttgacaagaaaagagattgaaaagacatggcgttgttggagtgataacggaaaacagagtaacgaaatagaatacttcgattaatgaaaatgacagattgatacaatgttcataaaacacgatatcaacttctcatctacaagagttcaacatgaaactccggcgaacgatgaggaatgattctctctgagaatccaaaaggaaacgataaacaacaaatccaaaatcttcatattcttctgcaaatgatcctcattagctatatattctcgattcttcctctaacactcccatcgaccaatcttctcttgccacgtctcacagctactgtctccactcatgtattgccccgtatctaaccatatatcaatgcctagtttcctatatcatggagacgatggaagagtatcttcagtgttcattaccattccttcgtttcttgtatcacaagacaccatatttgccaatccttcaccgtggtacggaaagagaggcattgtaggagacaaaagcaaaaaagctttttatatagacaaatacgaacttcacaatactatttggcaaaggtattcacaatccaaatgtgtgtcgaagatggatatatttaacaattaatatcccaatttgtgaaggaaaatagattcttgtcaaaaaatccaacaaaatattttttattgttgtaccgaaaaaaaaaaawatatatatatatatatatatatatatatatatatatatatatatttagtgagagattatcttagatttacattcgagaaacctccacaaatatgcacatttacgggaaaagtattttcaatattggttatttagtcctaataaaaccaatcattccatacttgttaagctagtcatgtactcatgtggtcaattcctataggttgcatggccattagggagagtcactaagctaacatacatggacactctgtccaagttactgatgatgtatcaaatgagaaagaggtgtattgtctcatggatggacatatatatgtctattatgtcccatgaacagaactaagtctcatctctccgccctgtcgttttcacccagattttatctctctaagtctccaagactctctcaattcccattagaatcactggcactactcatttgaattgatttgtgctgaaaaaaaagatggaggacatgaacaatttcaagccctcagtcttgagctctgatgggagtttggctgttcatgctggtacgttacgttatctgttttttctttgtcacctcgtaattactagtaatttgttgtagggctttacaaaaactatagtatttgtttttatctaatttgaaaacaatcgaataaatgtaaaattttcagaactgaaaaagcattggtattgtcttatttttttgaattcatggaagaattgtttatatgaatgatctaagtgttggaagtaaacatcgtacactttacatttgtacactaaaagtgttatacaatctaaatgtacgaatcaaacagtgaaaagtgactactttgcaaattgtgaatagtaaagtgattacttttccaattaagtttgaaaatgactattttgccaacacaccctttttgggtataaataattttacaaacaatgaaatttctgttcaatttaaataattggttttaataatttataatttgattataatatatttacatttgtatatgttaatatcaaatagcttattgtttcgctggttgtttcaactaatctacatctttaatgattgatattattcaatcacccatcttctcagcatgaggaaatttatatatatacatgcatagagtataataatagaacgctggtccggtcatatacatgcttcttgttaaagaactagaaaagttcattactcgaaaacgagaacataacagagaaaccgagacgatcaaagacaaaatgtcttatgaatatttaaaggaaaagaaaactcctaattaagtagctctgagtacgtaaaagacaaaagaatgacaactgatttaggaaatttcttaagttattgtcgaattaggtgtcatttaataatgtgcatggccattaaggagagttgttaagctaattctggatgtgttttgttgtcctatggatgtgttgtgttgtgttgtgttcgttagtgatccaaataaaaaagacaagaaagagttatgtcttatggatggacatatatgtgtccattatgtctcatgaagtctatatgtatcctgttattttcaaccagatttcatctctttaagtctccaagactctctcaactcccactagaatcactggcactcatttgaattgggttttaatttgtttgaaaacaaagatgaacaatttgaacatgaacaatttgaaaccatcattcttgagctctgatgggagtttgtctgttcatgctgttacgttatctacgtccattattgttcctttatgattaattgttctttatttgcttttttggtcacctcgtaattactaataattaatttgttgtaaacaaaatctatgatatttcttttgatctatatgaaaacaatcggataacctcataaccatatatttacagaatataaaaaagctttggtattgttttcagatttcataaaaaaagtgtgcctttaaagatagcagtcaatattaatgaaattacacaatagcaacaatctttgttttactctaaaaatatgagaacttttgttgttggctagaatccatttttactagtcaagtaatacgtaaatggctaaatgctactagttagttgccaaaaatttagatactaataggaaaaatgctttttgcaagttactaaattatatatttacttaagaaaatacatttctcaatattttttattttattttattccaccatcacacctgtactcttttggaaagagtgttcttctatcactttcagtcatattttttttgggttaagttgcaaactactcactttccaaaacttaattatgaaatagggcaggttactatttataattggagatttagccacttccttatgaccccacaaatcagaaaatcaattataccccatggtaacaactttatttaccaacatgccactattatgacatgtagaagagagggtaagagagaaatgtgggtgagattttttatttaattttctttttctttctttactacatttcattctttcaaagattaataattaaaatgttcatttgtaaattttatttttctaaaattgatcatataaataaaaatctatgtttttttatctatcatttgatatgcattttgtttattgatttttaatttttatattacagaacactgtacatataataactatacaaatatagaccactgtaacgatataaactactgtacagatatagaccactgtacagaatgatgcatttataaagaaaaaatattagttcgtataatagtaaattatgatttcgttaaacacatgcatcattctgtacaatgctctatatctgtacagtggtgtatatctgtacaatagtctacgtatgtacatttgtctatatatatacagtagtatatatctaagaaaatttcaaaaacgtattagtttccgaacaaatatctttctgtacaaatgcatcattttgtattgtggtttatatctgtagagtaattgatatctgtacagtagtgtatatctgtacagtggtgtatatctatgtaaatattatttgtatagtattcaatagtataaaatttaaaaatcattaaacaaaatgcatattaaatgatagagaaaaagacatagatttttatttatatgatcaattttagaaaaataaaatttaaaactaagcattttaattactaaactttgagggaatgaaatataataaagaaagaaaataaaaatttaaaaaaaaaactgacacacatcacacatctctcagacgctttatctattcctctttctttctctcctcagccaaagaggttccttgataattttcaaaattcttccactatcccacctctacttctattagccaccttatacacatgagaaacccggactaaccagtcctttgagaggaagccatggcacaaacgtaccaggaatgccagcggatgcgcctcgctcatcactttcagtcatattgaaaaacaaagacatttttttgttctttcctttattgatacactaaataaatttcccactttaattaataaactaaataatatggataaaattaagatatatttataaaatattcaaataaactacgacactttgtttttgtgattgtgaaacaaaataaagtaagaaacatgcaaatattaaaagaaaatgcaagtaaccaacgtttcgtaaccagagaatcagaggtaaataggatttgttgtgggtttaatggttttcaattaggtgaaagattacgtcgtgatatgaagacgagttcgatcacgacccttgtagtcaacacaacgacctacttcttcaaagatactaccgagctaatcgacttcaaggtccgtttatatatgcttctagttaaaaattgtaaatggtgtgttcctttgactgagttaatcaactatagggtttacaaatataagtctactttcaattttgtaggaaaaacggattgacttgtatgagtatgctcgttatggaaacccaacaactatggcactcgaagaaaagattaggtatatctttctcttgatgtctttgtttactgtctctctatatcatgagttttgtaagttgttccattttatgctcagtgtacttgaaggggctgaatcaactttggtaatggcatcggggatgtatgcaagtaatgttatgcttttggctttggttcctacaaatggacatattgtggcaactaaagattgttacaaggagacaaggattttcatggagaattttcttactaaactgggaatcactgtaagaaaatctcaattcataactttcattttgtttcctttccagctccatcgattaacactttgttatatatatgtgtgtgtgtgtgtgtgtgttaatgtctccaggtaacttttattgactctgatgatattgcggggctccaaactcttgttaataaccatgaggtattttaagtgataattataagttcacttagtaactttaaagctggtaagcaatatatgaacttgtgatcttttgtttttcaggtttctttgttctttaccgagtccccaacaaatccatttcttcgatgtgtagatattaagttagtttcaaaaatctgtcatagaagaggaactcttgtttgtatagacgctaccattgcaacacctatcaatcaaaagacacttgctcttggtgctgatcttgttcaccattctgctactaagtacattggaggccacaacgatgtgcgtaaatcagaatgtgtaaccttattattccttggaaaaatggttatcgaagaatgatttatttgttccatgtgtcttctcagtttctagctggaagcatatccggttcaatggagttggtttccaagattcgcaatttgcataagcttttgggaggcacgcttaatccggttagaatgattgatcctcctcgaatgatatgactttgtaaatgtgttgaaatttcagtttttgtcggtttggttttttattagacaattttggttcacattcttctttttagatttagctaggatcggtcctattattcaacctttggataattggttctttgtaaaaagcagaacgctgcatatttactcatacgaggcatgaagacgatgcatcttcgtgtaagacaacagaattcaaccggtatgaagatggcccaagtgttagaagcacatcccaaggtactatatttttcatcaagatcctttctttctttttgtttacacattagttatctattggtacgtaaaattgataaaagagataagacagatttatgattgagtttttcgttaatcactcataatcatttacttgtgggcaagatacataaaagaagaagaagcttacgaggtttcttgccaagcaagtaataaaatgaaaacgaccttaaagagaaactagaagaagatattattgaattaatttgggatatatcttacaaatgatcaagaatcccctatttatacatgcacgtagacaattaaggatcaaacatatataaaaacatcataacgttgcttcataattttcctttcagtttgaaatagatcatcatatcttattagaaaagggttcaatataatcgtgttaggtgagtcgcgtttactatctaggccttccgagtcatcccgaacatttaatagccaagcgacaaatgactggtattggtggcctgatctctttcgaggtaagaaataataaaactccatcgatccaagaaactatattactaataataatctaaagatgtctttgttctttcacgaaaatagattgatggagatctcaagactacaatcaagttcatcgatgctctgaagatcccttaccttgcagcatcgtttggtggatgcgagagcctcgtggaccaactcgccacagggatctggtatatatgattttccactaaaacattgataattttgtttattttggttacataataaaaacgtatttggtgtttgatttagggatataccacgagaagaaaggcttaaagatggattccaagacaacctagttcgcttcagttttggtattgaagactttgaggacatcaaggctgacgttctccaagctcttgaaaccatctgaacatgktggctttatttttataaaaccaagttgcttcccgtttcttctcttttattgtgacaaaagttctttgaaataaataattyacataataatamcaatctcaataaatgtcttttgcaactgtaaatcacaatccttaagtaaatataattttttgttacaacatatatcttacaattggatttttcttagaaagatgcaatccgtataaatattttttacgattatgtaactcttcataaacagttgtaaatattaagttgaaccattgaaacttttaatatattttatgatccttgtaacttttaattatctacagttttatgatgcttttatatatgtgtgatcctaacatacacgtagacaaattttgttttattttatttagttcagatgatggtaacgtaaatgtataaagacaaacaacaagcattagtcgtctagtggttgtattgtagcctgccacttgacagtccagggttcgattcccggatggtgcacatgagctgtgatgaaattggcttcagcgttggttgggtccttcgcattattctgattactcagataaaattgccacacttctgagctcaatttttcttttaaagaatttattttctttcaaatttcttataaaatatctaaatcccataaaaacttgtcaaattcaataaatattcgctgaaaccatgtgcgaatgttgcacacatagttaccgtaattcaggatctttataaaggcagtaatcatatatatgaaaattggccaactctctctatatgagtgacaaatcatcacactagtgagtgccacatgtcattctaaattaatatcattaaaaaaataactaaacttagtgataaaaatttaaaagtttcacagtgcattaaatcatccattaatctcactcttaacaaaatatcttcatttaaaagaaaaaatacaaaaaatcatgttaatgtatcaaactattttcattttacttttcttattttgctatttttataatagtcattactcgataatgactagaaattttcgtgtattacaatttaattatttgctatttaaccttttttagtttagtaattttaacttagcctttttttttattatattttttggtttacatgatatggtatttttgtttgtttatgataaattagtaacattaataatgacatgcatattttatgggatgcattttatactagatgcaaaatgatactattgtacccaatgtaaatagataaatgaattttgagatgcaataaaagtttgttatcgccaaaaaaaaaatttcgttattcataaaaaaaaacatttccaataaaatcgacaagtagcatcggtaacccaaaacaaaagaaaaactcaactgaaaaaatgaagtcacttaaatgggccaagcccagtgtatggatagtttctaatgggctgggctgggctgggccaacgatacgtcatcacctcgaaaccaatcccgtcgcggtggttcttctgccatggcgatcatggccgttgccgctctctttcacgcccgcttccctcttctcctccgtcgcagtatcccgttactgtcggctcctacttctgttatttacaatcacagaactcttctatccgatggactcagtactcgattatgctcgattctccgttattcatcgtctgacggcgtcaacggcggaagtagcggtggcgatttcggtaacgataacgattccgttagtgttgtttcggatgttcagagtcctaattacttaaaattcaccgatgaagaattgatgaagcaatgtagattagagacatttagagtttcaggacctggaggacaacaccggaacaagcgtgactccgccgtgcgtctgaaacatctccccaccggaatcgtagctcaagccgtcgaagatcgttcacagcacaagaaccgtgcttctgctctaaaccgtcttcgtacgctcctcgccattaaaggtctcaatcccattctctctcaatttcgttcttttgaactttgaactttgaaaaattgattctagttttgcctttttccagtgagaaacaaagtggacattgaagcttatgctcctcctccagagcttcttcagattctacctcctaagtctaccattagaacttcttctggttcacagattggtcccaacaatcctaaatttgtacctgtatgtatcactctctttctccctctctttctcttagctgctcatttactcaagtacacacttgtttgttgcctacagggaatgcaagctttgcttgatgttatttctgcttctgacggttctatcgctgattctgccaaattgctggggtaacaaatccttcttgaacctgtgtatttgtcttttgcttaactttgagttatcttgttatgtggtttttcagtttgagcactggtggcttatctcgtttgatactctcccatgatggtcttcgtatggctgtcaatagcatgagagcagccaaggtactgtttgttgattaccaatccaaatactttgttatcaagattatgccaataaggtagtcatagcttaaagtgtttctcctttttcattgaaaggtcctgctttttaaattgtttaggcttttatcttgggcaacgaaacaatctgaaaccatgtttacaatttttgttttagtagctgttgcttagtttggtatatcatcactgttggaactttcaacatgctaactagtttctaaagaacttttttctctgagctttcagggaataaagcctctcaaatagttgggatgtatcggcatttgaaagatgacgttcgggccttcgacaagttgtatgtggattgcagcacagtgattaccattttatgcaccatattttgtatacaaaaaaaaaggtgaaatgttgagttcagtttaacatttgttcttctaacatcataaaaatagtcacgtatttgagatgatatactataggttgttcaaatggttactgttgtgattgttgttggaagctaatacagttggaaacatggtggattatattaattattctttctgcttttgttcttgttttctcttcatttaaggaattaaatttcgctggtagagtacgtggaagtggcaatctggtatgtttttgcatttcagagcttttatggtagactctataagggcttgtaccttgcatgcaagtttcgttatcaattgctagatacttgcggtgagggtatctccattttggagatatgaaaattgctttgtgatatagcaatgtagagttgactcttgttaatcaaacaaccctagtgcctttatggcttagtatgcatcagtttcttttcttttcttctattagccacagactacagtgagtgtatttacacgtttacaacacacttaacatttcagtcaataaaatgaagaagaacaggtcagtgcctgcaggaatgttctcaggtatattggacattgaaaatagcaaaagagtttgatgcaggagaatcagattcttgtagaatgaggttcttttcttccccacacaggaaaagaaataacttttatggagttgactcttgagagaaatgttgtttattcatttttatctagaaaacaacaggagttagagcctcgtgggtgcattctgactcactcctgatatattttaaacatggatctgaattctgaaggtctgctcgagagttcttgacttctgacgaagtgaacaacgacaattcgccttcattccctcttatctctgcctctggtatgaatcttatgattctaacaacggattagtatagtgaataatcagctttggtaatcatgttgatgccatagttactctgctctcaaaaaagaaatgtttgatgtttttctggacgttctattttagtcataaagcactagcagcatctctctaaagtgactttgactttcgttaggactaggccctgtttaatatacactatttgcaaggataattccttactttaagttttaaagaaaatatctgattcctcaccaccatttcttggggtttctatttcttttattggcaactttctcctcttggccctcatgtctaattgtatatatatagacatcattacagaaacagtttcttataagatttccaacatccaatagtgtcatttttagtctgtagatatcaatgaggcttgatttatctgccaagtttcggcaagttcttggtcttgccaaagatcatgcatctattggcagagctattgtacaaaactacaatgaaaaagccttttttgacattgaagtggcagtggttcgagccactagccatgatgattgtcctgttgatgataaaaccatgcacgagatactcttccttgtctctaacacaccgggatcgattccttttcttgctgaacagatctctcgccgtctagccaagacaagagattgcttagtcgcgggtaaaacactgttactctttcaccgtctcttgcgtggtagcagtcgcagtatcgagcagcaattgcatattgcacacacatctggtcatcttcaaataggttgctcctggttcatgatgagcctggattctcgatcctttgtttttctgcagaactatgtagcttatctccaagaaagagttggatggatcatcaaccaagctggtaagctcgaacccgtaatgtctggtggtacaaagtttagccgttacaaagagaaatccatggatctggtgttccacatcttaccaaagtgtcaagagtttattgcacaggtgttgaagtgttcaccagttgatgcctggcctatcgataatctggttcaggcagctacgggcaacatcttgaaagagagtttccaagtctacatgacgtattccgatgggatgaccgcgctggttagcatgctctttgatctttcaagacccgcgagagatttagcttgcggaatgttgagaaaagcttctcaacagattcaagatcttcgcatcctgtatgacaagtgtagaggattcgccgggatgaaaagcttggattacccatctgtgcaagccatttctatggatcatatagtagcactagaggaatgctcaagctatggaggcaaaagaggtttctctctttccaccaacctaagagatgcaatcacctgcaatgaactaaaacaagaacagcattctgccagtttttcatctaccagtcctttctcattaccagtggagaccaaaattagcatggtttgggttgtttttgacaatgaagatggtgaagaatcagacaagcaaacagagaaagcatatgaacgttgatcattcatctcaacaggaagtgtctggaacgattatataatactaatgtagtgatgttgtcaatttacacggggtttaccggattttatacgataatttagcgcatatttaagaatcctctctgggtttatgcagtggttttgctgcatatttccagtgtcacaagtgttacgagcatctgaattgtaaaacaaatgtcataagtacttcaaaccattggtacaccttctgattctaaaaaattgccgctccatggatcaacagaaagagatttgttttgtctttgagtattgtttggaccacacaatgcagaaataagacaatagggcctgattagaaaactagaatcatcggcccattttgtattgggtcttctacatacactatagattgacatgaagtgtctggaactggaacagtacagaagacccttgaattctcaaaccaagcttatgtgtagaccattctcaatttctctgtcaagaatctgtgtcactattcacttcattacacgcatatatatattcaccagagacttgcaccttaaccttcatagagaagaaaactacaacaaaggtcatcaccagaggcttgataatgtggatctggactctgtcaaggccaaacttgaaaacggtgcctcaccattaccatcagtaagctttcccaagacaaagtcaaaggtccaagggttgttgatattgcgttcgaagaggatcaaactggcaaagtcagttctgcttagtcacaaaagaactatggttgaatcaagacccgtgtttaatgtctgtagaatctatgtaatctcgttctacacgcgaatatattctgtaacaaagtctctatattgcgtgccttgtttattgatcattctcaataaagatacatgaggaaagtgttagaaaactaaaagatcataattaaatagtactaatgcttggcgtaagagacttcctcttctcgaatgtttgattgtccatggacctgtaaactaaaagttttttgctggaatcacagaaagaaaccacgtgatagcatgttagaaaggaatggcaagacttactttctaatcaagcaacatgttgtttgctggcttatcacgtactagttcctcttcttacagtacaacaaaattaccgtaccagcatttgtgtatcagaaacaaagtatgtaacctgtgtagatcaatgaagaaaatgcctgcttttctctgaagccatacatattgcaaaccaacaatttcgcacgaagctcgctgttataaagcagagtgcagctgtgtcaagtcatatagagaaactaggaccttccaaaagtgtcagaaagagatcagactgtcaagtatcatgtatatctcctcagtctccggatgtgatttgtcaagagagtagaactgatggacctcgttatcgatctcaatccgactccagcctggtggtttataagcattttggtgcttgatcatctttctagctctacgtgcctcttcccaattacccatctctccatataaatttgccatcatagcgacataacctccattattaggatttaaagcaaccaggttttttacagcaacttcagccaaatccagatggccatgtatcttacaagcattaagcagtgatccccaaatagcctcatccgctttcatcttcatcgtggacataacttctaaagcttcatcaaaccgacctgccctgcctaaaagatctattagacagccataatgctcaatccttggctcaataccgaatctgtttgtcatcagatcgaaataacctcggccttttgataccaaacctccatgagtacacgcattgagaagaccgatgaaagtaatgtgatctggtttgatatcgttaatgttcaacttcatcatttcttcaaacacagctatggcttcttcacttctaccatggagtgcaaagcaattgatcatagaattccaagctgttaaacttttcttggatgccatcttaaaaacagagcttgcttcctccaagttaccacattttccatacaagtcaactaaagaattcgaaacaaacacatcagaagaaagatcacgacggtaagcaaaggcatgaatccctttagccagctgaagcgtaccagtttgagcacacgcagagaggacacaaactacagttacctcattaggacgaatgctaggctcattaatcatccttctaaacagagaaaccgcttcaagaaaaagaccattctgagtacaagcagcaagaatcgcattccaggaaggaacatcacgctcaggcatatcttcaaaaagagcaacagcattagagatatcaccagacctagcatacccagaaagcatagcagtccaagaaacaacatttctctcagacatttcgtcgaacagttgtcttgcaagagttatatgagaaacagaggaagcgtaggagtgaagaagagcagtttgaacaacgacatagagatgaaacccagatttaaacaaatgggtatgcaccaaaggagttgaaaaagcagaggagagatatggtgtagacttaagaacaagtgggtagataaagtgattaggccgaggaacagaacgattaaccatgagacgaaagaaggagaaagctgaagaagcatgaagaggaagagaagaagagtaagcagttaaaacggcagcgtaaagatgcgtattggggaaagagaaacgatcaaagataaagcgagcgtaagagagattacagagacgaagcgtacaaaaacgaagaagcttaaaacagaggaaatgtgaatgacttagtccagaaactatcataaaggactgaacttgcttcaaatgattcaaatgtctcgactttgatatcactgcggagatgaattgattcagtaactgctccgccatgtgtgacgacggcgcgtggaggtaagagaattgtgttacacgtgtccccatgtgctcttcttccaccaaacgtgaagagagagaagagagagagagagagagagagagagagagagagagagagagagagagagagagagagagagagagagagagagagagagagagagagagagagagagagatggataaaagtgtgtgtgcttcgtcttttttctctccgagtctatcgttttctttcttcactttctccgtttttatcgtttctcttcttcttctccaaattgatggctttttaaggtttccccactcgatctaatctaacctaacgctccttcattaactttcttcagacagattacaataacgtgtaatatacaagacacagaaacatcattgattccgatctcaagttttgtctttttgatttcatatacacagatacatagataacaaacacacatctttgatcaaatgtctggactttggagattgaggaatctaaagtctctagctttacatgctcgttcgatttcacctgtttccaatctttattctctggaattaggatcatgccctcgtcgtcgtattcaagaacgattcaaatcggaacaaggcggcggaggaggaggaggagatgattttccggttccggtgactcgtcggaagttaagagcagagccgaattgtcctcgttgctcaaagcaaatggatcttctcttctcaaatcgtcaatttccatcttctaatcttcttcaacgtcctgatgattctgattcctccggtgccggagataaaacgaacttccagtctgttaatttctgtccgacttgtaaaactgcttatggattcaaccctcgtggtgtctctcctcttcaagggacattcattgagatcggtcgtgttcaatctccaaccactactaccaccaatgctactacttccaaatccaccaggaaacaacaacaacattcaaaggatccaaatcaaggattcaattacaggaacaagcttagatcttccttttgggatacacttagatcttacggtgctgagccacctgaggattggtctcctcctcctcctcattctcctttgaactcttctcctcctaataccattcctgtgaacgcttctcctagtgccgtggatacttctcctttacctgatgcagttaatgacgttagtcgatggggtggtgctggccttggcagagactttcctactccaaaggagatttgtaaatggcttgacaagttcgtcattggccaaagccgggctaaaaaggttctgccttttcacttaacatctaagtattctgatcatggtcctgtgcttcatttgttacttatgacatggttgtcttgactttgatcctaggtgctctctgtcgctgtgtataatcattacaagagaatttatcatacctctatgaagaaagggttggttctctcactcatccattgtttattttcctggctttagttacatgattcagacgcattatcaccgttcaatccgttatggtttactctgatattgtggaccttgaatcctaggtcagcagcacaaccaattgatgatgacgataatgtagaattagataagagcaatgttctcttgatggggcctactggctctggtatgagcttttgtgttttcctgatcatattctattttttacttcccatttgcactctccctgctgacagtgacatgatagtttatttgattctttaacaatagggaagacattactcgcaaagactttggcgaggcttgtaaatgttccttttgtcattgctgatgcaactacactgactcaggtaagataatgattttctgtattcatataagctcatgattctcactacttcaatcattggctgcacatctttcaatggcttttgtggatccaagttaaatatacgcatagctcctggaattttgatttcgtatgttgctctttgacccagcttttgtatggtgtgttaacaggctggttatgtgggtgacgatgttgaatcaatccttcataagctactaacggtaccacttctaaataagccccgactaatattcccagcacaccttccatcttgttgcattttagaagattcccttatgacttgtaggtcgctgagttcaacgtgcaagcagcacaacagggaatagtctatattgatgaagttgataagataactaagaaggtcagtatgcaagacatgataacttctgaactcgataagaagaagataattgggctttatgcttcctggattctcctttctacaggctgagagtttaaacattagccgggatgtttctggggaaggtgttcaacaggcacttttgaaattactggaaggcactgtaagtggattgctttattaccctttgatgcatatactgaaataattcttcactagacatgagacacttgcatagcgagttatagtgaagtatctagaagtgatcctcattaaaaaaaggtctttgcaatgtacgacaagaaagaatggaaagtttattgatatgtttgatgtatgcgacattacatatgattactaatccatttacacatctgtgttacttctgaggggctttctctgaatggttgtggatccatgctttgcttatgcattgatcgttggatctttttttttttttttccagattgtaaatgttccagggaaaggtgcaagaaagcatccgcggggtgaccatatacaggtttagagctagaaatttgatcattgacctatattgcatctaaaggtgttgttttctcatattaatccattgctggatgtccctatgatgtacagatagacacaaaagatatcctatttatctgtggaggagcatttgttgaccttgagaagaccattgtggataggtaattcattattcgtccttttttttttttgcaatagattaggggttctgttttgacattgatcagcatctctaatgctctgccagacgacaagactcatcaattggttttggagctcctgttcgtgccaacatggctaccagtggagtgaccagtggtgcaataacttcatctttgctagaatcggtaaacactacatagttttgttaagcctagtgtaaacacttctcattcctggaaagagatcttagttttggaatgccggctgcatttcaggttgagagtgccgatctgacagcatatggccttataccggagtttgtaggacgctttcccatattagttagtttgtcagctctgacagaggaccagctcattcgggtactttaacattcttcatagcttttattttatcttgtagtggatggtgtgtttctttgattgctcatgtgcagctagtaaaatcaaagtgagatagtggttgctatcatcgagggcttgatttaattgctcttctcatatttaagggtagctaatatcacctttgctttttgccctgtaggtgcttgtagaacccaaaaatgctcttgggaaacagtacaagaaactatttagcatgaacaacgtaagctccttcaaaatattcagtgttttaagttcaaacttgaccttgtggtccctgactgcatgatctgttacaaaatttcaggtaaagctgcattttactgagaaagcgctggagataatatccaagcaagcaatggtgaaaaatacaggtgcgaggggactaagagccttacttgaaagcattcttaccgaagccatgtttgaggtaacttcagctaccacaaatattgttaaggtactaatataaatcttgctttcacacttctgtttgatttctcttttcagattccagatgataaaaagggagatgaaagaatcgatgcggttatagtagatgaggaatcaacaagctcagaagcgtctcgtggatgcacagcaaaaatacttagaggagacggtgctttcgagcgttacctcagcgagaacaagtcgaaagatgctacagaaccaatggtatgactgcaaacatcatctattgtagtcaatataaactccggttgtgtgtatgtaaacatcactagtctcattctgcatttggctatattgatcactgaaacggtgaaacctgatgggtgtaatttgcaggttgacgaaagagtaggctcggcgaaagcaatgagattgtaaagagaatgagagaagaagggttttaacatgaagagttttttttttattatttgtaaagaacgatagcattcataaaagtgcaagaggaatttatccactctgtacaataaaatgttagcttacagattcgaaagctgaattgttgttacatagaaagaaaagaataggatcggtgtaaaaacaacatttttgtaactctctctgtttcaaaataacaaaagtgttattagtttgtcagttcatgttattacaacattttttagtcaatctcgataatgtatccattagttaggaccccaacagctcaagaacataaccgttctaagtgactcttcagattgctttgacttgtcatcatccttactagaagcgacggcgatggatgaaaagaatctgatagcctcagaagcggatctcatgttgttacggatacgttattcactgatcggatcaagtagttccaccgatacattcctaattggtccttggaagcttccacggctccgatgcttgcagctactaactatgctttgctcgttgaacagttgaactcatcttttttattagaaacaaaagcagagaaactatttgctttttgttttgttttgtatagattatgaatttgtgtttgtgaaaaatgttgatgaagaagatgagactctgattagtcttgttatataataagagaaagtagccgctagttaaagtctaaaaccagatcctttctcccactagtttttcccaggtttctattgtcttggtggtgaaattaccattatgtccacatgagaacaaactgaattaggggcactatcggctttacggaaactatgtgtgttcatgcgctactggtttccgtgattgtttttgagtttgacgagttttgtggaattttgatatctatataacatatttcaagtacaaattttctaattctaataggttcgggtataaaaaaaaaatcggatcggttttaatttaattttaatccgaaattcttcagtcggatatttcgttaaatttaatcaaaattcataacgaacttaatttttaaatctaaaaatatattttttcttaactaattactatatctattttttttatggtatattccttacaaatattatagttaaggaaatgaaatttgattatttaatgttaatataacaaatttgaaataatatcctaagacctacctctctatctaatttaaattaaaagatatgattatctttcatttttatttgattttatatttctattattttgaattatgaaaaagtatgtatagataataaattctttagcatatgatgtaattcaactttttttaaacgtacgtgtattactcaatctataaagaaaaaaaaatgcgtacaatacccacatctgagaaaagagagctcagaaatgtgacaatttcatctgagaaataagaataatgcgaaggacccaaccatcactactgccaatttcatcacagctcaactacaccgtctgggatcgaacccgggttagatagtggtagagtattaatctaccactgaaccattggtgctacttgttgtgtatgtatttaaatatgtgttaatattgtttgagcgaattcatcaatcatcaatcacctctcttcatgtaatttgttattataagtttggaagtaacaatctacatatacatttttgcagccattttatgaaataaatcctgtagttgggacttatttacaatggctgccactagattttaatgtttgttttttaaattagaaaaaaaaattttgattaaatatttgacatttaacaatcttccctaaatctctccacattaaatatacgattagttactaaaataaaacttccaaaatatttaatatcatttaattactacaaaattatcatttttgatattgcttttctccatgactataaaaattcgattataatcatcaaaccgcagagatatttgatagcatttaattactacaaaattacaaaatatttagacaataattcataaacatatcataaataaaatcaacattaataaaataaatggtttttttacgggacgggttggcgggacgggtttggcagtacgttacttaataacaattgtaaactataaaataaaaatattttatagatagataaaatttgcaaacttttatgtatactaactttaaaaaataaattgttcccgcagtgtaacgcgggttaaaatctagtggttttgtaaaattatagctaattcagccatgctcaaataaactagattttttttcctgaaatcactagaataaatcatttaaaagtaattagaggtgaactattcatataacaaagcttaagacttgttggtaggctgatctgaaaaaatcttgttgttctcttctcccgccccatctcatttttttcttttttattatttctctttaaaacttcccctcaaaatctaataattaaattactcatcaatgaaaatttgctttctaaaaaatttgaagtatataaaatctatgttttttttctataatttgacatgcattttcttaatgatttcaaatactttacatatacattttatgcgcatagtaaattaagtgtagatatgcttcgaaatatacacatttttatccgtacttcttattaagtgtataaatatatagaaatgtacacatttttatatgtaaagctcatttagtgtacataattatatcaaatatgtattcaaatatacacattttatctttacttcttatttagtgtacattaaatgagtgtaagaataaaattgtgtatatttatgagatttacaaatcacattatgtagctattcctctctaaaaatcaaatataacatttctactaccattaggattatttgttattaaacatgtgattaagtacttgagaggcatctaaatagtgtttaatagtgaaaactgggtattttgctaattttgagtagtaaagtgactatttaagtttttaaaattgggtattttgcaagttatcccaagaaaagaaattttaattttgtatgattttggtctcgtgttgtgtataaaacttttggaaggatacgaggttattcggctggtgttatgaatttctaaacgttttcattagtcaaagtgtcttgtatctcacagagtctaaatcatttttactatagattatctttcttaaatgttgtggaagctacttaccttctctaccataatagtgatctttgaagagacataagtgttttttttatgtgatgttcagtttgaattaggcaaatgaataattcatctagatttccagtgatatccaacaattacgagcttttagaggaaattggccatagtttgcaccgatcatgatgtattatccctctctcaagatgacatgtatattgaaatttaattcatgttgttaataaaagcatgaaattaacgatgaaacaaaaattttgtgaaaacatcaggtatttattgatatgttcagacatgtagcgtctttatcaaaccactagtaacttttttgatgaccttgagacaatcaaactcaagatgtttggttctctcatgatatcagggccgaccatgaaaatttgggtccaccaacaaataattttgaggttattacaaagatttagtaaattaaaggtttttaatgtataattaaataattaggggtcctattgcaaataagcttctgctgtagattttacaaaattttggaggccccaaagccaataatgctcaagttcataagaattaagaaagacactattaatgctcaagtttaacaatgacaactatggacggaaaactcaaatgcctttgatcgtagcttttgttctcaatcgatcaactaaaatttctctgatacacttttaagtttctaacaaaatttcctttcaaaatagaataaaaaagtttaaacacacttatctcctctaacttcttcgaacgtgagcttcctttagcattgtctgccaaaggtctttgacacgatgacgaaactttttctgaaaccaaacttcaatctctgaataaagcacattcggattctgttcccaattctttctcaaactctccaaagtatcaatcttcttctctgtcaaaaccatcaccaaactcccaactctttctaaaccccaagcttctctttccaacaacgtttcaggtttcccagccaacaaagccctgaagcttttcaaacaagttaatacctctccttgaagcaaagcgcatccgaaagccgctgctcggtctctatcctctgttattgccacactgtgagccggaagttcccaattatgaggaccgaaactcggaacgacccagcacaaaactctatcctcctcacttgagtaatatggtttcgggtccttgagcggtgcagagaacacgcagagagactttgcgtgcttcaccagccattctggcctcacccgagtcgctccgtgcatgtatggtctgttggtgagtaggagctcgctgtagaccaataactccggagctgagtttatgagagacgaccaacggtgcaagaaaacaggttcttgaaccgcacatgcttggtattctgtcgctctggtctttctggctacacggtctgcccatcccgcacatatggcttctcctaacagttcttcttcgttctgtagaagaggggtttttgaggaagtcgatgtggtgattctccatgacttctctacgtcttgtatagtcccatgagtccatgaaaagctgtcttcggtttcggagggcttacaacagttgaaaacaagtcgcaaaagctgatctttgagcttagacatctcgtccatggtcttcaaatgcaacccattcgcctcgcagaagcccatgccattctccgagacctcaaaggaatgcaatgcgtaagctacagtcaaagcatcgctgctcgggttggaaaatctgtcccgagcagctttaatcttctctttccgatcctttttccgttgtttatcttcttgtttgacggttttgtcagcatctttggactcgtttttcttctctccttcaaactccattatcaaagggtttggtaagctcaacgcggctactgctgcaaccgcatatccaaggatgagattcgcgcgtgagtaattccgggtctcttttagcatttggatgactgttagaagcattcttgagtgacgtggactcataggatagtgagacatagcctttcctaatggtgttaaccctccgttgctgtctagagcctctaaagcttttaggcatcgttctgcttctctaatagctgatggctcaggcggagttggaaacgggaaattctcaacctgttagcaatagaaaaacgcaaagattcatcaaaaagtcgagcgagacagaaaaggagatctagtccattgacaatggtggctacaaacattttacctttggaatgttcatagatttcatgagaagaatgactccatcaacaggaactttcatgatttcaggaagcgaagattcctcaaatatattgctaaaaactgcagatgaatagagacgataacagtgaccaggtccagttcgtccagctcttccagctcgttgactagccgaagcttggctaatccaatctacctcataactttccataccagtcttagaatcataattctttactttaacccgacctgtatcaaccacatactttataccaggaatagtcagagaagtttccgctacattagtcgccacaaccacaagtctttcttctttctcaacttcctcaaacactcgaagctgtgcagctggagatagcatagcataaagtggaagaacacgtaattttcctggagaaaacttgttttttacctgctcagcctcttgattctctgctgcaatggactttgccggctcagcagatacggatccatttttgtctgccaaagcattaaacgctgctcggagagcatcaagcttcccttcctctacaaatgaacttgcaaagccgtcatcaacagtttcccagtccctgtcttcatcagactcatacatgtcttcctcttcaaaatcatcatcatagttaccatcaccaatatcagaaggatcttctccatgcgagctaaacctggaattttgattgttggagtcatcatcaaatgcttcagcaatctccttcatgtcaacaccaccaaatgaaccatcatcgcatttcttcttcacataagcatctcttttagcagcttgaacaacaagttcctttgaagacttacgtaacttctcacataaatagtcaacttctctctgcccagtcacaaaaacaagtattcctccttgtggtaactttttgtgaattgacatcactttcttataagcttcacctatataatcaacaatctcagtcttcttggagaaatgtatagttactggatactgtcgagtgggaacctctataagaggaggtatattagggaataaccttttccccgatacaaaatcttccactcgcaaagtcgcactcatcaatataagtttaagtggcgtgatttggcattctgaggttactgtgcctccagattgaagactcttttgttgttcctcgtagtattcctgtcggattttgatgactcgagtgagcatcccaattagaatgtctgtgttcaagcttctttcatgggcttcatcgagaataatcacagagtaacgcctcaataagaagtcattctgcagcagaagaacttatacaatcaagtaaccatgataaaaatggaaaagaatgtacaaaacaaaccaggcgaaaaaccgtcaattacctgtatctcacgaagtaaaatcccatcggtcataaacttgatagaggagttttcgccaatctttttgtcgtacctaacttgaaacccaacctctttaccaagacgaacaccaagctcaaatgccactctcttggcagtggcaagaacggcgacacggcgtggttgggtaatcccgataatcccacttcgagaactgaattgctttgaaccaaaaccagcttcataaaggaactgaaggattcagaaacaaaaacagggttagataaagaaaggactttctaactgagaccaaaactcagctatcagaaaaccgttacaaatgcagcaaactgacctgaggaacttgagtggttttaccacacccagtttgtcctgaaataataactgcagggtgacgattaatagcttccattatctcctgctccatcattactattggaagatccttcctcgtctcttcaacttcggctggtcttgaaacatgaactacaaacgcgggcacacgaggtccttgtacagttacatcttcattctcaatgagcccatcctgtttcataataaacccattagaaacaatcaaatcaaatatataaggcagcaataatagctcaatcaaaaaaaaaaaaaaacatcaaattttcagagttgacaaaccattgagtcttcatcatcatcacgacaagttgtcagtgggatcatatccacagtgtcgtctacctcaagcttgctactactttcttcagcagaaatcattagatcagcatgaaccagttgctgctcagaatcagttacaaaagttggagtttcaatttcaacatgttccggtgttgtaggttcatccatacaagaatcatcatcattgtcattttgctcgactgattcatcagaatgctcagtctcaacaccagctttagaaagttgcattgctctccttcttttttccagcttagtagctgactgagtaaaagattaaccaccaaagaagaatcagaacatctgtaagaaatcgtaatgtaagaacaaagaaagaaaatttcttactcttcctataacttttgatgattgtaatagcgacgatacatcctcagatattttgtacttgctgtaaaaattcaataccaaattcattcatataaagaaaacaaacaaacaaagaaaatcatatatttgaatgaagcgttgaacatactctaacaactcggcagtttttgaaaagaggatttctttctccttatcttcctccaatttcttcagcttccgtttctgagatttgcacgctaccgtgtttacatttgaattcagtttccgtttccgagatttcttcgatcccgtgttattatttgaattcagcttatcctgcatctgtccaccatgaaaacaaaatttccaaatctcatcagcgttaaaaaacctcaaaatcttattgaagaatggtttgattagagctaataccttattggatcctttattcttcttcttcctaggaggcattacatctaaattgcaatcatctcccaccacacttgccataatcgtaccaattatatcaactagaaaacaaaaactgtttgtctactcagggatcttcagacaacctgacacagaagagagataaacttaaaggggattctgattaacaacaaccactttgtttctacacacaaaaaaaaacactcaggtcttaaaatcaaacaaaactaattgattcaacaactggaaacactttacaatccctcaaagagatatagctttcaaattcataattagaatggagttttcactcaaaagctatgtaattctcgccgaaatcacaacaagggacatcaaatttttgcttcccacagattacactaaacccaaaaccgaaatccgtaataacgatgaaacaagcatgcatttactcaaatttaaagcgaactctaaacccaagttatgtcataagaaacgatcatgtgggttacaaagaagatcgagagagagactgggtaaaacctttgacaattcgattctacttgtcgagcttgtcgtgtctacgccgtttggctcggagaaggttgaaattcgtgtgttcgtctgtcgttttggaacttttttggttggagactaaaatatttgcccaaatcgtcgtcgttttgcaaaagtaaaaccttagtcccaaaaacttgttaaaaccctaagtcaaagaaagtacgtcgttcggacagggaaaaagaaaggcttaagagtgtacaaactaaaccggacacaaactaaaccggcctaatatttttgtattaacaaagctattatattatacaacagaaattcttgggttaagaagttgacaaattcacagctttggcagtttcttgcttaagacatgggagataagagaagagagtctcagcatgtgacccgtaatactttgagaatatctgagacgatctctttgtagtgtcccaagctccactggaatcacctgatgcaagctgaatcgacgcaagcttcaccatttcatttccaatcaccacgtgttcatcctcatacagcctcttcagaatctgccaccaaactcataatttatctcatatctcacccataccagttggggtaatgaaattacacgcatgaacgaaaagctttaacggttgtttaagggatttggtctgccagataccggtttgctcaaagcagttttcatattttgtcaatcaatgatacaagttgtggtctaaatcgaagcagtatcagtatttatcaagggcttttaccttaatggatgcttcacaatgctttcttgcatccaccagttccccagctaaatagcacgcctgagcaaccttatcctccgcctgaacaaacaaaatcttggaacgtgagtcatgtttgttttctctcaagagtggagaggacatgccttagtcaccaaatgtgatatagagtaacaacgctttaagatcctttagcatttataaaagaacttgactcacatcagcgatgtctttgttatacatgtgcaggaaagttctgagcacggcgatggaccttgaacaatctgataatacagaataattggcccgtcctgaattcatcaactcttccaccctgacagtttcgagtgatccaagtgttaaagagaaacttcacattaactattaacttgaagcttcaaggaaaaactacgtaccttctcatgtgattccaagctttgttcacctctgcatgagaattttctatgtcacagcgggaaccacatttcaaacatatctcaggttctatatgtagggaaccactaggtttacttagcaaactcgaagccacttccccaacatcagcataaaccttctctctcatctgtgaaacaacacagttacacaccaaactaaactatataggtgacgttggcgttaagaaacactgcctaaatccttatagaaaacagctaaaagttaaaatggacattctaccaaggaaatatttcatcgcccattccaaaaggaattgagcaacggaaagtaaaaattttgcgtttagtaagaaattagaactgcctaaattgagtatcatcattatcagcaggtatcttatagtgaactgcacagaagctaaaccctgatgaatcagtttaaaatatatcagaatacctgaacttgctgatccacgtttcttggagcagtaaaaaaatggtttagcttctcggactcacatgtggccacattactatctaaaactacaccagtacagtttgtattgacacagccatacccattgatgacaaggtctgatatgttaatttgagcacagccacggcaccgacaatggaaaaagtactcctcttcaagaaatctaatgcgatttttgcagtcccatttcccaacctgtatgttgtaaagcatattgacatttagaaggtgtgaacttcaaaacactcagaagatgtatgatacagaacagaagtaacaaatcgagacaagaggatcacaagaatacctcaggaccatatgacagctcaaggggacaacccgtgggaacaaactctgtagtttgcataatcagtccacgggaaaggaaatacaaatggatgtttggtttgcaggaatgattgaacaaactaccagttttataaagagcctggccaactcttatctgtgaataaaacaacaataatagacataagaaaaaaggaacaactgagaaaggaccaaagtatgtcatagtggacgctcacataattttatagaagagcagctcaaaatataacggaaacataaaaaatcaggttacagatatcatttctgtaactctagattccatctttacagatatctatgatttctttcattgagaagaggtataaataacattctaataagcagtacctctgcctagacaaacctgctctaaactctgaattggctcttttgttgagatgtttccagatgggaggcacttgaaagaatcgccgctggatttcatacgggcaacagctatagagttcaccttgatttgtgacagcagtatgatagtctacacagaaaagaaaaatccagacagtggtcaacacctcaataagaaaaattaggaaaaaacgaaataacaatgccaaaacataaagttgcatatgaatcatgtagacagctatacttctctataaatttatgataacaggaactcatcaagtgaattatatgcacatttttgcaggcagtaaacgtttttggcaatgaggatagatttactctaaagatgaaaaaccaatttgaaattaactttatatctcgacgataagtggtaaactagatttcaatgacaaaagatcatcagcaagacatcctttatcttttataaaagaaagtataacttgtaagactaaagtcgtcagcatccattaaagttaatatgtcagaagatgcacaagttctagaaagcaaagttgacttcaatgaactattggctggtgcagggagggagatgtagaggaaaacctgcgtcacagaagcttcacaaaccgaaagattagggcagctagatttactaaggcaccaaatcaatactatggaaagtagatgcagctccaacttgttctctggattcatcttagagtaggtatgggaaagttcctgttgaaaagatatagggtagtcaatccttattagatttcatgtgactgttgcagaagatggaataattttccagtaaaatgacatactaatatctcctgaaggttagaaagatcagtagctgctttcccttgatttattaacttcattataattcgaccagctaaaacagcatcagatggcagtacagcaggccaattggctcccctacactcatgctggtgttcttgaatgagatcagtcgcaaaataataaatatcagctgatgtaacgccttttatatgctcaacaatatcatcaggtagtttttgaaaaatgtgatgcttatccatctcatttgtagacagcattccacctgattggatttggcaggactctgagcagtacacaggtattgagcatgatggacatgggacagtatcagcaggcaactcattcaggcaaaaatggcaatgtgtttcccgacaactttttgatatgacctgtagtaataagtggcatcagcattaaaaagatgttcagtaacaaaagaaaaattgtgttaaagcatgaaccaatttatatcttcatttgtttcagaaaacttttaaaacgctagaaccatctagatttgactagcttccacttcattgtatataaaaaaaaacattgtatcacagctcataccacactaaaaggttcttcaacatgtatcacagaagcttcttcgatatcacattctgataccataccccttcctttctcttttgtcgacacacaacgcagctttacttccatttgcacactcggcagatgatctacagaccattaatagagacatgtcaaaatataaaaatcctctctaaacctcagcatataagacttcaaagcctaaatattatcctgaagacaatagtgttgggtggaaaatctcacccacgccagcatcattgcttggacgatattcatcgtgttccaatgtttggttattttggtagtcaggtatagccttaagctcattttgtagctgcttcttccccacaagtgatgactcaagcgacatagaaactgtaatgtcacgaaatgcatctttatagtttccaagaagagtattaagtttgcctctcctataccacgcctgacacaaggttcaatgaattaagagctgaaaaactcttaaggatcccaattgagtaagcattcattacctttgcataataaggatcaatccgaagagcacgatggcagtcccgcaaactctctttgagaagaccaagattctaagacaagatacaaaacatacatgagaagctataaagagaaaaaaagcttagaaattgattcaatgatgaaactgattaaaaggaagaaagagaggtacatgaaggacattagctctattcagaaacagagaagcaagtaagctcttatctccgtcaatagcatctagaggagcaacacgtaaagccttggagtataatcgcaaagcttcgtcaaaatctcggctacggaaacagtgatttcctctacgtttcaaatccaaagatgtctcctcgttcttcccacagcatcccaattcaggattcgctaactcactcaccgcctgagaaagcaaaaccaaggaaaaggagagcgatgagaagttcaattgaagatagtagcgcagataagagaagagtaggttttgggtaatttgtacgtacttggtgaaattggggaagacccagaaacaaacggagaagcgaagaagaagtggaaagaagatcatcgacgctgctgcttttcaccgtttgaagaagatcttcaggaatcagtgatttcaatttctccattgttacttcttcttctcacacgcacactttcgtttcgaattcagttcactttccactctaactataattagtttgcttttggtttggtctaatccaatcttgaaaattcaaatcataaaccggttgaatttggttaagagaatttagattacatttttctttcgagtttatcaacgatacaagatttgttttgatgacacaaagactaacgagaaacaaaagcctgatacgattttgatacagatataataatattcacacggaacaatcaagactttctttaaccggttgcagaggatacagcatcatttgagtccaccttaagctgaaacaaaccaaatatgaatatcacttattagactgatcaaacactatttgcattttttctactgattattattattatcattcgccaaatgtatgtaccataccagttttaagtgattgagtaatgcatgatgaagttgttccttcagcttatggcattgctccaccattcgtcctgagttcattgttttctctagctcccaccatagtctttctactgttgtgtacggaaaccaaactccggatacctttttcctcttcaatacctctgctggtttctgtttttaacaagagagaaaaaccaaggttaattcagtcctaacatatgaatcatgctcatcacagtctattaacaagaaaatgtcgatgcaaatgcaaactcatgcttagtctaatgttttttaacggtgtaatctgcaacctttttttgtgttactgttttgcgtgagattcttgcatcttaaacgttctctaagttgaccatgataagctgtaaaaccctagcgaaacgacaaatcctaacatggataacaacgtatcctgtggcgagatgcttataatctgacaaacagtctctacagattgatcataactcaccgatgaagcaaatgattccatgtactcaagtagcaaattagttgcctctgtaagacgcccataatcaacatataactgaaacaaggaagcaggacttgcttcttgcccagccattcccaaagctttttccttctgaccatcctgtccaaggcacaagaaattggtcaatacaacttgaatgaaaccagaagataacaaccttacaaatgattgcttctttccatggtgtaaatgaaaaggaacaagcgaacaacaatatttccattgagatattagatacaatctcttcagcattaagcagacatgctgtgtcaaacatctctgcactgaaatgatctaacatgatatacaacaacacaaaaatctactctagaatctgcatatagatatattgatagtgtattaaaaggcttactaatgcaacattgttcacgcatgttaattatttagatcaaagatgtcgcaaacccaaattcaaagttgcatgccaagatttcaaagctacctaaatgaattgaactatctatattgcatacaaaaaagtgatccgctaagaatatgtaacatatatccaaaaatattaccttgaacatttgaatcagccagagaggcaattcgatacaagaatctgcttgaagaagggttgaagcaacagaaaccggtagtctagcgtgtatgtctatgtacctcttctgcatttatagatattcaatacacacatcatttcaaggaacaaataatgaaaaacctgcaagccctcaagcacatagcacatatcctaagctaaggttacaattcactcccagtaaaggaaaatttccaaaccctccaagcaccaattacaaatcttcaggcacacttgagcgaaccaattacactcctagtaaaggatagtgacaatgcatgcaggtctcgttgacaagaagaggggctgctgctctggtttcagttaccaaaaatactattgataaaaagatatgcctctaattaggatgccattttggtgtatcatataaccatttaaattcagagcaagtaaggacagatttctggattaatactgctcacaaagacattccaaacacttttcaatgctcccaaaatccagagtattaagaaaatagattccaattgaaatagagaaaaacgaaatttccagacaaggattcagaagttactgaccagataaacctcaagaatttcccaatcaccagccaacttagagccctgatcagcagggcttctatcaggcgaatgagtaacttcttcatcgttagatgttaacataagattaggcctgagatcatttttgtaagataaataaagctatatattaatgatattttttataagtcaggtaagtcaacaagtaatcaatgaaataccaagcaactaaggaacagtcactcacgatgaccacagagttcctttagcagggcaacatttaattgccatattctcaaatatcttttccagctccctgtgaaaaagcagtaattcttaaacctacataatactcaaggaatctgacttcagaaaataaaaagcaagaaatttaccttttcaaagcggagcccctccaaaatttcaaaacaacagtgaatgccatgtcatacaagtttgcctggacaagaaggtcaaccaaatctgatggtggcttttcgagtcctggcgtgaagaaagcaatgcatatttatagaaatgcgtgtatgagtcatgaaatgacattgaaacaatcagcagggtatctaatacccttctaaattaaattatgccttaggtattgcatagaacaaagtcatgccaccaagcagtctgccatggaagacaggttcttacagtagctaattcaatgatggacaaaagctatctcataaaaaaaggatcaagtgacaatagatcaagctctttaatttcctcacatcacatttggggtgaacatactttgggaattttctgtaaactacaatcgcagaagcctttaaactagttctaaacaccgattattcatagttccatttgcccctatactgtaaaatcaaaacagaccatggaggaaataagagacaatttacctgaatatgtccacccgaaatttttcagagaaagcatatattcagcagtagtaaaaacaaactcgttttggagtttctcgatatcaatgcaactcttctcccctttgggctggtcattactccttactgcagataaagtaattcaaaatgtcgttattcatgtgatagttcaacaataaaacagaatgatgcttcagggtgtagaaaagacaagtacaatatgtggtcgtgaggactaacattgttcttcttctgctcttctagcctttttaaccggataacgtgtggtttcttctggtactggatcaatccaagcatacccaggatgaacaagggctaatgcattcatagcagcagaaagtccattaagcctctcttgcaaaactagggacatgtgtttgtaatccttgcatgctccctcgcttctcaaacgggcagaaaactgatacatgtaacttgccgccattcgccaattgtgtcgtctcatctcataagcataaagcagcttgtatggatttggcttcatcattatatcagaacgtccggcctacaaatcatagagaatgtaagaaacaatagtagaaatataccaagggcagaaacaaaccaactcagctttccacaaataccttccaaaaaagctcttgggtgatcttctctgttaagccgatgaaaggtagatgtccatcactgaggatctgaaatagaaagggaaacattcatggtaatttgcttttaaaagtcatggtagtacaaattctttgtcctgagcatttaagacagcatccaaaatagcaaaatcatttatagcttcagacaaagagacacctaacacaaagagagattgcactcgaataatacggtttatgaaacttatgggtgataatgatctgtgaaatgttttgccaccagacaatataaagtaaaagacttttaaggattttggtccctcttcgccaaaagcatagaaggaaaaacttagataagagaagaaaaggattcttgacctctaccttcgttttgccacattcaaatagaactattatgaagcgcctcaaacagatgcgcttaatctcctcatcagggtttgaaattatagcacagtaggcatcattcaagagattgagatctaaggtgaacttgaaaacatttgcccacagtcgtcctctagtgtaggtggctgctttagttggatcgaattcctcagtcatctctatgaaattataggcatcatctacttgctcaagggctgcataggcaaactgacaagctccttcacttatattgtaccgttcaaaaatttgcatagcccactcatagtaatgaagtttccatgctgcagaagacgtagaaccatctaaaatacttggacctgctacaacaaaacagagggtacaaaggggaaaaattgaatttgcaagacataaagcctggttttagaaataatacgtgaactggcaaataactagagaaagaacaaatttctttgaggagctcacccgttgtggcaggtgaaaatcctgcttctttagacaagctgtgcaaagccttccaagatccttcacctgatgaagctctacattgggaaccatgacagggtagatacatgagatgtatgttaggaaaaacaaagacaaatgttcttgaagggataatattagaaaataaatgaaccagagaggcagagacattgaacattaaatgcagaaaatgcgagcttgtcttctatgtgtttagagaaaaagccacatgctttggcacaatatataatgtatacatgacatatagagacgggactttaaaattatcactgataaactccaaataataaagtacctgaagaagcagcggatggcatcaataatctttctctctcttaatatgccacttgcaccacgttgtacttgatcaagaaggcaacaaccacggagatgttgaagaagacaccaatctccactagtatcttgagaacatccaaatgttttctccccacgtaaacttgcctccacaaccacaaggattcgcttgagaaggtaataaaataaaaaaatcaaaacagagaaatcaggaactaagttcaactagccgttagcagaatataactttttgttggaaaaggtccgtcaaagaaacagagacaatttttacctcaacagcatcagattgtccattccgaatcaacctaagactaagttccgtggagcgtcttagcagtgaagaagagtcatctcctgttttactataccgaatccagctgataaagttttgcaccaaacttgtaatgatttgtgaactcggaagatatctcaagttaaagcggccatccacaatgcaacttcggtcactaaagagaagaataaacgccagtgagaaaccacatttccctagcattgcgttccatgatcttttgtcaatgctgctatctgcaataaaaaaataattgtttccagtcaaaaataactgcaatgaggtatgagcgttggggaatattttccaaggacaacaacctaccaatctgtagagatgaaagtttcaagctgaaatcttccatagaagttgactcagctggagtggtaacaaagaaaaggatgatgagccactctgagacaatatcttggatcattggaagcaactcaagccgtagcttgcatatgtcttgctgtgacatattaacctgcggaaagaaaaagccaaagaagggggatacatcttgacattagtatcaaaatataaactacactgattccaaataagggggatacatcttgacaataatacgagacccagtgggaactgacctgcccagcgatgttaagcagatagctgatgagtaggaagatgtcaaatgccgactcaaacatcacctttacaaactgagaagtggcttggacgaggatagaactacagatatcagataatgcctcaccatcatttttctgcatagattttttagggaccaaatactgcaaatagtgctccatgatagtaaagactttttcccaagatccagccctttgacatagagcagagagagacagcagcatgtcaatggagaatgttctaagatttttatgagcttctagctctttttcccatgctctatcagcaccaagatctgaccaagtacgttgacctatggtcgtagaatatcccgactcaaggatgttaactaagcgaggaacgatttcatccgatgagataattggccttccggtaattgattcataatacatggcataaggagcaccaccccactgtttactgatcttcgaagtacatcttagtacctctgccagaatttcatggtcgctgtgagacacgcccaagtctaagctcgtcaggttgctgtgttcggaggaagaacctatcaaaaggcaaacacagtattaagtcttaagcgattgaaaataaacaagaaatgttttggtcctagattataaatcatgatcatttacatacctccaaggctgtgctcagcgttctccaatctaaaaaacagtgatacagaattatttctaactaaaccaataacatctgactgaaccaacaacgtgcgaggttcattattactgcaccaatgatggagataggatgtacaaaagtttttccaccaatgaaaaactgaaatagaagtttcagctgtaacctgacataagaaaagacataattcagcttttatgacccagggttcatgctaactaacagtagactggatagcatacattgtatctacaagggactctagaacttaacaacttaacaaaaaccaaacctcatgctcaaccagtaaaagaatctcgcttgtaagctcatcaagacttaaagattgaaactcggaatcagtccagtttttgttgtggtccagtaaagttagacgtaaggcaacattgtgaaaaattccaggacaaagaagcctgcgtaagaagattgacgaaatgaatcccataatttgatcctgcaaagtgcaacataggttagaatggacgtaaaaagtaaaatattgtattggaagttttgttcaacaaaacgaaagctatgttttagcataaagacctttgcggatgaaaacagtgaatgagtagtcaaaagaagatcatgtgaagagctcctagaactcagaaatagctgttcagaaatgtagtcttcctgcaacgtgtaagactgcgcttccctaggaaaacaatacaaaatagagcattatccaccatcaagaaacaaaaaccaaaccagcgaacaatagaaaatttgtagttagtcaatagcacaacaactaggatagagatacactagagcagcatgttccctctgcagtttagaaaccaccaattttttagcttaatctattaaatattttacaaacccatctcaagaatgaaatataatgcagaaattcacctactatattctagatttatgtttccaagaagtaaaaattcaaagctacagcggaccagagaaaagaagacgcacatagaatcaaacttcttcatacaccatgtataatgcaagctttaatggagtacgaagtatctcaaccaatacagaaggaaaaaaatattctcgaacttacatggtgctagatttctggcacaacatgtaagatgttaattcattggcctttagagtccagatcttgtcggatgtaaatctgacatcccgcaattccccctgccaaagtcgatatgcaaattcaacaaagttgccagtaacggaaaaacaagggagtcgttaacatagttatgagcaaaaggaatacagaagtatttgtcacaattatgagcccaaagaatgtacctcttccagtggtatattctgtaatccagaatctagagacaaagctatcccctccgcagaactaaagtgcaggccatatacagtgatcacgtccatgctgtcattcttcaaatattgggaaaaggttattagaacaagagaaataactacctatgtcacactcaagtcaagccatcagttgtaaacgcttaccatactctttctatacaagacagctaatggaatgatgccagaatcgtaatcagctttgcccaaccataacctcacacacataacccctagtgtaagaagcatgaaaaaaagagtgaaaacaaggtaaaagataataaaataacgtcaactaatggtcacaagtagaactaacagataattaccctcaaggttcttagcagctatactctgacataaaaccctgctataagtcaaaatatcccagacacgtaatgccccgtcagcatgaagcacacatagataatttcttccatgaacttctgatataaataaatcttgcacggctgcaacaactgtccccctgcattgcaatctataagaggttatttagatgagcatcacgacaggggaaatatatgacatatagcaaaagatagcattacattagcgtagtttatttcttctaagtacatgaagtaaagcagcatgataacattatttttctaatgactatactaaaagacatgccttacgaatccccacagacgaccaaatcctgtatcatcacgcagctcctggtggaaacctgatcagaaacaaatcaatgataataagagactagaagaaacatcatattgagatactaaggtaatgcagagtaatcttacctgaagatttctgaaaatacacaataggttggaagcaagagacacaaccatcggacctcccgagaaaaatgaaaccaggcgatgcagcaacactagtaacacgactctcgttcaagtaaggtcgaacatccaagtgaatcaaatgatcaagcgggaagactgaaccagacttatatgctaacgtattcgagagtttaagaacgtagacaacaccagacggcgtgagagagtaaagaaagtagacaagacgaccactatcaccaccctgacacattcaatttcatagctttcaagttcaacacacacaaacaaaactaaaagatccaaaaaatgcagaagacagtgaaatcgaacctcatcggcgtatacaaaagcaaaaggagaaagagtctgagcaaagacgaaacgcagtcctgttattggaaatccagacttagctgagagctgaagaagctcgagagcatttggactcgtcttgttgattctccaaacgaaagagatcgaaggttccccaattacagagctagaagcgtagtcttcagacaaaggaagctgaacacactcattgtcctcacttgaattagcaccgatactagaagatgaaacagaaggtgaaggaacagatatctcaatccatttgacgacatttccgccgccggcaactggaacttccataccggccgacggattccgacgattctcctccatttcttctttgaaccctaaacccttttcttcttcactcggacgaattaatgattttttaaagtaatcagatctaatttttattgggcctagatacggcccatttaggcttcgtacttgtgaaactgaaaacctaactattaacgaaatttaactttggttaataatctctttccctgaacaaatgtcttcttgttgcagcgacgatgctattgcttcttcttcttcatcttcttcacgattcttctcttcttcttctttatcgttttcacatggctgcttctagtgccaaaaacattggagaaagatactagagctcccaaggaagattcttcgaatgttcttttttcatcaattcaatcttgccgtcgagagaattatggtcttcgagggttagggttttcaattcttatgaagacgagccgaaatcaatctgttgaattcgatgattttctcggatgaatgaaggttgtgatgcttccgtcgatctttggtcgatttatcttgaggtatgaaaccgatcacttaggattcttaaattcttcaaagcgaaggtttttgtatgattcggatttatattgttttgtttcgttccggtgaagattacaagttcttgtatgaataccaattgaattgataatttacagattcttagcatagcattcgttctaaacaatggatcatgatactcgcagcaataagcttcagaaattctttgtcgccatggaaacggccttttagggaacagatgaaattatcaattgcgccttggaggttagtttgattaccctttgtggccatcacatgaatatcctcttttgtgttcatcatcatcagcaactttttatggcaatatggtttgtgatatgtagtttctgatcattgtagggtttgaagaaataagtcaggaaagaactatgatcagggctttcccaccttctaccgaggatgtcgagacgcccagcagattgtcgacaagatacaactgcttagaatctgcttgatgtctacttgttgtttcatgatgatggttatttgttggtatgtgctggctaatagcctaacactttgtgttgttttcggttttgatggtgtggaacacaaagcgtgggaagtttattcaagtgcaagatatatatagtgctcctttcttaagtggtcgcctaacatggcttttcttgtagcttgcacagaaggacctactgaaaatcaactcttttgaagctgttgcacactcattagaaacctgatgcatcaaagtcaaatgaccatattctggcaggagcagatgagttcttgcctctcctcatgtatgctacaatcatggtaagctctactcaatttcaactttctcaactatatttcatcttgtgccctcttcaatctaagaaaggtctagatgtaatattttaattatttcggtgtaaattctttccaggtcaagtttccatttgatgtctcaagcttgcttttattattatagatctttttttatccttaggaaagcagtgtatttatttttacgttcgatatcctatttctctgtagtgattattgaaatacttactatgtagtaataatttacttgatctacaattgcagacaaatcctgcgcaccttgcattcttttctcaagttcatccatccaattatactgaaggaaggcaaaaattgtccctgaggataaaccttgtctcggacaagtcatttaagaagttgtgcagcaccgagtaagaaggtagaatccggttcatctaccagtaagtttgttcaaattatttgcttactagttttgatattttggtatgtgaaaagttaataatctattatagttggtttctcttgtatggtttaaaacataaacagatcggtatctttgagcttcttgattgctcataacagatctggagtacccccataatatggaggcagacgccagtgacctggttctgaatgtggaagatgcttagagattgctgactatacaaggaaatgctggtgaggcttatgaatgaggagcaagtaaaaaagaagaaggaaaggtaatgcaaagcatcccaaaacaaaacattcgactttcataaatgtcttaatcccatgtttacataacacttttaagcttaggattgaaatcttgaagtggtcatgtgttagttacaatcacgggtagaaaccttaagccatttgcagttttgtgcctagataagaacctatatacagaaagatcataaatacagtcagcctactctaagtgttacggataaattagatccactgcccatagcagctgactcacctctacaaacaaagccagctttgggcacttgactagatccacgctcttttttagattgctttggtttcttgctgtacaactcaatgcatctgaaacaaaggaacttggaaggtagggcatcagcgttattgatcccaatacatctagtgtggtgccacacaccacatccatcacaggccaacatcctctcgccatcatcatcctttgtgccacacttgcaatcaactttccaattatccacccctctctccatgcggtatctaaggagcccgtgttttgagcatctccctttaatccgtatgaccccgtttgtgccaactagaaatttcagggtaatagagtcatctatagaaccgtaacctaggagctcctcaacttcaaacctcttgaacattgcatacacttcctgaaaagccttagcagcttcgattttaaggtcggaaacagtagcgttcaatggcaaaaccaaccgttcaggtggaggggctggggattctttgagttcatccgaaagctcaacacagcaccagaggttgattgcaacggggttcactgtgctagacaggtaatcttttatgaaatgcttacagtccagtatttttgtggctgcgtcaatcattttttctcttgtagctcgagacctaaactcggccatggtttgtgggtgcaataaagtttcatacaaatatcttaaatcctgtttgacatgctccactgatgcattatttacatcttgattagataagcggtgcacattgttgacagattcaagcctggagttcatatgcaaaggttaagattattatgcacactggaaaccaaccaatcagaataagaagaaacatctcttgtaagtttacctgtactcaaagtcgtttgaaccaggattgcaacgtgagctgactactcgagatccatcatccaccaaaacccctccaaaatgcttgagacagtaatcaatcagttgtggagaggctgatttgcaaatagacctcttgagagcccaccttgtaacccagttggcttgtgggcgtcctgaagctttcagtatcttaaccatggtttgctgtacacgttccacatcacttttagaccaagcacacagtacagacgacttagatgcaggtttggaactgttctcacgaatcatctgtaggagaaaggagaagaggtctttgacagtcacaagctctgaacacgagagtgattggtagaagctaataatggagtggagctgagttcttggtttcctcccctggaacaaaaactcagagagaggaatcgcagataaagtatccactgcactctggtaagcttctttggtgagtgcatagctccccgatttgaattcataaccccactcactgtaccacgaacaccctctagtaatcccatgaagcaaccggtagtccatcccatacttccttgacacatccatcacactagcttttcgaacagcaagggaggaacaaagcctatcccagaagtccataatggcacgaccagtcaaaaaaccagagccaccttctcttccattaagacacagtagatgagcgtagccattagagtggataacgccgtgaaggaggtgagtgttatcctctagctgagagtaaacccagttttcaatgtctaaagccatgctgcaccatttgcaattgctaccttcagacaaattctgagtattaccacacctcgtgcaagccttagtgtctcctcctgaccttatgatgaagcggtacctctttctacacactggatgactactccaaccttcaaaaccaacagattttctcagtctatgcatgcaccatatcaagaggtaagagataaaaggttgaaactttttgaaatttaaagagggacaaagactcaccaacgacacagcagtgttcacagtaaacagatctagaggatctcgtcacatcctcctccacaacgtcgagagagacgagtttagaagagagatctgaaccgtccgtcgaatctccaggtctaagcatgatctgccacgtcatcaaactcgagaagagcgtcgaaggagggaaagtgacacgcgcgtgggtcgcgaggaaggttctcacaccgtctcggaacggcggcaaagtcgtcgactcgccgttgatctccgccgtcgggaaagtagagaaatcgtaaagatcagctgagattctgttgctacgcctcgctcgcttcgtcgcacgaccaccgttcatcaccgccatgactgtgtaacaagggttttttccgacacttaaattaaaactagaataagagttaaagatacagagagagagatttgagatagatacagaggaggggagagagagaaggtgaagaggtttaaggagagagtaattttggcggagagattttccctctcaaaagttttggaggattttagggttttggggggtattgactaaaagcttgacttgaccgcttctgatgggggaaggaaggaaggtagatgctttttattttccttttctctactcaccaatttcgggagagagtgggtccccctgattccaaattcgaggcggtttcgatttctttttctccacgcctttttttgtttttatttgtttccctattttgttcgatttcttttatttcaataagttagctaattaagtccttttttgtcctcaataaaaccaaagctaattaagtcctatccattatccagttccgattgtgacaccttctgttttgtagaaattctaccccaataagatctctcagattcaatgatttttgttttaattaagttataggccaatgatttattagcaaaagtccaaaacaaataaaaacacaccactgacccagttaaaatataagatttctttctatttttttagttaagaaaattacaacataaattattttattttatttttgtcagaaacaacataaattatttattatctattattaataagattaatgtgaataaaatattcgattagttcagcttggattaagcatactcaatagaattattgttattattttactttatagctttagttttccgaaatcggcataatatcccataaattccaggatttaccatttaaaattatctcctttcttgctaaaataaacataaattcatgactcttaattgcaaatttgaccaaaaataaaacccataataacttaatcaccaaggttccaaaactcataaccaaattttccacaccaaaaaaaaaagtcataccaacaactttattactatagccttcccttattcattcaacgacatacttatcaaactaagcaaaagtagctaagtagtaaaacaagctcagacgaagaagcgaaaattagctagaggagtgtctccttcagcacaagctcgatgcacacgagccatccggtcaacggacttacaaatcccgctgcaagaccaatcgaacgacgcagcacatacgttaccagcttgtgctttccattgacaatcaggtggagttccacaacacattgacctctcgtccacatgctccacttctaaccctaacatccatgctcctaacgacacatcctcgttcgcgtaccggtgtagtattcctctgcggatatgtccaccgaatcaaacctcaaaatctgaatacttttacgtatatataacatccttgaatttgaaagcccttactggttagtggagatatatgtagctaagtctttagagattgcgtaaatttgacctgttgcatgcctaaagtatttgttaccttcttctccaaatttccaaaactctggctcgtggtacttcactcctctatacatttccaaaaatccttactttagttcagatttttatccaaaggtttcaaattttttgtaaagaagcttacttttgtgaaagaacaggaccagacttcatgcatccaatgtaaatccttggtcttgattgatatctcgcaagtgttgtaacaagcatacctaaattgacatgaacatcatcatccactttcacgtagaactctgcgtcatacattgcagttgctgttgagaagtacagtcttgtctttgtcgagagttggtgatatccttcaatgtgttttagtcttaagaaatctttatgctctgaatcttcttcatctatggctttatctaatactcctcctggtgttgcactgtgtcctatcacaaacctgtcaaataaaaatccaaactttctctgtttcatatgactgaggtttggttgtttagatttttaaagtagtgaaattgaggatacttgtggcttacttcacaaccttacaacaatccctttctctttctcgattttctttagcttttctcctgttggcatccacgtttgtctcaccgagtcacgtcttttcttgctgctgaatgctgtgttaatgcctatcactgcaaacactttctgcagacggctctggtttttcgccgaccgttcgctccagaactcactgcttctatcgctggtacgtgctgctgctaactccatctccaatgttgacattgttctctccaatgatctaataatataaacacttttagtgttacctcctctgttctaattatgtaaagaaacacaagaaagaataagattttattactttactgcttggtgagttctcgatacttctcctattatgtctctggatttgctttctatcaatttctgaatcaacaaagagtaacacttgttgttagtgagtaatatatatgatgagcatgagcaggtgttaatcaagtagccttacgcgtttatgttcatcgcagtccttttgaatctctaaatgtttggacaaatgctttgtgagatggtgatcttcttcttcaggtatgtaagagcgactcaaagttcgactcatgaacagtgagcctgcaagaaagctggctagacaaagcactattatggctttccccgaagcagctttcgccctcatctccgcgcctccttagtgctaaatctagaaaacatcaaataattgatcatgaattatgaggatgctataaacttcatagttacatagacatatacaacttttctttttctaatataatcaaatctgttttatatgataaaatgccatttgcaggagatttttctgaatcaagaacgttatggactaaggctatacattaaggaactcaaaggttagattcaatttttccacagtttcttacagtaattaggcttcataatcataagaactgataatttgaacaaacttgactctaaagattattgcgtgagaatcaagaacgtacctctctataagcgcatatgagacaccaaaaggactgaattttgagattaagaaacaagtcttgaatgttgaggagatgttatttatataaaatgaaaacaagaatgtagttgcagaacggcaatggcgtttatgttttgcttctctctctcaatctgactgtcttgtcatgcaatgtacatgtcccaactaactatttccatatagtatagatattacgaaacaaaaggagaaatcccacaaaaactatagttttggttttgtttttgctttcctttatttcgcaacattttaggttcttcacctgtgtgaatgcgcttagcgcgctgctctcataacacatgacaagttcttgatcagaaacctaaaactgcgtgaatgtggtatgaatgtaacctgacgttgcagcatatgttatatatgtacatactattgtagaattattacatgaaacaattctcttctcaagtttcaagtgatctcctacaaactaacctggcatgcaaaagctatgttttgcactgccatttgcatttcacttataattcctagtgaaagcgaaacacatgtctaccaaattggttcagccttaagcagccttttagatatgtattgttctaattaaaaatttggaagactaatgaccatacggaatatagtatttttcttttcaaagtcaatgatgatgttccgattacaaaaactcatatattaagatttagtggtgaagacactatagttcattgagctgcagcaatggagcagtgtgttgtgtggaccttctttgtcggaccaaaggttacaaccaatgatgcttacctcactatatcttatacctgatgatgtcaatatctatgggaatagaccatatctctttccaacttattaagtctatggactcatcatatggcttaaaagtcaaaacataggagagtttgcggtttatgtttaacgcagcaaccgcaaagcaaaaacgttgttttaggcagtaataccggtttgcgagactaaaaactttatcagtcagatcacaaaaccaactagctttgatacattattcattcaaaagacaagttctccaaaccttttaaactaactcttcatcattacaaaccccgattttaaatttaaaaacaaaaaaactctaccccgccgcttctaaaacatatgattacaaccgtattaataagcatataggttacatttttaattacataatgcaaacttatataagatttatagaattgagtatcgggcacatgccccacccaagaccaacgtgggtccgcccctggttacacttacacaacaagatggtctaccatacttaattagtcaaattctaggcttctccgtcgtggaatccttgatttcgccattttctaaagcctccaagctattgacttcggcgctatgatgtgtcgcggacggatcacacgaataccatcttgaccagaaaagataattaaagaagttgatgaaactcaatgaagctaaaagccagtaaaagtgatctaatctatctttgttaaggtcattatcgcctaaccaaccttctttggtcccggaaccattactagaagtaactctattcacggtcgagacaagaacagagctaagataaaacccgaaagagtaagaacagtatgtcattgctgtgagaaaagattgcatactctgtgaagactgtttgtaaaaaaactccactaatccaacggctgtaaacatctctgataaaccaaatatcagaaactgcggcgcgatccaaaagatcgagagcattacgttctgttccaagaacgattctcgtctcttcttctccactaaagcggctgcaaccatcgagaaagttgctaagaacagtccagtgccaattctctgaagaggagagattccagaatcgtttcccgtgagttttctagcgagtgggacgaagaacgtctcgtagagaggcacaaagaagatgagaatgatgtaaggaatggcttgaagagaagctggtggaatttggaaagtttttgtaatgtgtgtgttcatggaacttccttgctgaacagagaaagtttgaagctgagctaagatggtgttgaagatgatagtacacgcgaatatcggtatgactgataacaatatcttgacttgatggacttgttcgattgtgcagagtctccatggactctccattgccttgccttgcgtcttgatgcaagccttgtcaagaaacctgcacgtcaagaaaaaaaaaagttagttagttagttagttagtcaatttggcggttattgtaaaaaagatcaaagtcaaatcacctgaatttattagaatggaggagaggtttgacacgaacaagatccgttgaaggttggtgaaccatgtttgggtttgatgggcaaatctgttttcgtttagtgatcgcggctacgaagacctgatcgatcgaagaataccataaaatcaagataagatcaaactcttctaaatgactcaaaatgtaccaaagaccaatgtttgaatctatatgtgaaaagaaaacatttttctaaaggttaaacgcaaactagcattcgattcttgatttacctgagcaattggtgtgaagatgctaccactaggcggtttattcctataaaagctagttccagcgacaaggctgatcatccccgcggccataacagccgcggagacaccaaaaccaacgtccataccagaatgtgtttgcacccaaactaagagtgtgagtgcaataagctgacccattgagaaggcgaagtaagccgcattgaagaaactcgagagcttcctcaaatctttcctttgaaactggtttgcaccgtgagagatgatgttcggtttgaggcagccgctccctaaggccactaaacagagtgcggtgtagagagtggctgccttgtaaccatttgcctctacgcaatgtattgtggtgctcttcatgttgcattctggtggtcttagctctgggagatgagcttggactgacaataatatgaaaccctgttttatcaatttacaaaaacatttgtcagccaaaacttctcctagttttgtcgaccacattattttagtctttggtcactaatatttttacctataaccaaggaattaaaagtcaggtgtatgtattatgaagccgtaaatttcgttactatactattgcgtggcgttaactagctcaaaaaagaacactatactaacaaattatataacccatttgcttttccaaagaaccgaaagatttaattcataactcactttaattacaactttctgttaaagttttgaacttttgtctataatatactttaaatatcccgttttattcacaagttactagttagagatgaaaagtgaagtagaatattcaagagcatctaaaatagaaaggagaaaagagaggtagagaggtagaggaacatacagagatttcgatgacgccaaaaacgagcatggtacgaaagcttccaaggtatgaatcagagaggaagccaccaagaagcgagaggagaaacaccgttcctatgaagttagtaacgaggtttgcggattttgacaaagggaaatgcatctcattgaatacgtatgtgatcaagttgtttccaacagctgcgatcgccatcatctcgaaagcttggaagcctgaacatagatatatgtatgcacaaccaatcaatttaactacatggcttcaaaatgcataacatggactaattcggccataagcagcatatatattggtctagccgatatatacatagttaatgtttacgagagaaggacaaggatacctagaacaaagagggcagctcttgtaccaccatgcttgcttggcctgcatggccgacctcgaaaatcaacacaaagatcgtccaatgattcctccgacgtgtgtattactcctcttttggcttcttcagatagatcatgaacatccatagctctttctttttttcttgtattatgtcaaacaaaggaagatataagtttggctttaggagttggcacaaagttaaattaactaggtggggagcgaggaggtacttataatgtctcgttcatttttaaaagaatcatgaaagagaaactagaaaaatattatccaatattaatcaactatttctacattaatttttgttagaaactagacttcaatatcaatatccaataaatataaatctttctaataaaaagtaaaaaaaattcttaaatcaacttttgtgtaaaaagagaaacaatgaattcttatagagaagttcatttttaaaattatggttttagttattagaaaaatatcaaaatactattgaataaattgtgtaactaatttaaaacttaaatatatcaaataattaagtttactaaacttcttagtgtattagagtagtgggaagaaatggacccactgtccaatatgtttaaaatgcatcatcatcatcatcattacaagaaaatttcaactttggcctgtggctctggggcataaactattgtttactacaatgttttcttgacatttacggctgaatatatatagttgcgatttgattatgatgacaatctttgacgatcttcccttcccatcaatgtgagttcaaccctttccgtcagtactagtagaaacttaacattaaaagaactaatcaagtttacaatatcatcataatttaattttaagaaaattttatggatttcacaaaagttgataaagtaattagaaatctaatgtacatatttatatacaataaatcaagaaaatgatggatgtggtgaaaaatattttcaatttgatctacaagaaaaaagcttaattccaacagctatctatgcggttaatttgtaagaattatatgtttccaataaattttcaatagaacatatatttgttggaatatgatcgttggaaatctgcatttatcacgaatttattggaaacgtttccattgaataattatatgaccaatttgttggatagttctgataatttttttgtttgacatttgttggaatttacggtgaagtttttaacgaattgttccaacatatattttgttggaatgtcattgataatttgtcacaaatattcaacaattctcaatgtttgtttatgaaaaactactaataacatatttattgcaactttgttgaaacgttttcaagaaaacgtttgagaaatttctgacgccttatttgttggaacttcataaaaatttaatgataatttaattgttgaaaatttattgataactttccttataaatttttgaaaacttctgatgatttaattgttggaatttaattgttaaaattttatcagaaattaatcgttgaaaatatgttgatatattctacttcttaggttaacctcatgctattagtatcgtgtggggaatgcaaagtggcatacgtgagactataataatattttactcatcgatcaaggcttgtgggatctttttattcgtcttgaaagacaaatcaagatgtagttggaggcactacaaatatccccatcccgaccataccattcccatgacaataagtagatcagatcttctttttcgaaaatgattattccaagtgattctgctatttatatttcttttgttaggtacataggttgataattaagaagcatatgtgtttaaccataacgtcatatagatattgtgaaagccggatgagaaatatttaaaccgaaaataagaaatgataaggtaggtatctttccatgtgtcgattagagaaagatgaataaggaaatcgtttgagacaaatggttccatgtggcttgtatcctttagatgaaaccatacctattcaaataaaatatcatgcattttatgatatttattaggcccgatatcgcatatcttgtaggcgaaactaattacttcttatatacatgcacaaactgataagaccgaaactttcatgatatgtatattatacagcttattgtgcttacctaattggaatttggtttgcatgaagtgatgctctaccgaccgcataatcaaacaattattacatctgattccatatttctcattgcatacacaaaacaaatgatcgaccaaaatactaagttagttgttcaagtttccgctactttctaactttagatgtggaacgaacctattcgacatttcctagaaaactcgtccaaaaccaatcaaatttaaacggctaaccaaacagaagtcaaatgcaaccagggacaaactgttttatttagtctactactcaaaaccaaacatgaatcttttcatctagacaggtccccactacctttctatataaattgtaaaaatggctagaagaagaaagctacttttacactatacttataatagtcaaatcagtgaagtccaatccaagcaagcatcacaaaaggggatatgaattgaaaacgaatgaagagacgtgtgacatattctctgatgtataaacttatgtaatggatacaactgtaccccaaaacttcactaaatctacaatagaatgcacactatcaactacatgaccttcccttgatcttttctattttaatctcaagccgtttatatacatttattttcgttcactataaacccttttgttggcatgacatactaacaatttaaacatccataatgcctttgtgcatatgcgaccaaattcaattatgtatattcccattcgaccaaataaaactatttacaaccaataataatgatttctcttcttctatgaattcaatcgtcatctatgaatatttttcatttaatcagtatcttaatcgaattttccatttaaagtttcttcttcatatctttttatgtttttccttcggcacttatgctccatttttcctttttgttttttgaatatcaagaggttttggactaaaacccgtaattttcaagacccaagaccagcatgtaatattagatttgtctcatatctctcttttttttttacagaatatcttagtattttcacgataagttttaaaaggcgacaatattttttaacatacgcagttgtatcttctttttttggatcaaactatagttgtatcttaaccgtaagcaactacccgtctacacatccttatagttatatacatacatgtactcttatagtctcattgactcacacacttgcgctcgtattcatgtgtagataaataaatatcataattggttagacaaatcgagtggtgattaaaaaaaaaaacagaacagtagatggtcggttttgtttagtgtttaagtgaagaataattcttcttcagctgaaactgcgttgacattttctcatcattattcattttctccccatcttttgccctaccactccactctcactctattagtgtattacttttagtgttgtatctatgtaacgcttgtgcttccaactatacaacaacaaaaaggtgaacgaagttgatattggagcttgcctttgtgtattgtgttgtataaataaaagtcatgattggtggtcaaggtcaactagtataacaagtcacgattggtggtcaactatgccattatatttgataaacattggcttcaatcttcttccaccatcctaatcactattgctaacacgttacacaactttaacgtgatagacagtgatgagataacagaaaatgaaataatatttggaatgagtgtgtgtgtatacatttgcgtgacctagaagcaaatggtcgtgcttgttagtttaggtatctctgttagcaatgcgtttttcaaaacattactataatccacataagttaaaaggagagaagcattttcccattgatagatatagaacttgtaacatatataacactggttaaatgtaatatctacacaaaagtacacacagtattgtcgggtcgagtttaattagaacttaatttactcataaattctttcatttggacgatcgattgtatattcatagcatttgggttggctaataataagctcttttctagaaacaactctgcactaaacattcattttctagctcccacttgattatgtataaagccttatatcgtgcacagtcccaacaactcgatcagcgggagaggaagaaactttatataagataaaacctttataaaatttggtggaccttgtttcttttattttattttataatgaacaaaatctgaaaaactttataggagatggatgatacaagaaaacggaaactagctagaaacgagattcatgccatttgaaaaagttttgtttttattccattgttatttgaaatctaggacgagcatataaaaatgattatgaacgagaattaaggccaatcaaattccatagttcaaatgctcttaaactcatacagaaacagaaagcaattctaaaggaaatgcaccttaactattaaaaatataaattaatttgacaaatataacttctaaaataattctcacaagactaatctctgagacatatagaaaacaagtatttgggacttaatgtgtctatcgtaaccaacgagaatcctaacaagtttcgtagatactaggactcattcttttacctaaacacacataacgagtcatgttccactctcaaaacccacaagtcttgattttcatttcatttttcttattttatattaaattctttttatttaagaaatgtcaaaaattaaaagtcatttcttaagcggaaacgcatatacattatctgaaacgagatatttggtaaaaaggaatagaacaaaaagggacgggacatgacttttgcccatccttagttttagcctttagagatgcagcgtgatgaaggggactgtgtttggtgtgaaaattgtaatggtaatggccagcattatattgagccttttgatttttttagctccctctcacttctataattaaacttttcggttttgtaatggtatagataaccaattggagaaattttctatagtttgtcaaaaccctattatatggctccaatccattaaaatatatggaccaggcataagagtatcttaacggattaaaaaaaaaaaactatttcttataaatgtgacctaagaaaatctttgacttctataaagttttatatatataacttcgtataaacattttggagctttgttgttgttgtgacttgtgagtcccttttacaaaatcttttcaactttttgcgtcggtttgattaagctagccctaattaacggatgcaagactcgttaatcttcactcttcacattacatattttaccttttgttataaaagaactagttatccttgaagattaacataaaaaatataagacatccatttatatggtgtaccataaaatagaaactttctttaactatacagatatcaagtttgaacccggattgtgaaaatgtggtattttaaaaaaaattgagatgcaaatacttgtattaaaaaaactatattttgtaatatttcttagaaatgagacctaagaaacatttatacgtaccccttactggaaactttcattgttgtggttttatagacatggccgaccctgatatttatgcatgagatcaaaaacaattacggtttggaaacttcataatgtatttttcttttcttttacggtatacatattaattcgttaaaatttaggtccaaagcgaatgtgtcatcttattgtccttggaaagggccctggttagaggctaataatatgtatatatacggatagtcactaaccaagtcgaaatctttatcttgcatatccgtctaattaattaaaggtatatatatatttccgaataagcattttggtgaaatgtagcttcggtgcaaggatctcttttacaaaatcgtttcaactttttgcgtctaattagttagattaagttagccctaattaacggccgcaattcgccattcttcaccgtattatatatatcacgccagttatatacataaagaactagtttttccttgaagattaacctaaaaaggaaatcaacaaagttgcgttagtcaaaatttcaaagaaaagtcggtggttatattccaacataaagaaagagagacatggagagggaattaactttaagagagatagattcaatataagagaccaattaaatttaacaaatataaagaaagggagatggcgttgacaaaacgaaaacaaaataaaggatgacgagagatttaagaagaaaaatagatatttgggattagtggtgtagtgttcctatttggttgtacatctttatgtgttaactaggatttaacccgtggtataccacggaccaaatattttatttatatatataataatattaacttttaaggttttagtttagtattaaggttatatacttttatattaatgttgtaattaaaaaaattggtgatgataaaataataaaataaatatttaacatgtgttatatcaatccaaatccgttctgctatatttcatatcaatgcaaacccgtcccgctatatttttcgtctcataatattttaatttttttataagtttaaatattagttgtgaaatagttgtgattgtgattttatgccgaaaaagttatggacttttaatttcatggaatattcaaactagtataaggaattttttttaggtgcacatataagtgggtttgctcattttctaggatcgtaaatgtattttggtttgtttcataatgtttgttttaatttattaccgaaatttaatacaaataattcaaatagttcaaattttggttgttttaagatttagtaaatattgtaggtgagataaggagaagataatttattgtgttttgcgtgacatataggattgccatatatttcgaatctttttggtttgttacacaattaattgccgtaaaaaaattcaaaccattaataacaaaaaacaaattcaaactaatataaggatttttttttaagtgcacatataaatgggtttgctcattttccggaatcgtaaatgtattttggtttgtttcacgatgtttgttttaatttattgccaaaatttaatacaaataattcaaatagttcaaattttggttgttttaagatttaatgaatattgtaggtgagataaggagaaaataatttattgtgttttgcgtgacatataggattgccatatatttcgaatctttttggtttgttacacaattaattgccgtaaaaaaattcaaaccattaattaaaaaaaaacaaataattaaaatccagtggcaaccattgtaaataagtctcaactccaggatttattttacaaaatggctgcaaaaatgtatatgtagatacttaataccacaacaacttttaatagttttataaacacaacaacatgttttgtaagaaaattacatcacatgtcataagtcataacatatatccaagtatccaactaagtattgtgtggaacagtggaagtattaacgaaagtattgatatctacataattatataaattacgtaaaggttgtgaaaagatgctttatgcattagttgcctatttttgattatgagaatttataaacagtttaatctttttataagaagtataataatatttttgttattattgtggatgagatttgagttctgcactcacaaatgttaggattaagccatgcaagtgtagaatcatgtttcatcaacagaaacacaataatcaacaaaatacgtagccaccaaaattgtattatcttacaattcatttttcaactttttgagttttgagtcgagtcttatataatctcatgatcttaagtatagaatttactaatctcattcacgtaatgtcttaaacataaagatttgaatgctaaactttaaacacaagagactttcaactatgagaaggaaaatagagtgagaatgtttcaaatctcactagagaaaaaagattacaattttatcatcaaaacatgatgatctccacctactctaatctaataaaaagtgaggatcatagagttgacataattcttaagttgatctctcttgcatgaacataattcaagttgagaagatctttagttatgttcatgcaagagatcaatttaagaattatcatcaactctatgctcctcaaaaaaaaacctatgatcctcactttttactaggaaaaaagaaaaattctgctctcggaaagaaaatagaatactctaaataagcccaaaacgatcaaaacaggcccagagtagtcattataaggcccaatatgatgatttgagatctgaaagtgggctccacgatgagctgtaaaaaaaagcaatgcaaggctgtgggataaatgatgatgacgtgaggtgggccacgtgggggaaggaatgttgttaggcttttttttagtcctaaaggcgtgcggagacacctctgtctctttgctctttttctcttttattactcttttttttttcttttcttttccattataattatacacctggctcgtataatctaaagttctactaaggttggctgattttcgagccataaactatttcgattctcagctttcactctcagacttttggacccttaaatttccaccatcaactttcatattcccaaaattacatcatctactttcggattcatgcttaaacatacatttctaattgaaccattcatttaaccaggattaaccacaaatccgcgtttactgtaccgcgattgcgattaacccgactaatacccagacccgttaagaaaacgacatcgttttcatttcgtttaactcatcaaaaagagaaagaaaacgacgtcgttttcattcttcttcttctgcaaaatcgatttggtcgattagggttcttcattcgacaattttataagaaaatgagcaccaacagctactactcatccgcttccagttcaggatttcgtgtctgtcctccttgtgtcccctcgaaatgttggtgtggagaagagatcattacattcacatcgaaaacaaaggagaatccatacaggagattctaccgttgtgcgatagcaatgaaggtacacatttcgattttgtgatatatttgattgattgaaggagtaaatgattggaaattctgttttatagagagaaaatgaagagcacttgttcaaatgggttgatgaagctctcttggacgaaattaagatggtaaatgagaagtgtaagagagttgcagagaatattagtgacctcagaatgaacgtgatggctaatatggagctccttaataaaaacggtaagcagatggaggaagagctgattaagaagatggagggtgaactcttgaccatgaaggagaatgtggaagagctaggacatgttatggcaaagtcagctttgaagactgtaggggttgctgttgtgattgttgcatctattgtatggctttggggaagagtgtaggtgttgttgaggttttggagtgaaattgtagtattggattagtctctgttttgaagcttgtcagggtttggctatgtttgtctttgttttggattgtgtaagtgtcgagattaaacgatggagggtttgtgaatctatctatgttatgtcttatgtgtctttgtctaatgtgaatcgatgcataacataagaatagataagaatccatacaaaagagggataaagaacatcctaaacattaaccgaataatacatcatcctacaaagcctcaagaggataaagaacatcctaaacattaaccgaataatacatcatccaaaatagacaaaagaggatgaagatggttaagattgttccaaaatagacaaaagaggattgagaactagaactagtccaactggtccgattgatcccattgactgcttctctgagtgagtgtgattgtatcagctccatgtgttgtttcttggagctccattgtaggctgagatgttccagcctcctaaaacagaaacaacattcaaacatgagcaccgaaatggctaaccaaacagcagcctaaaacagaaacaaaccttaatctcttgattcttcttcttcctacccttcttctcctttgggaacttcttacatccagctgcattgtgacctgcttcaccacatgatttgcaatgcattactacgcccttctttcctacttttaatctctgtggacccttcttctttggtgactcatttggacccttgatccgatgatagttcttcttctcacctttctttctcccaggtggaacaggatcttgaagtggtgcagttattaatcctaaaccagtaggccaatacatttgccctctaactggatccggcccggtatcatactgttctcgccaagcgatagtgtaaaacattggaataacaaaatcttcaacatccttacccacatcattgatggccgcataggcatgttcacacggaatccctgtgacttgccatttgcagcaagagcaatcccactcctcagttttcaagctcacagcattagaattcccatcaaaccaaacctcaaatttctcatgcgttcctttggtcacttcacatttaacagcaagttcccactcctctttcagaatctctgagacatactcagatatcttcttcttccatttccctatcttcgcctttctcttacttatacgtgccatagcttgtctcctaattgtttccatcataggcaccaatgccttggccctagctttgacaattgtggcattgaaagactctgttgcattgttgtctacatcctcacagtagctgcctattctaaaccaagatctgcaccaagtatttggttcttccttcatgacatcctcatacaaagacatgatgtaagctctcatctcattgagattagctttgtattgtgtatcactgtaactccatgctagattccatacaaacttcttcaacaaatctaatgaaccatgtcgttttttcagattctccactatatgcttcacacaaggtctgtgttcagcatttggcaatgcattcttgacagcactaataatcccctgtcaaatacaaacacattagcatctataaagcactatcatctatacataattaaataatcagacataagataatactaaccttgcaacgatctgatatgaccacatagccactgccatcctttagttccaagtcatgcttcagctgattcaaaaaccagagccaattctctgcattctcaaactgaacagttgcccacgccactggatagatttggttgttcgcatcatgagctatagcagtgagcagacatcccttaaccgcatgcttcaaaaatgttccatctatcccaatgagaggcctacagaagtaaaacgcattcttcattgctccaaaacaaacataaatccggttgaagacatcattctcgtttgcatccctaatggtatcaacaattgcagttgatcctttgtttgtactcaagatttctgccacatagcctcgaaggtgtgcaaactgttgggcatattcttctttcagccacttaagagctagaagtcttccatcttgcacttgtccaatagtactaactagcttccattgctccttgatatgcctctgaatgtcaagaggcatgaaattaggctgcaaccttagcttatccataaacaatctaccaatcactctcctcttcaacagcttgcattttccattagaagtacaagaatgatccagacatttggtcttcaaaacccacaattgcctctcgtgagagtatgaggcatagacataccattcacactccttcctttgagcacatctaaagctaattttatctttttcccacctattttgtttagcatttatcctatgcttcattgcataatgcaagacaacctctttgaattcaaaaccagtgaagaatgttctgcctatagctaacctatcatccgaagctaacctaatcttcctatctctagtgatcacatgatcttcttcttcattatcactttctggtatttcgttccttctaatctttaactcatcataccacatagctactgcttcctctatctcgaactcaaacctctcggccaaatcttcttccggctcatccttcttctgttttctcctcttcttttgaccttcttcagcctcttcctcctttcttttctcttctctcgtcctcttcttttgactttcatctctgtctccatcgtcttctagattgatgtctccatcagacgctatatcaccatcgtcttctctattctcctctccatcagattctctgtctccatctatcccgacgtcgtctccctcaactccggtggcttcgtcctcctcgactccgctatcaccactatcacttccatcgtcggcttcaatgtcactctctggaggttcgaaatcggggtcatctggatcgatttggtaaatcaatccttcctcccaccaattcttcatttctccctattcgaaacccaaatcgagacccagaaattcgaatcgaagaagaaaaccccaaatctccttttgtctttctctctcaagaaccctaatttcacagtgtcgagattaaagaagaacgaccaaatcgatttgagagttaaagaagaatgaaaacgacatcgttttctttctctttttgatgagttaaacgaaatgaaaacgacgtcgttttcttaacgggtctgggtattagtcgggttaatcgcaatcgcggtacagtaaacgcagatttgtggttaatcccggttaaatgaatggttcaattggaaatgtatgtttaagcatgaattcgaaagtagataatgtaattttgaggaatatgaaagttgatggtggaaatttaagggcccaaaagtccggggtgaaagctgagaatcgaaataatttatggctcaaaaatcagtcatactaacattgtaatacaaaacatgattttgtaagattgatctagttttagaaaaatcacttttggctgaagataataggaccgactttttcttgttgtagttgtgagatctcataaagaagaattatagacttaagtgttatattaaccaatttttaatttaattcttcatatacattatctatcttattaagtttggctggaaaaatctgtaagtcagtaaatgtttacttcaaaatgtagaattcataattttgtatttagaatagtagaatttatctccaaattagtaaactagattttagattgtcatgaaaagtgatacaaaccaataatttttttgtaaactaagatagtggaaaaatctgtaagtcagtaaatttttttgtaaacgaagaccaataattcttcataattttttttaacgaatagaaaattaataagcgttatagttaaaaacaggaaggaataatgatattaaaaaaaaaactatttgtaaactaagattacctttttcgtaacattttgctcatttttttttgtaaatgaatgtaaatcggcataattttaatcactaaaattctgaaatattttgctaactatcaatcaattttagatttgatttgatttacatataaatatgtaggctaacacattaaatcatgttctaagaaatatgcatatgcatgaatcatttgatgtcttacaaataagttacacaacttgtgtgcaatcataatatggattcttatgaagataataaaaaattaaaaggttggtatattaatttttttgaccaacttttgtgaaaatgttaaaatgctaaatatattcagtagttcaacttattttgagggatatgtaaactaaaaaaaaaaaaaaactcttttgagctataatttaatattggtcaaaaaaaaatgtatttttttatatatagtatatctctgttagttatatttttttttttttgtgtatgttatttctcggttagttatttgctaagggaaagttttttttgttgaatatctttttttggtagaattaaaaatacagaaaatttcaattttaagattttccaccaatataaaagaccaaaaattaaataatagctaaaataaatgttttccaactgtaaatctattttacagagtggatccgaccaacaagaaaaaagtgtacaaaaacacacagtgaccgtacataaaataaaaaaaatgtcattgatatttgtgaaaagctaagttaaataattcaatgagtgtgtccccaaattctctcttttttccctgagacttttccttgaatcctcttccctcctccttcttctctctctctcgtttctcaactaccgtctctctgcttcttctgttcccaaaaccggaaactttacttcgtggaattttcccttgtttctgaaatggaagacacaacatttaccaaagtgttcgttggaggattagcttgggaaacacacaaagtctctctcaggaattactttgaacagtttggtgacattgttgaagctgtcgttatcactgataaatctagtggtagatctaaaggctatggctttgtaagtttcttcttcttcttgtttctttttactttggagatttgttatagcttcaagctcacgggttctgttttttttttgtaaaggttactttttgtgatccggaagcagctcagaaagcttgtgtagatccagctcctgttattgatggaagaagagctaattgtaatcttgctgcttttggtgttcagagatccaaaccttcttctcctattcatggtacttttaggtttctgtcttttgatactttacttttgaaaaccctacatcaagagtatatgtaaatccatggatcttgctggaattgtatgtcttgaatcacatgtctcacatattagtagcaaagttagatactttatgaattgtcttactttattgtttgaggtatagcttcatcttgattccttagttgattcagtaaagccattttcttgctcactagtctttataattcttctgcagactacactagttagttaaatcttctggttaaatatgttgtgttttgttcttgtctgaaagcaaatgtttgagaggagattctcatgttgttgtgttatggcaggacatgtaggaggaagaggcatgaaggtgactagccctttcaagacacactttgggaccgcggctactgctattccttccccacttccattctcccactacacacttccttacactaatccttttgggtactccacgtttaatctcttacttgatttttctatactcatcactctacttagactgataaatcctctgtttggtttcattaaactttcttaggttctcttcatactcaatggattacaattaccccacggtatgtatattgtaagagtctctccctactctactcttatctcttatagcttattggattattgtttttacagcagagctattacaatgtttatggaggggcaactgctcagcatccaatgtatggaagcggaccaatgactggtgtagcagcagcaccagcagcagggttctacccatatctccagtttgctgaaggaaatggacctgtcactggttatgctcccctccactaccccaaccacatgtttcactattctgctcccgggggaaactacccgcatcacaatggttcaccagtgtctcttgcaccttcaccagtcataccatcaggttagtttctttatattttttcgttgttcatacacaacatggaaaactagaggtactgatgttctccagcagtttgctttgcagttccacaggcttgaccatgaaggctcgtggttcatagttccatgatgctatgtaggggaccaattcatttaaatccttaaggcaaagctttgtttactactttcatccacatgcctctgaagtttcacaagacctgtggcctaaccatggttgcccttttccctttatgcttctaacccattagacaaagaagcccataatttggagtttgggcgtctttgcaagttctagttaagtctcacataggggtttaactaggaccatcttcatacacattactcatcttttcattttattcattgcattacctgctttctgaacgaaggtttcgttcaagatagcttgttcgagctgtagaagtaaacagttaccgtcttttgcacagtgcctcgcaaaggcaagcaattttgtagaaaaacttaaaaacttaggattggctgatcaacaagaaaggaaataaggatttcccgggaaaggcacaagaagtgaattgccaccacctggaagtgttgaagtagtgtgtgcaaaggtgtgcacactacttcacgctatatccattttaatgtgcagtcttaggattattagatctaggaccatgttgttacacattgtcttgtagtagaacgctagaacataaacttcctttgaggataaaggaattgctaacacatgtatattctcggtggctaagctttggagttatagccacacttgagctaacttagattaagatcatttttaagattcaaaatttagattgctcatcatatcttgaaccaaccccactaatggattgtggggttcttgcatttgcatgtatttttgcctcttgggagatattttggttccctttaggttcttctcataacaatcaaccaaaccagttgaccaaccatggttaggaatttcaggtgagaggtattcatcacctctttatctctcttttgtacttctttcctctatttcttcaagactaaaaactctctttttatgtaatttgttgttatatcttgtaagctgtgtgtttctgattctatgtaagaaaactaaaagctttcagtttccatcctcggtggttggaaaatgaaactgtgattgcaatattttactttgatctgatatataatcctcttgtatgaggttatgacaatgtctcctactatatgaatccctactttcattatcttgatgccaagaggccttactacaatcattcagcaacagactggtttttatgtacaactataagaacaaaatcatcatattatacacaaaccaacgtaggaacttgagacctatacctaatatacaatcaacaatgctgcagaatatttcaaactgcaatctctacaacataactgcagaagaggaaaatgcatatggaagaataaatagatcaagaacgtgtacactcaatgccatgacaaatagccaaccaaacaccaagcagcgttaagcaaatagctatatcaatggcaagaacaatcttcacttgacgccgccacttcctctcaatgctctgagagccaccagatcgtccccttcttggaacatacgttgctgattcagatgaagcattagaacattctgttacgtttcctctatcatttgattttcggtgttcctctatctcaatacctcttagtgagtgcgcatgatctctccctttcttcttatcttgcttgttggatcttcctaaaagaggagctttggagttagatgcgtagctttgttcagcaccatcaatggaaggtgatgataatggaagacaagtgtgatcaaactctaatgaagctatgagtcttcggacaatttggtcttgaacattgctaaaactgatactaccagagaaacttcctctagaattcttcttattagcttcttttaactcatctctcagtttttcaagaaaatcaagaacgctagatttcttgaaaacatcatcaacaatggcgaaataaacgaagtcatctttcatcaagaatccaaaagtcttcttacccctcgtttcgaagtaccacttgtgaaaaggtggagtcttttccaagcataacgctgcaagactctcgttgttgcggtggtctccggcattgttgtaagcgtacataatctgattgtctcttgagacacaacagtagtgaactgtgttttggattgaacccatgttggaactttagataaggggcagcgatgagcaagagagtttcaaagaatatgtaagttatgaagtcaagtctctggtttaagatccttatctttgccaagaaacaacgaaaggaatcttgaaaaggactaaacagaagatcgaatgttagagaaagaaaaggtattaaagcagagagagaacaatacaagcttctcttacccaacctttgactctgctttatctttttctcttttctaataccttatcttcttgtttttgacttttttcagactaagaaatcgctaattcaggtaagctaagatcaaccctttttgaaccagttttgaatatttgattatctgctgattttgtagcagaccatactctttgtttttgcgcgcgagcaaacgcaaatgataatgggacaagtttccctgagaagaagtatttgccttccaaaatgtttgtttctactatggatcaatctctcattttcactcctagaaaatgtactagtgttacaagttacaaatgcaagaaagcagcaagctttacgggatatggactgaacacaaacggttaagcttaaccagttctacaactacaacaagcactcgatgtcccgatgttgtttcgttcgtcctcttccatttccttaaagccctctacatcttgatcacattgctgctcatggccatcgttaatgtggtttactggctgagactccggttgactcgagactcctctgtggtttactactggctgagattctggttgactcgagactccactgtggtttactggctcagattctggttgagtcgacactactctgtggtttactggctcagattctggttgactcgacacttcttcatcagggcttacgagactcggaacaggatcatcttggctttgacgggaacgactcgggattagagcgaggcggcaaagagggcaagtggtatgtgatgtgagccaaagatcaatgcagtccatgtgaaaagtgtgtttacataccgggatctgttgaagcttgtcatttggttgatagtccccaaggcacactgaacatctgtaaatcaaaagtccaaatcagtttattcagattctagtcatcacaagttggactctcaacatcagaggattagtcaaatgacctacactcccaaattatgcaattgggataacaactcttccaaactacacaatatacattgtcctgaaactatactaaccataatctcctacaattaagttatcatagaaacaactgttgtgccatttcaacctccatttcaatcaaggcagaccagaaatttcaaccattagagataaagattagaatcctctcatctttattcacttccctaatgtacaacataggtctaattcaatattcatgtaacctaattttcaactttcctatcactacacttactcctttttactgcaataacccttggaaaaacctcacctagagtggtgaatccttgagtgaaaaagatcaaattttggagagagaagaatttggaaactcactgtgaatccattacggtgaagctctctttaaagacaacaatgggaagcatctctctcagctctttgctcaatcctaattcaatctgtccatgtgacaaaacccactaatcattacacaactaaaccagataaagcacagatctttacaatgacaaaccaatcaaggaagcaaaaacagagagattagagtgtaccgtggagagagagttcccggggatgaaagtagttcgcattccaagagaagacaaatcagagctactacgacggaggtagatcaagtaaaacaagaagagaataataaatgtgaaacaaattggaacagaaaagataaatgcttgatatagtttaagctccggcgagctcgttgcagctgaataattttccgggtttgaattactataagacatcaccacacacaagacaaaactagacaagcaaagtctaaaaaccccaaaaagtctcctcctttgaatgaagaaaccagagatcgtcaagattcaagattggagttataaaaaaaacaataattgaaataatgtatgtgtgagagagaaagagagatgtggcagaggagaggtttcaggtgaagcatttagctttcagtatagggcaactgtctgtttccttgttatttttaaagaggaaaattaaaaaaagttagggggcattaataatgaatttgagagattattgaaatgttagataacttttcccgtagattctggccgaacaagcaaacaagaaacaaagaggaggggaaacgttattacttgcaccgatcataatccattaatccgacaaatccttcattttgttggccatcaccaagttgtcaacctcaaggtcttgattgttctcttttgtaaccaaatggagacacgtaccagattgcttttgttttttctctctagattcataaagtacttatccataaagaagaacaaggacttggttagttcaagggtacttttgattgtcttgaaaacattcatttgcctttctcattatatatttagttggacatgaatatgagtacatgacttatcttctatattttcctttgacattctccctctaaggcctaaactgtttcaaacactgtaatttacagggaggtttattgttacagataactcaaacacggacctcagtatcgatatagcaggaacatgaggtcataggatctccaacgctctagctttgttgaaaccgataactgtttcattttacgcgatcctttcctttgtaggtgtctttgcggttgaatcaacagagctgaatttgcggacaagtattttgaaacatgggagaaacatgatgtatagtgcaacgatcacaaatggtgccgctatgagccatcctagtagctgcataaataagttcttgttttaagccagttatatgacaacccaaaccaacttgtcatcgacataaatcacgagaggaaaccaatattatcttcagatttgaaaaacactgacaaatgacaacatactagagaaaatcccacttggaagatactgaacctaaagattctggcaggaaatgcgatgagcagcttcgcatcaaatagaaatcaccaacatctacaccactaagctaagacagaagaaccttaccgcatttccaatgcttaaaaaaacatctcgggaagcttggcctgtgaaaaccttctttagggcatcagatgttaaaggaaaatgaggtccaccggttattttttcgccaagtcgtaagaaaggcaccacaagacttcaacgtgaaacacattttaaaaaatacacataagggttcaatttgatactggtaactggaaaaatgaataaaaatctgttttgtgttgtctctttgtattgatttaaggggtaactttaaaggaaacttgaagtggaaagtaattggtcaccttagttctattggagtagcaatgaagttagccaacatcacagttggagcatgacaaagagatccaagcgacgcaatagccactccacatagtaacaccgtaacacctatcaaaacgcaaatatcccattgagtgaaatgctttagagattcacaaacactataatgttctatgagcaactattccacaaaagaaagtagcacgagaacgcaccacagattggaaatactcccatggtaatacccaatgccgcagaaaaagccagctgctttggctcagcacctctaaaggggaaacaaatcaagcttggttttaaatttttacgacatcagcactctcacaacacagaaaatggcgagtctttacaagctacatggttacacaactcttcacaatggtctctagtgttgaaaataagaaacccacatagcaatactaaaggtgaacatgtagcacaagttatctacttggttccacgaaatggtatcaaactacatcgatgaacaagtaaccaactttacgatacatagagaccaattcatcaaaacaaaatatgaagagagtaacagaatatagaacctgcgcaagatctggataagtggttcactgatcttcttatcgaaccaaactttcaatctacctttcgaaatcgccataagaattgttcaacaaattcgatgaatttctcagcaagttagagacgaagaacacttccaacaagtaattgaatcaagacttgaagttgtatgatgtttactgacacctgaagaactcaaatcggtttctcttatctccaccgctaaaaggaacccgaaccgggttcgggtaaacgggttaaaacaattataatgggcttttacgtgtttttttaattgggctttataaagtccatatcactaaaccgggtcgacccggtcgtaatttcttccctcttcttctagatgctactattatcgttctcccgctagtttcaaaaatttgtcaccatttcgaaatctctcagaaggcgagagctcgcgtaaagatttttctccgatcttcaaattcgtgtgaagaactgattcaaaacttctaaaaatttcatatatttctctgatttgattgattaggtttgaattgaagaaatccgagaagtgaagaagaagaagaagagatggaggagtatctacagtatatgaagactctccgttctcagatgactggtaataatattcatctccgcttctgattttttccgatttgaggtgaaatttcaactggcgatttgattcgattgaggttagatgtggaggatcatgcggcgaaggtctccgttgaggaacagatgcaggttacaacaatcagtaccttggaaaaagatctcgaacatggttagcttctctctatctctctcagcgttttcgaattttagaaacttttcgttgatatggacgaaatcgtacggaagattctaggtcgtgatcttcgttgatattattgctaattggaagtaatttggtttaggaactccatagattgacatatttttgctgttagctatcattgatgtcttcgctcagatttggatttggttgttttggatcattatgtacacagcttcatacatactctttttgatgagatgttattctgagttttcttattttggtatcactattcgaagcattgtctgagacgaagagactgaaagaggagacggatcagaagacgaggacaagaggtgagatatgctcacatatacttgagaagcagaggaaaatttcgtcgatggaatctgattcagttaatattgcacaggtatttaataaactcttatgaaagccatgagtatgtcttgtagaagcagaagttagtactgtgatttgtcacacagttgtatatcttgtgcttacacttagtaaacatgtatcctttgttgtagagtttggagcttattcttcaagaacgagacagtttatctgctaaactcgtatcgaaacggtaattcagagaacatctccctatatctagattgcggttttggaatcacctgactcctgtgaatttacattgtatctaattgtagttctaactatctcaagacggcagaagaagctagaaccaaactagaggagcaaaaggtttgttatttgcatatcctgttcatgtgatctcattggctgtttaccaacacagttatctttctgttgtcctattttggccagggctggtttatctcccatatgagcaatgaaactggtcaacaaggacatgttcgttctcctatgaatacttataagcttacttcattacaagacactttcaatatttccatagtaactgaggttaggatccttgatacttcagaaaaaagagacaaggaataacctgatggaactatcagattctgctagagcaaagcttgatcaagcaaaactgatgagatccaaccttcttcaggaaaattcgaaggttatttacttcagatccactttttactattggtagttttggttctagcactttgtatttgggatatgtgttgtttcctatttataaacttagttacttttccctttccagtaattccttaaataagaagaaaaacaatttggagtacacagatttgtctctttaagcaactctgaattatataatttcatttcagatcaaactatcaattgagaatgtgaagcacaagattaatgagtttaaggtaattaccctctgtaatctttgctagcattgtgatgttgctgttgcatgagttcagtcatgtaagattttgccctgcatctgatactatactattttctgaattcgtcaacaatgcagccagagttaatgtcagtggatattaagatcctagaagaggaatacacagctctattgtcagatgagtccggagaggcagagtatctcagttcgctacagagtcaggctgagaaactgaaggtgacactgattttatataggcgtgatttgattactaactatatgataatgaccacctccacttgttgtagggaatttcttacattgctaaatgtggttgtggagaggaatacagtgttggtttagattaggccaaagttatacatgcactatcaccattcaagcagctgtcaaactattatcttaatatgtgaacaaatcgagaaccaaaagtagctttatgtactagttcttttgaatctgtggactgggttaattgtttttagtttgtagaaagatacaactatcatgctgtcttgtggcagtatataatgtcttacagtttgaggttctctatatgcatgagaacagcattttactcttgatgatgcaaatatggccatatgggtatagcattaaccttaaatttttgataaggtgtgtgcatatacaacattgtatattaagcctctcattataagccttaagactaagtcacttactaaatgcgatctaaaaagatttgagttgtcatccacatgttgagtgtgtgttatgattcaaaccagaagtaatcttattcttcagctagctatttctaaagtaaataatattaccatgtaagcttatattcggaaaaacggtctgtttccagagatctaaaagaactttcagaatcagataacttaaccttttaacattcattagcagaagcgtgtactctcacaaagggggtatcaaacacgttataggctaagtaagaaggctattatttggtggctcaagcataacgtagctacaccctatcaccctcaaacatgcggtcaagtcgaactttccaacatggagattaaagggatattggaaaagactgtaggtatctagaaaggattgggctgcaaagctagatgatgttctttggacatatagaactgcctacaaaactccaattggaacaacactgttcaacctcatctatgggaagtcttgtcatttatcggttgagttagagtacaaagttttatgggttacgaagttgattaactacgacattaagtttgtggggaacgacgtttgattcagctcaatgagttgaatgaaattcgtttcgatacttatgagaattctagaatttacaaagaaaggaccaaagcccttcatggcaaaaagataatcctaaagaagttcggagaaggtgataaaatactcctattcaactcaaggttcaaggtttaaaatattttctcaaagaaaaagcaagtttttttttttttttttttttttaacatcaagatatctttattagtaagatgaaatgtgatcctcatggaggatttgtacaagaaatcggggaacataaaaatgatttacaaaagctgaattgagaggaataggcgctttggctaaacagtcagctgctttgttacttgttcttggtgtccatttgatagttgcccttgtgaagcgtttttcccaaacttgaatttctctgatcaggttatgaacttggaagttacgtgatttgcctgtgcttaatgagacggcttgttgattgtctccttcaaagattacatgagtgtatccttttccccaaacatgttgcattgccatcaataaggcttgtagttccgcttctaacgtgttgacacagttatggcctgtactttgagatgcttctttgtagtatccattgcagtctctgagaatccagcctgctttgacaatgttaccattttgactgtagctgcagtcgtagttgcatttgatgtagcccgcatccggttttgtccagccgcagttggggtcgtaagttgagcggttggttgttaggtttgcagtagttccttggtccgcccattcatatgcatccgttacagcttgctgggcctcttttctccattcgcaacttctttgttgatagacaaggagattacggcttttccatattctccatagagtccacaagggaatttgtcttgttaaaggatcttatcttttgttgttgcagctttgcaggatcaccttgattttatcttctaaagtaatgttggagtcaaagaaagcagaatggaatatctgtgtacctctccaaatagcttgagcatggtgacagccaaaaaagaggtgatccggtgtctcctctgccatacaacatcgcttgcacgtcggatcatctattattcgccttgtcacaagagttgaacctatcgccagtgtcttcgtaagcattctccaaaggaagtgtttaagtttaggtgctgtgtgtagtttccagattgccttcttcatttcaagttgacctggtggtggttgcaagtgtttttttttgttttcttttaaagtaaaatcaattaattagcattatgttttttcaattctattgataatggactttcctccaggttcggcccattagcactctaaatattttaacaggcccttctacactatttctaggggaccgtggtatccgacatttccatttctttcatgtccaagcacaaaatttcagtgaccaccgacgagaataactttgtggctgacggcaacatttgggagttcgtcatcaaattcattccttcgtttgaacttttcaattcttttttgccaagaatcacacatacaagaagaaattccaagctcgttttgttttaatacagagttctacccactttgcatacaagttcacatgcatagtacatcaattacaaggaatcataaatggagataaccaacttctccaaagctctccccaacatgaatatgcaagaacattatgacagaagcacataaaagagaagctaaatcaagcttgtttagttttaaaagctcgcagataacacatacgaaactccaaaaacacctcgtcaactcaaagttgcaagaaaactaaacaaggaaatgagctagttgcaataccttgaaacttagcagcttcagttcaccatagagttttagtattcaatatcatccatatcacccatgtactcagcaacttggtcaagcctaacatcaagcatcttgtggttgtctaaatcacgaaccacaccagtttctttatccaaatctttctcaaccagatttccatagacacccttatgcttccccgataaaaccaaaaccggccctcctcgtctaggcaatgccgtctcaagcaactcctgatccaccccttgaaccaactcttgcgtctcatccatcgtgatatcacaagttgttggtccaacaacatcaacaaccttccctttcttaagatacaatctcccacccttccaatctttgcttactattcgcacctttatatgactcctaagccatgaaggcttcactttcctctctcttgtttgacctctatcttgcttctcactggctctaacttcacttcgactccctctctctgctcctctacctcttccactcgttttcttatccttctccctatcatttaactgcaaatctttcaacttcttcaaacacttttcctcttccttagaacccaaatcagcaacctcattcacacccactttcacttcctcttcacttccagagatctttataacaaaaaaatcactaccaggtttctccacaatcttacccttcaatcctacatctctccctgcaataatcctcacttctttcccaacaaaaaacacatccccaccattaatacctactcccttcttatcaagtttcacactttccttcactttagccttcacatcaacaaccttagatctatcaggatcaaaacctaacccttccttagcagtccactttttatactccttaatctcaacatcttctttagcattcttacctattcccttacctggcttccatccatatccagccatcaacgcagcaccgaaaccatccacaggaacactctcaaaatcctccaaagtcggatcatcagcaagtgacatcagatctctcctcaaactctgtaacataagctgctcccccatagatactttccgctcttcaaccgcatcaccaccaattgaatcatccttcactttctgacgcagatttaaaccgtaactgatattatcaggtttctcagtaccaggtaaaggaacctcaggctcgaattcgagtccggaacctgcgttaccagattgaagaggtagatcgagattcttcatcttcttgtgaggtctccatgtattctcaatcggaggaataacgtatttggggatggaattagctagggttttcgatggatcgaattcggtgacgaactctttactagttccatcatcgacggcgttgttaccgtcggcggtggttgctgtgactttgggcttagatttagaagggagagagaaagagagcttcatgatgaatccttctcttctcttctctctcacacgaacaatagccgaaacgtcacggagacggtgagaatcgcaaggttaaactcgccggagattcggtgcctgtagtagataaatgtaaagcagatgggccttttaaattattagtgaggaatgttaacaagtatatgggccgacctatataacacagttaggcccatattcagaaatggagttgggtcacaagaatataaaatggattatccaaaccgggtccaaaataatccgtctgttttgtctattttctccgagtttttcattactatttaaacttttgttaaatttgctgaaattattcaacttttttattttcaaaatctagttcaaatttattagttttaagcgttggaaagtgaatgaatatgatcataattgactgtgctcttcagtaaaaccttcaatccaaaagagggtttaaaggtcattaagaaatattaaaggccctaaatgtacgtatatatgaactatcaatattcactatatcacggtttttctaagtttgatgaaaaatgtcaatatataaaaaatcgtttaggcagttaagttttccaaatttgtaaaacctaagccaaagttttacacgtatagaataaggagcatctgttcccataaacttgtgtttgtttgatccctattgtttagtctctattactcgacgttatttacaaaccatcgttagttgaatgttacttcttttttactctctagtcttaacttgaattaagccgagccaaagctttctaaaatcaaatgtaaaaccaaatcatgaaaactgcacatagaatatgcaatggccttaataacgatcggacgaatctccgaaataagaaaaaaaaaatcaaatgaggaaagaactttcctttaaatgaagacaaatttcttttatattctgtcaaatatttataaccatatattttttcgtgtctttgtaatattctgctctagttgttattgcaaacttcatcaaaacaatgactttttcaattgagaaactggtggacttgaagagaaagaagtggcagtcgaagctccaaaatacaaagaaacaggttttaggccgatgtttaacaaattttagcagacttttgagttttcgtaagaaacaagaaacaaacggaaaaagccctagatgtagcaaagccacgcttgctgttgttgttcatccaacagccagtactacacatgatgattttttacgtaagaaacaagaaaggagcggaaaaagccctagctgtagcgaaacaacgcttgctgtggagttaccggatgttctagtagaagagattcttcaacgccttccggtgaaatatttggtaagattgaaatcaatatcaaaaggatggaaatctttgattgaatctgaccatctagcagagaaacatctccgtctgcttgaaaaaaagtatggactcaaagagataaaaatcacagttgagcggtccacatcgaaaagcatttgtatcaagtttttctcaagacgcagtggaatgaacgcaatcaatagtgattccgatgatcttcttcgagttcctggttcttgtaatggtttggtatgcgtctacgagttggattcggtctacatttacctactcaaccctatgacaggtgtgacccggacacttactcctcctcgaggtaccaaactttcagttggatttgggatagatgttgtgacaggaacttacaaagtgatggttttgtatggcttcgacagagtaggaactgtggtgttcgatctcgacactaataagtggaggcagagatacaaaactgctggtccaatgccactttcttgcattccaacccctgaaagaaacccagtctttgtaaacggctcactcttttggctattggcaagtgacttttcggagatactagtcatggatcttcacacggaaaagttccgcactttgtcacaacccaatgacatggatgatgttgatgtgtcctcaggttacatttacatgtggagtctcgaggaccgtctctgtgtatctaatgttagacaaggtttgcattcctacgtgtgggttcttgtgcaggacgagcttagtgagaagtgggagagaactagatttaatctcctaggtcatgtctttcctccattaagcttgaattctgcttggttttcacagaccttggtttctccttaccagttgtcgtcttcaacatgtatcggttctagacaaagacagaatagtacctctgcgctatgttagtaattaacttctttctctttctcatatagattgcttttcaaagaaataaacaacattctttgaagatttcgcttcattaaagtatttgtcttcttcatagtttcgagaaatggagatacgggagccatggacgcgccgatcgagctgcatatatctgtttctacaccaatgatgcctctctagattagtggtcctttgttttaacttgtggtttcaaacaaatgttttcttgatttatttctgtatcatcagctttttcatatcccacaaatgaactatgttgaatttaattataccggaactatactcacgtgtaagaaccctaattaaacacggattatatttaacaccttgattttaaattctatgcaaaattatgcataagtctttacaccattaaaaaaccgttaatttcaacatgaacttcttgaatgtccacctatcttagcaaatccggtgagtttttgctccactaaggggcgctgagagattctagggttctgccgtcaatatacgccattagaatcgatactttaccgacgacatgttctcgaagattctgtgaaacttaacaacgtacggtgaatctgaacggcagagtatctccatctttcaatgtcgttgtactatgaattgcatgtactattatttctatattcttgttcatttacagttacttttctctcaaggtaatgaactttttattttattttggtgttctttatgtatataggcacacctaaatttctttatacaacttttttttttgttaagaaattcttttagaagtgttttatatatcacacacataaattagtatatatatataccttaatattgttaatcccatttaatttcttagaatcacacacataaaattttgaggaaattacatatgtaatttagtgtacgtacgcgttgaggacttatataagaaaggaaataaactagttaaaacaaaatcttcaactaccataagacgaagaatgagttacagagttgctaaaccgccgtagtatctagcgataaccggtggtgggatcaaagatatcaagcttgcgaattgagttacattatttgtaaatgaattataaaatacatgattattgaactggtaatttgaaagatacattccaacctagtgataatgaatgtattttaggcattgcttttcaatgatttttgttggtactaattaacacctctccggttagatgctagagaggtcggccacttatccacctttggaacatcatgaagctttcctctggtttatactctgcggtgtgccctcctccctacaaaattaaatcaaggaaaaacatttttcaaaaaatgtaacgacgaaaaacaccaaatatgtttagcaagaaccctaaaagaaaaagaaacttgctttgatagtggcaaatgtcatattattggcgtaagtccttgtatatccaataacttgattgttaacaaaccaaggtctccaatcgtcagttattgagtagtttagagatttgatccaagcttcagttccaatataaggcaccatcatgtcgtgatcactgctataaaccaatgaccgataatcccctatgatgctattgtttcgatggtacggcacactgctctttatgtctttctcataaggcaaatcccaattgcatctcatccatttccctatacttccctgcaatattcactttcttttattcttagtttacttcattggcacgtaacaaatgatggcatgttatgtaatagtatgacatactttcaccacatgaagttctctgcgtacatcttcatcattagcccaatgtgaagctagcaaataccggtacatctgcatttcatatctatcattgaatacatgatttccatttataggcaaagcaagattaatgtttattcttttttttacttacatagcaatcaggagtgggaagagaaagatctgattgaacaagtgtctgaagatagcttcttccaccgtgttctcctgaataaggatttggtgatgccaaatcacacaatgctatcaaaatgagtccttcatttatccttgaaacacactttcatcatcattaaccaaaaattctcaaaattagtcttttgttagtctccttataactattcacaatgtgaaagtaaactttgttttacctttccgtagtcctccatcaatttcaagcattttgtattagtaggatccacttttacataatttccttggcaggttctcttaagcgactacaaacaagagtataaaaattgacttcattaaaaaatatacattttcgaggatatataagaggctcaataagacctctatacatacctcgtagagttcatcagagataagtcccattcgatgagcatacggaatcttggagttatgatcactatcaagatctgttgaagggttcccaagaatataaccctgttgatagaaatgattgtttcaaacaagatatatccattttatatataaagtctcatgatgaacaaatgagtgaagatattgatgaaccttaagatttatttgaggtttatagccatgttcatttcctgcataaaggtaatgtttaggactataataaagtggctaagtaaaaccaaatccagagaaaatggattttgacaaataacaaacctattgagatctgttgtacaatagctggaacaactataccggcgtaagaatctccgccgacatagatagggtttgagacaaactgtggattctccactagccactgcaagtaattcaaaaagattatatgctacatacatatacttagattctcaacgaaaactctgaaaaatgctttcaaaaaagcaagaccttttggagaaactcataggtctgttttgcttctcctgtgtcactaggcttataagaaagaggagttgttgagtaggagtagccagtcccaacaggctgatccaagaatattatgctagctacctgacaaaatcatcaaatcttgaaaaaatcgataaaccctaaagaaaaaacaacaaaagcctaactctgttttgtgatggtcaacgtttaaaagagtccacctttgtccaagaatatgaagtggagacaagagaaggcaaacctccattgtaaccctcagtcttaaaagtcaacggccctgcaaaaaaaacaagaatccatttagacactaaattaaaaagttcctcaaatcttttcttgaaaatcaccgatctcgaaagcaagtgcggagagagcagtgcaagctggtcctccagttaaccagataataagagggtcttcttcaggattgttctctgatttgataaagtagtagaaaagctgcactttctctccctcaccaacaccaatgtagctttccataatgaagaagatacattcaaaagattgttgttactaatagttacgaaaatcgaaaagcagaggaaacaaacccagtttcaaggtggaatggaagaagaccttcgaaaccaggaagatagctaatcacagaagctgaatcaacatcatgttgactcaaaagtagcagttgaagtagaagaagcaacttaagtttccatgctttagacatttttttaaattaacgactggatttcatttcagacaattattatagagactttaaggaaaaaaaaatcatttccaagttgaccaaaggaaaaaaaaatcaggtttaagattctgaatgtctctgtgtagcatttctttagtactttctcattgtgtattgattctttaggtatccacaaccacaaggacttaattacactagcatataataaaccattcctattgtcagaattccacaagatactaatgtatttttctagtatttataatttcaaccaagttgccttggctaactccaaagtgggagagtcctggattcgaggcatcttggccatttagtcgagctttatatttggaataatttactatgttatcataaccccggacgtacccatcctagtttatttttatttaagcaataatactaaaaacatagcataacaaacgatattaaattaaatatactactaacgaaaaaactttaaatccattttatgctcacgcatagtgtgggctagttaatgacatcgtgtttttaaaaaattcatacatgattcatagatattcagtgaattcttttatctagttacatttttttaatatatattcttaccgcaaaccccaaagataacatatatagcttctataacgaaattaaaatctaaaatatctcagctccatattaaaccccaccccacctaaaggcacgttccggtggtgaaaaagtattgatctttacgtatattccatcgggtctggcactatagacgcgtaacttatcacatttaggcataaaaattgcagtgtatgtcctgaaacgagaatgagtaatcattttagacctagaccattgctcaaagtcccagttccaatggaacctttttacggatgcacccacagcaaaactaatacgtaaaacctcgtgatgtttcacatctttgacaactcgacggttttcgctggaaacgcaagtgactctaagagtacgaccattaacaagctcgtttctaaatataagacggttatctttgcaagcttcacttaatccaaaacaaaaaaaataacaagtaacaaaggagctatcatatgattcattttttcttaatattctagatcgaagtgatatggatcagtgtagttaaaaaagaaaagaattagacaattagtgtacttatttatagtccttttggtaaagattgtttttagtgtatctataaaaggaattttaatgaaaaaaaagccacaagtattggccaatctattttaaccctcaactaaaattttaatacttttcttctctcaaattaatccctttataaaatagtagaaagtttatggccatgcaaaaatttgaacacaaaggtgaaccaatcaaactcgtgccttagcttagagcatttagtgccataaagttaggttaaccattaaggttaaaccaaatttattattacaactccaagaaaaaaaagcaaattataaccgttagagcattcagtgcctcaactttcacatttcgttgaaaacatgtctcaactttgccttcgataaaatatatagccaacttttattgatttttaattttttttattttttttgaataaaataaaatttaaaatttattcgaaaaaaacttgtttacattgactgcaacgtttgcgtttacagtttttttagatacagaagattaaaaaataagatcaaaatatagtagacctcattgtctaaatccaaaccagcatgtcatgcaaccatcacatcttctatccccttggttttgaatggatgagattctatttctaacttgcttatcaagaaagcgagtcaattgagctgcgggctgtggcacttctccatgtcgacggccgtttcactctttccgtatatagtgtagagtgagctgaaaagtgtatctcgtcaagaacaggagctcatgtccgagctatgggccgtggtctccctagtaatgtggacaatgatgcgccgacggattaaatgctggtcaagaaaggctgacgagccagaatgcatggagtgtctgagccacgagggccagcctccactcatgaggttctagtcgtcacaaagatgactggacctaacgatatgtatgtatttgctattatggataagatggttattatgaatgtgttgttagaagttaaagcatgttaggttggttgcttgtatctaagtttatatgttatgatgatggttgtatacctttagaaaatgttctatgtttcagtgggcagagcgtattcctctcaccgagtattctttactcacccccttattcattttttcttcagattagtaagagtgaggaagttatgtgtaatattttgttcgtgtttgacgtttaaagaaaacgttttggtaaaatcaaatgaaaaacatgtcatcttaatctatatgacaggtcgggtgttacaaattaggttaaccatttaaggttagaccaaattaaaactaagcatttaatgcgtcaaccttcaaatttcgttgaatacaaacctcaactttcttcgatgaaatatatacccaacttttattgacttatcaatttaatcgctaacttatgttgacttcacgaaatcgttaagtcgcgtactacaagaaaaaatagacattttaactcaagataaacgctattgtatgtgtttaatagcgttttcataaactttgatggattaacgagttactagaataatctgaatataagaaccgagtgcttttggttttttttttattagttagttttttttatggtttttaattggtttagtctatccgagtggaattgttttctttttaattaggtttttggtatgtctttataaacactatttatgcaaacactgggaaagtgtgcttatttctaaccaactcagttaaatgcggaacttggaggaaaaaatccgaattagaaccaatctggctgacatcatatccattgatgaggtaaagacaagaaataaaattgataagacaaatttgggaacaattaaggggaagatggatatcaatttgaatcctaatgacaaagacatgatagcttttacatggacccatgtttctggattgagacatattaatttggcaacaaataataaggacaaagacttgagatgatcaaaatgataatgacaatataatgattgtcgctaagtaaaatttaattaaaaggctgtgactggttaaacatatagaataaatggaaaaatagaataatcacatcaggaagaaaaataatttttatttgctttgaagatggaagaattcatgtgatttagttactttttgatatttttcgaagaaacaattttcttccaatttcttttgttggactaatacatgtaattttttccctttctttttgttttcttctattaaagtcaactagtcacacgactcacaccctcaatgatatgacaagtatgtgtcatgtggattagttagtgtggaagcaagtcttttaacatccaatgttttctcaattcttacctaacacggtaacacctttttttttccacaacacatggtactaaccggttgactattccctggtactgcggttgaggctgaggcaatggctgttgaaccatcatgccttctccagccaccgtatagtacacatgcggcttcccatctgcgaatacggttcttgtaaccccattggagctggaccaacactagtgtatatataccattaagtaatttgaagaaatatataaaatattaatcaaaacgcgtaaaaagagtaaagtgatctttgatgattagatctacaaatcgacgtcaaaaggaaaaaaaaaaaaaaagctacaaaataaacattgaaaaagttcgagtccctaatccctatatagtttatacacatatcaacaccaaataatcacaagaaaaaaaaattataaacaaggttgcatatgggatcgtttttctttcccaattagttaaattagatagagatagcgaccaaaaaaaacaagattagaggtattaatccaaataggatttagctaactttaaacaattacactcccaaagtgattgaacccgtatggccgtattagggaatatcgtaatttagagtttgtctagataatcgaattcgaaaaaaaactactaaatcgatctgtttgataataagtgaaaaactgatacgtaaccataagatccatacattctctgaaatctattacaaagctattacatgtgttaccgcagaaacaaaactttaaaacactaaacgacaaaacgtatgttattggaagttgctaagaaacttcgtcttcttcgctattttctaatctaaaaacgtatcaacccttattaccactcaaccatctcactttcttttttctgtcttacactccaagatcggtctcgatggcttcgttcatagatcttttcgccggcgacatcacgacgcaactcttaaagctgctcgctctagtagctaacacagtctacagttgcaaaggaatcgccgaacgactgatcacgatgatcagagacgttcaaccaacgatcagggagatccaatacagtggcgcggagctgagtaaccatcaccaaactcaactgggagtattctatgagatcttggagaaagcaagaaagctatgtgaaaaggttttaagatgcaataggtggaaccttaaacatgtgtaccacgcgaataagatgaaggatctcgagaaacaaatatctcgtttcctcaacagccagattttgctctttgttcttgctgaggtatgtcatctacgggtcaatggtgacaggattgagaggaatatggatagactgttgactgagcggaatgattctttgtcgtttccggagactatgatggagattgagacggtaagcgatccggagattcagacggtattggaattggggaagaaaaaggtgaaggagatgatgtttaagtttacggatacacatttgtttgggatctctggaatgagcggttcagggaaaaccactcttgcaatagagctttcaaaggacgatgatgttcgaggtttgtgaagttttattgaattttgttttgtgttgatggtcatgagttctaatcaagatttttgtgcaggactctttaagaataaggttttgtttttgactgtgtcacggtctccgaattttgagaatttggagtcttgtatacgagaatttctttatgatggagttcatcaacggaagctagtgattcttgatgatgtttggacaagggagtccttggacaggctgatgtctaaaattcgtggaagcactactttagtagtgtcacggtccaagcttgcagatcctagaaccacctacaatgtggaattattaaagaaagatgaagcaatgtctcttttgtgtctctgtgctttcgaacaaaagtccccgccttctccattcaacaaatatttggtgaagcaggtactaatgcctttttataaatatttgaatctgtaactaaaaacacactttgcttccaaatactaaaattgttactctgtttggtaggttgttgatgagtgtaaaggtttacctttatctttgaaagttcttggtgcttcgttaaaaaacaaacctgaaagatattgggaaggcgtagtgaagaggttattaagaggagaagctgctgatgaaactcatgagagcagagtgtttgctcatatggaagaaagtctagaaaacctcgacccgaaaatccgagactgtttcttggatatgggtgctttccctgaagacaagaagatccctcttgatcttctcacgagcgtgtgggttgagaggcatgatattgacgaggaaactgcgttttcctttgttcttcgtttagctgacaagaatctccttactatagtgaacaatccgaggtattcgctcttttatgactttgtctcttgtaccaacacttcagtgggattaatcatatcataaatttgcaggtttggcgatgtgcacattggctactatgatgtatttgtgacgcaacacgatgttttgagagacctagcccttcatatgtccaatcgtgtggacgtaaataggagagagcggttattaatgccaaaaacagagccagtgcttccaagagaatgggaaaagaataaagatgagccatttgatgccaagatagtttcccttcatacaggcaagacttctttaactttaaatgaatttggttagtgactagagtcttcaagttgatacgagccaaagatttagtctttgaactcgtaatcctagactttcttaacgtgataaataagaaagccactaaaataaaaccaaaacacctaaaactcttatcacgtatcaggtttgatagatttttttgtgtctttaggggaaatggatgaaatgaattggtttgacatggacctccctaaggcagaagttttaatactgaacttctcttcggacaactacgtcttgccaccatttattggtaagatgagtagactcagggtgctcgtgattatcaacaatggcatgtctcctgcgcgtctacatggcttctccatctttgccaatttggccaaactgaggagtctctggctcaagagggtacatgtccctgaactcaccagctgcaccattccactgaaaaacctgcacaagatacatctaatcttttgtaaggtcaagaacagctttgttcagacgtcattcgacatctcgaaaatattcccaagcttgtctgatctcactattgatcactgtgatgatcttttggaactaaaatccatatttggaataacctctctcaactctctcagcataaccaactgtccacggattcttgaattgcccaagaatttgagtaacgtacagtcccttgaacgtctaaggttatatgcctgccccgagctgatatccctcccggtcgaagtttgtgagctgccatgtctaaagtacgttgacatttcacagtgtgtcagcctggtttctcttcctgaaaagtttggaaagctagggagtcttgagaaaattgacatgagagaatgcagtttattgggtttaccaagttctgtagctgcacttgtgtctctacgccatgtcatttgcgatgaggagacttcgtctatgtgggaaatggtcaagaaggtggttcctgaactttgcattgaagtcgccaaaaaatgcttcaccgtggattggcttgacgattaggcttcttgttccttcaaactcttgataaccccttgtattaatcattgatcagcagtaattagagcgagttatttgaagtttggaatgtttctctctatatataagatcatttttagctatccatcttaactttaagaagagttgttttctgtttatgaagttaatgcactggtttttaatggcgatatctaggagcggagccaattaaggaggaggggatcatttaaccccataacattataatttttttaattataaggtaaattacctaataattattaatgttttggtataaactttctaagttgaccccatgtcatgccctagttttctacttttgatcccattcatatttgtttttctctcaacattaatttcttttccatgtttattttgtgctttcctaacaaatgattacaaatctctagtattgattacacattaggcttttcacatattgattgttttttcttctcattggatatcatgtttgttttttgtccttcttcttcaaaatcgtttttacatatatttctatgtaagtcaagaattgttttataaataagcctaatgtgtaataaatagaactgagagaaactattctacttctaaggttttctccaaatttatcaaaatttcactacaagaatatggagcatttgtagtgtccgaaaaccgctatttaattatactatagcgttattagaagcgttctatcatcgtccgtcataataggtcagatacatattgtagcgcttttttgttctgctatcattatttcattaattacatcgctttatctgctgcaatctttaattgtttaatagcgattagtttctgatattaataactattatacatagcatatttaatttgctacatataattagacaatagtatttagttaattgcaatatttctattatggcatttttaattatgcaatatttattcaattaatttcagttcataaattattttttaatcccaaattcagaaaaaaattcatattatttagatatcataaattcaaaattcagaaagaaattcatattatataaaattcaagatcccaaattacatttcaatgtcaaagtacttaataaaaaaacccacataatgtttacacaaacatgattttatcactaggccaagccacaatactacctactgcatcggcaatggtttgaatttcagagtttggtctccacacagcagcatctccaatctttgaaacttctacacataccttgctcgcatttggacctaggggcatatggtggactgtgtctgaagggttagaggcacatactcttccttctgcaactctttctcttccgttcttgtaatctaacatgatgcatttcttcttggcagatttgctagtgctagtagtactgtggcttaagctctacaagattaaaaaacaataccaagcattcaggcagaaataataccaagcattcaagcagaaataatacttaagtgattttataggctgtaagttaaagtgcagaaatttactgatgctggtcttttatctgctgatggtggtaatggtcttttttctgctgatgctgtttcatactgtggaggagatgaattc

SEQ ID NO: 1163 - DNA, 34138 bp, Arabidopsis thaliana
ttttatgaagaaagagcaaaagtttcagatgagctttaatatactcatgactgacaaggtaatcttgttaaatctttttcatcgttttaaactcttttctattagaaccaatgggagtttatgtaaaaccactttaatctcagaagatagctccgaccgggtatcaaaatttgagaaaaaggttagtgctttatagcattgtgtgttttctcatatttaagttgtgtggttctgtctgtttgatgtagatattgttccttaattgatgtgtttcttgctggaatattttgtgtgagtgtgcggatgtaggagttgataaagagacttgaataaggtaagctttcgtgacgaattggtaaatcattttctagtttcgtaaccttgatttatactgaaattcacagttatccatatcaatgcagttctcgccatataaagcacaaattcaacgtataaagggaataaggtttgaactaatgatccttgaataatggctggtggacttgcactgagaggtacactttcttgtcaaaacccctgaaccgtagtcatctttttaagacaatgtgtgtctctaccaatttctgaggctttttaatgtcctctctgattccagagtcgatgaccaagacatttgtcacattagtgatcgttctcattgtgccttagttgtgatatgcataattcgaaaggaaacaaaaataagtaagcacatttgtctccgtttattgctaatttttattggttgtgatatgcatcatgcgtaaataactaactatatcagtgtgtggttggtttctaatatttaggttctcatggctgatctgatttcttctgcagatggcactctactggaacttacgattgtcagtcaagaactggaggtccattcagaacaatgaggtttgatgcagagcaagttaatggagccaactatggtattcaaattgctcttaggttgctggaccccatcaggtagcattccctactatctctcttgctgattgattttagatttttgaaaagttctaatttgttgacggtgataactttagggtttggattctaacttacaatgtctttttggtgagaaattgatctttcaggtgctgtggccgttgaagttactggtggccctaaaattcatttccacccttgaagagaggttaatcattcctgagagtgtgtgttctgctttctttgttgacatggctgattgataatttagacattctctcaatacttgtaatactgaaacgctgtgggacttgattgtctgtttctaacatgcatatcttgctttcaggacaagccccatacacctcctgagggtcgtctccctgatgctacaaaaggttttgatctgttgagagatgtatttgctaagcggatgggcttgtctgacaaggacattgtcgctttatctggatcccacactcctatttctccatctcagagctaacaacccttgtgaaaagggtcacgtaagatgtagttaaactttacaattccgtaattttttactggtttagttcagccttttgcattttatttgctctatgttactctattttgttgctgacttagtaataaagatcattcctcacaagtgaagagatccttaagttgcaaagaacaaaagggagactattcgctagcaaggacatacaaatgttaaggtcaagtatcttcctctctctcctttaccgcaattagatacgaaggatatagaggcttgcactatcccaaaaaagtttacttccgtaccattctatatcttaaaaaacttttgtcgggtttattttttatctttgaataagaactagataaggtgaactagagaagataaagctgacttgaaatttccagcagcttccaacaatgtatattaccgttaagataatatgagctgaggaagcaaccaaatgtcaacagggagtattttgtaagtttgtcatttttggttttatgattttctgaatttaagttattcgttctatgtttaagctgcgtgttattaacaaggtttctttggtttcaagagctttcttcagttgaaatggaatttttgacaaaggtcctcaagatgaaggattatttagctttaaggaagttttgaagacagttcagtagccaacaaaggtatggttaagtagctctctctctccctcccgcgtatcatgtctcttgcactgtatcaaaaacagagcataaacacataaacgcacaaaaataaaaatcaaacacacataactattttaaagtcacccaaacacaaacgaaattcacacaaataaaaaacatagcacacaacgtccaaacgcaacttaaagaaacagaaaacagaacataaatccacgaaaaaccacactcgaacatacacacaacaaaatcacacacacaaaacgaaattcaaacgcacaaacaaaaaacatagcacacaacgtccagacgcaacttctaaaaacagaaaacaaactttcacaggattgtttttaacaaaaaaatgtgaataatcacaattgatgacaagaaattgtgttgtgattgttcccttatttcttactttcttatctacttactttattatagcttgtattaacttatatatttgaaagcacacgagcattgtttgcagtttaaaacaggttttctgaagtaagagcaaaagtttcgaatgcgcttcaatatactcatgactgacaaagtaatcttgttaaaaaaatttcatcactttaaactctttcctactagaaccagtgcgagtttatgtaaaaccactttaatatattcaggagttcatcattaacttattcaggagtttcagttataatctcagaagatagctccgaccgggtatcaaaactagagaaaaaggttagtgctttatagcattgtgtgttttctcatatttcagttgtgtggttctgtctgtttgatgtagttattgttccttattttgtgtatgatatccttttaattggcttaattgatgtgtaacttgctggaaaattttgtgtgagtctgcggatgtaggagttgataaagagacttgaataaggtaagctttcgtgatgaattggtaaatcattttctagattctgaaccttgacttatactgaaactcacgccataaaaagcacaaattcaacgtattaagtgaataaggtttgaactaataatccttgaacaatggctggtggagttgcactgagaggtaagataatatgagccgaggaaacaaccaaatgacgacagggaggattctgtaagtgtgtcatttttggttttatgattttttgaatttaagttattcgttctatgtttaagctgcttgttattaacaaatgttctttggttgaaatggaacttttgacaaaggatttcaagatgaaggattgcttcctcggctgcaaagacggtttgacgaccaccatttaatacaaggttagtactttatagtattgtgttttctcataattaagttgtgtggctatgtctatttgatgtagacattgttcaggtttgaactggtgatcttttctctccaagactattcccttgggaaggtatttctaattaccagataaagtccatgtaagtcattcagtttaaccagacaataactaattccctctctgataattctgctgatcagcttctttttgtttttcttgatgcgagaatgaatcttagttcaagtgggttacaaggaccaatagccttttcctttagagatctctccctcctcgagttatcgtaagtgtacaaatgcaagccatacaaacacacactttccaagagctttcttcagttgaaatggaacttattgacaaacggtttgaagatgaaggattgtttggctgcaaagaaaatcattcagtagccaacaaaggtatgtatggttaagtagctctctctctctctctctctctcacttatcatgtctcttgcactgtctcaaaaacagaacataaatcaacgaaaatccacactcaaacgcactcaaaactaatttaaagtcaccgaaacacaacgaaacaaacaaaaatcatagcaaacaacgtctagatgcaacttaaaaaaacagagaacaaaacataaatccacgaaaacccacagtcaaacgcatacaaaaattaattaaaagccaccaaaatacaaaacaaaattcaaacgcacaaacaaaaaacatagcatacaacgtccaaacgcaacttcaagaaacagaaaacaaactttcacaggattttttttaacaaaaaagtatgaaaaatcatagttgatggcaagaaattgcgttgtgattgttccattatttcttactttcttatctacttgctttattatagcttgtattaacttatatatttgcaaatactttcgtgtacacgagcattgtttgtagtttaaacaaggttttcataagaaagagcaaaagtttcagatacgtgtcaatatactcatgaatgatgaggtaatcttgttatcatcattttaaactctttctattagaattagtgtaactttatgtaaacctaattatatgttttaagtattcagaggtttcagctatgatcttccatttattcagaggatagctccgacggagtatccaaattagaaaatggtagtgcttaatagtatagcattgtgtgtttttctcataattaagttgacattgttcttttgttcattattttgtgtctaatgtcgttttaattggcataattgatgtgtaacttgcagaaataactttgtgtgaatctgctgatgtatctattaaggagttgataaagagacttaatgaaggtaagcttttgtaacgaattggtaagagacaactgaaattttcctagcttgctttcggttagtttcttaatgtgctacgacatgtttaggcccaaagtcttggcgttgagaacttgatgatgatagatattataaacttgcaaatatttgcattatatattcagaaaacgagaagcaggtatttatcatttctatctagtaataatttatagtccccaagtcactataagtccttgtttttcatttttagattgggtatgaattcaatggaggccaatgcaatggaaaagctccgacgttttctttatgatatgattaacaatgatagagtcatgttccgttcccaaagtacttgttttataaattgactttttaaggattcctgtttcactgatcaagtgtttttttacagaatctcgcttcgtttttttcctatcttgctttccattagtttctaaaagtgctttcagtccaatgtcttggcgttgagaactcgatgatgcgaaaaaagagaagcatgtatttatcatttctatctggtaagaattttacatgtgaatccttgtttttcatttttcattgcattggccatgatttatactgaaactaacagttatccattttctcttgttaatgcagttcacaccatcgaaaggataaaaccaatgtataaagtcaataaggtttggactggtgatccttgctctccaagactattcttttgaaaggtacttctaattaccaaataaaatccttgtaagtctaacatttcaaccagacaataactcatttttgtaatttccctcaaggaattctactgatgagcttagttcaagtggattacaaggaccaatagctgtctcatttagaaatctctccctttttgagtcattgtaagtatacaaattcaagccatacacacacactaccaacctctttcttcacattatatataagagtcatgtgcattgttttcccagggattcataaaacaacaacctaagaaagggatttcttttgacagacatttgataatgtatttgtctctgacatttatttgtgtcacatgaatttgaaaggaaattacttgactgggtttgccccaagatctcataggaaaaaaacaatggctagtgaacttgcacagagaggtacattttcttgtcaaaacctcggtaccatagtcatcttcttaagacaatctttgtctgtaccattttctgtagcttcttaattttctctctgtttccagtgtagatgaatagagcatttttcacccatgttcagattcgtcgtgtgccaaatatatgtataatgattaaatatagtattatttagttgttaaatatattgtattatttaaataaattaattcaaatatgagttaattagtagggtagtagaacgatcctgactttttattttaatccatatgttacctgtaattctaattttcacatatgaaaataatacgttaaaaaagttatgtatttactgttttgactaaataatagtgtatttaagttgagagatgacacatgtaacaaggacagatgccacacgtaactcttgaataagagaatcccttataataataaggttagtacaaatattttttggacccaactgtcgacacattagatacagatactaattatagttttcttgccactacactttacaaggagaaagtggagagccacaaagacagtcgttacccgcaaacrcactggccgggaactttgtcaccggaagttttccgcaaagatggttttgactcacgttcattgtcttcagtccagcaaatgttgccagcactctcccgaatatcaagttccttgacaaatccaaggtttcaagagtcctcacaaacgtcagcttccccaaatcgaatcggagtttgttccctgccgctcggaactccatcagatacttcrtctggctgaggaacttagccggactccctgagatctcgttttcagacagatcgatggaatcatagtagtaggtccctgctagcttccaatcatctaagcttatcttcagcccacattttgccaacttcaatgagtagatggatggtgacgatatcatccattttggaatcgttttcaggtgaaacttgttgtacgacaaatccagagattcaatgccgttaatgcttttcaatacagggaatggaccagttagaagattgtgggagagatcaagattggtaatgttgatcagattggtgaaactcattggcacgacccccgagtacttattcttcgagagtaccaatgtggagagcgcctcaaaccttgataaatagtttgggatcgtccccgagagattgttctggctcagatcgaggtaatagagagttggtgcaagcgaagcaatcgacggaggaagtctcccgaaaaatccgttgcgggagagatcaagagaattgagctctttcatggatttaaatatgtttggaatggtgccagagaggcggttgttgccgaggttaagccaagttaaccgagtcaaattggctatcgaacttggaatatgacccgtgaacatgtttccgtcgataactaaagttttcaattgacttagctcgccgatgttggctggaaggggaccagagagaaggcaaccttggatgtttatgtaatttagctttggtaatcggaaaatgaattgaggaaaaggaccagtaatctttcgaagagaggtgagaagaatcctctcgaggtgttgaagtttggccagcatcggcgagatagtgccggagggagagtttccgtcaagagaaaagtctccatccacacttagttgtgtgacgcggtcgttgttgacgcaaaagacaccgctccaaaagcagcagtcagtacctttcttccatgagctgagaatgcccgaaggatctttggttatacccgatttgaaacctaaaagacccgcttcgtcatcaggatcacacgtggcagctccggtggaacgaaaacaccggagaaagataatagcacctaagatgaataaattgaaggagcaagagttcatggtggtaatgtgtgtttgtgttgtgggagtgagagaagcatttggtagctattttaatagagggagggagacgacttgagagctccaaagtcaaagttttaatatttctttgcattttctatttctagtaacataattttttttgtttaataaaagaaagttgatgattttgaccgatccatttgcatgtggcagtgattagtagtatccgtaattagaggaattataatcgtggtcgaatttatcatttctacgattggcttgaacggtttcaggcatccctataagtcaatggttgttaccagagtcttgaagagattctcttgttgttattgtggaagttaattaagaaatgtaaaggcattggattagagattcaagaggaaatgaatccagtgaagtaagagacgagacaatctttaacaaattccgaaccggcaaatgagaactctgttctaactcatcaaatcctgttcttctctttgcaactaggtattgctgcttcaaagtctcttggttcatgttatcaaggtcaactgtccccaaaggcatataaaaaaaaagatttgaaaaagaaaaaaaaggttaaatctcaaagtcatcaagaacaaccaaatcattccaaaaatattgaatcgttttgccgtacatactacatttcctcaagccaagagacgctaaaaattccattcttttacatttatttagtttcaaataattttcttagtgattctacaatttttaacaagtcctcactttttaacctaacaattccaatgtatgaaastcaaaataaattaaagaagtgttcaaaacttaaatagtattttcagtttttcactaatataaatcattgtaactgagcctttttatatcttaaaacaatttttttgttattaatacaaatctaatttggaactacgtgtaaaagtaaatccaaatacaaaattgtagttctcttgttactaagctttacaaggagaaagtggagagccacaaagacagtcgttaccggcgaaggcgctagccgggaactttgtcgtaggaagttctccacaaagatggttttgacttaagtttagtctttgtagaccagccaccgtgacaggcaccttaccaaataccaagttccttgacagatccaaagtttttagtgtcctcggaaacgttaggttccccatatcgaatcgaagtttgttctccgccgcccgaaactcaagcagatacctcgtctcgttcaagaacctttctagactccctgagatctcgtttttcgacaaatcaatgtaatggtagtacaacggttccgctggcttccaatcatctaagctcatcttgatcccgcattttgctagcttcaacaagaagacgctcggcaacaaggtcacccattgtggaatcgtttctagttgaaattggttgtaagagagatcaagatattcgatagtgttgacggtcaagtcaggaaattgaccggttagaagattgtgagagagatcaagattgttaatattggtgagattgacgaaaccttgaggcacaacccccgagaaccggttcttggagagatctaacttttcaagcttgttgaatcttgatatatagtttgggatcgccccagagagattgttctggctcacttggagggccaggagtgtcggtgccagtgtagcaatcgatagaggaagtttcccgtagaattcgttgctggagagatcgagaaatttgagcaacttcatggattcgaaaatatccgggatggtgccagagaggcggttgtcgccgagttgcagattctgcatgagcttgagattagcaatccctaagggtatagtcccggttaggagattaccgccaaaaatgagataagataatcgagttagattcgatatcgagttcgggatgggaccggtgaacttatttccttgaagaaagatttcttccaacaagcttagcacgccgatgttagccggaagtggaccggagagacggttattttggatgtcaacgtaccttagctttggtaattggagaaggaacttaggaaaagatccagtgatgttcacatgacctcctaagctaatcacgcttaggtgctggagtttggctagcgacggtgagagagtgccggagagggaacgttcgggttttttgggaaatcctactagttcaagcatggtgacgcggtcactgttaaagcaaatgatacctttccacgagcagcaagaagtacccttcttccaagagctgagcatgcccgaaggatcttgtgttataccggatttgaaagctaaaagacccgcctcgtcatcaggatgacacgtggcagctccggttgaacttaaacattgtagaaaggtaatgacagaaaatatgaagagagtgaaggagagtgaattcattgtgatttgttgcggtgtgattgagagaagctattggttagctatcaatagagggagagagacgacttgagggctacgaagtcaaagtcaacgatttttacaaatccatatgcatgtgggagcaataagtgatatatagatagatccttgtcacttgccgcgttatcttgctattagaccatatttttttttgtgtcttcccatataaatattattaataaaatatgaatagtgtttttaaatggaagatcatttttaatgtgtctcaaaatgttttctttgagacattttagaaggatgtctttcatttaaagagcctcttcttattttattaattaaatttaagtaggaaaacatttaaagtaaatatgcaatgtagatgctcttagaaactatgtttattcggaagaaaatgaaacgggatttagttttataagaataccgtgggaacaccataatagcgaaaatttcatttacaaaaagtaatctttttatcatattttattctaaaatttacttatacaaaaataataattttgtttgtgtaaactaaatatgtatgttattttatgtatttgtttttaggcagttcagactgaccaaaaaaaatagagtaaattatatattgtactagtgttaaatttattgatttggttgtttttttcttgcccagtaaaaattgttgtttattcacaaaagcttttcattattcaattgaagtttgagatgattaaaagtttatttggttattattatatttatttctgaaattaatacacctctaaaattaaacttttttaaaaaatattgaaagtacaatgaacctaaattaaatagatagaacacaaatgacgtagtgtttgtttttatcgctattttttagcagaagattttaacataaattaacatacagaataaaaacaatgtttcacaaattcaacagatttttggtaggctcatgcattcctcctctatttcgccgtttgtaaaaaaggtgaaggcttacacaaattttttcactttttttttcatgtacttgtctaaatagcatatgcttcttccaggattcgattagtttcttctaatgcttttttttccttcttccactgcttttctttcccttttctttttcaaacacatcaaaccatgtgatgttctacgacctaaaatgttattttttgaatcctgttaagatcgtagagaccaagcagttgaacaaaagttgaatagttcctttttccttaatgtctcattctaacaaaaccattattgaaaacttgaagtaactatatataatctacaaaaataaaacatagagcatgagaactattgtaaacctctctgaatgttttttccattcatattgtttttcttttgtggattaagaattaatttggtatataaataagaacaaaatataactttctttttatctgaaaacaaactaagtttaaatacttataaatatctaaaaagactattaacaatggctagtttgaaagttttttcttttgctttgctcattgttctcactttctcagttattggtatgtcttctctcttataattaggagtactttctcaagtgtttacactttaacaaacttatttttgcgtttcaatacaaatttgttactttaatgagaaaatttcatgaactcgtattagacaaaactgtttcaattatgtgtgatagtagcagatgttgaaggatatataatgtagagagtggtggttctttgtgttgtaatagccacccaaaatttggaaagtgcaacacaaacaatgacgagcagagatgcaaccgttggtgtcacaatggatgcggcaatggaaaaggcggttactacaaatctatgtctcacgggggacaatgccactattattgttaactcacaattaagaaacattatgcatgctttaatgtgtttgtttgattactaacacatatatcagtatgaatatcacgtgacgtgataaataataataactaataagactacaaagccaaagagttattatacttctcaaaatctcacccaacttgatgccaattccaatttataaagggcttgcaatttaactttttttttcctacattattaacccttgaccaaataattgaatcgaaatacaaattataatctgtacaaatgagtattataaataataggatttccactctcaactctcaagtgtcatattatgtaccatattaatagtggtggaagtaaatggcaaaaagaaaacaattattacttgatgaggtgaataataatgtgatttaaaacatgtgacgtgtaattattccttctaaagtaacggacaatgaaggacaatgcaatcaatacaactaatgttcatttaacattgcaattgtttgattagcaaataagttagagttatgaaaattagaatatgtttaattggaaagaaaaaatgagacaaatttcaagagaaagattagaaaagatgagagatgtcttttatatgaattttaaattagtatgtaagatagaaaatttaggaaaaagattaattcgaaaataggccaagtgtactaatattgtgcgaattcaaaaaatttctaatccataaatatgaattagatgaataatttatgtgatactaagtagataatatttttggcacaacaaattagataaaaaaattgcaagttaaaaatacttatcaagagaaattagaaaatattagagatgtcttttatatgaatcttaaaatattatgtaagatagataaatatgaaaaaaatatatctaaaaatagataccaaatgtacttatattgtgagaattcaaaagtttactaatccatagttgtgaattagataaataagttatttgatagtaaggagatactattttgagcaaaacaaattagaagagaaaaatcaagttaagagtaaatatgaaatgtatcaatatgataagagaaatatgattttttggaattaaatatgagaaattcctaaaaatagctctaaaacaagtttgatggacaataatagcatccactctataaacttccaaaaatagcattacttgactaactatgaagtttttttctaaaagtattatcactaatttattttttcaataataccactaatataaaatatattcaaccaaaaataaattagaaataaatttaaaatattatatttggggttctctatttccaatttagggtatatatttcaaccatttaaatttttttttgattcattttaatattagtttaggtattttatttgggttccctatttccactttagagtatatattttcaccatttaaaagagatttttcatttttatattagtttgtggtattataattgggatctctatttttaattttgggtagatatttccactatttaattttttttttattcaatttaatattagattagtgtttgctctcatttttattttttatgttatattttaattaatttttattgaagtttatagtgttatttgtgaaattttagaaatgttgtgctaattttagaagaaaaacttattttggtactattttttgtcaattgcccattaaatattagatataagaaataaattaaaagaaacaattttacaaaagaaagaggacaagtgtcaccaaaagagagtgccaaatatcgcaatgttcagaagagttaggtaaaaccttcttttattatataagataagatgttgagatttataaatggctaagtgtaacgatccagacttggcctaagcgttcatgtattcggtttggtattttctttccaatattttaaggtatttcaatatttttgggtattttaagatattttctagtattttcaaatattttgatatttgtaaatatattttccaagtatattttggtattttgtatatgtttggttattcgatctaaaaataactaatattttggatatataattggatatttttgagtatccaaaatattttggtttggttcgggtttgattataatctttttcggttctagaattttggacctatttgaatattttacaattggtctgagttcagtttggttcttttttcttcggttccagttcaattctttcggttcacttattatgtccagacttaatccagacgatggactgacttgactaattatatccgataaaatcagacgggatttttggatcgagggaccggttcaagaaattctggtcacgcgggatcagaaaatccaggtaagtaaatttaattcttatactcattaatttgactaactgttatgtgtattttgtaaagtttgggtatttaaaaaaaagtagaaaatttggataatttctgttaattttgtaaaagttaaatacataaacggaaatacgagtatcttttccgaagtcctcgccgttcactttagtagtaacatttcgcgtatatggaaaacaatgtcggagggttgaaatactactttcactaatacaataatacgtattgattatcgttgttacatgtagtggagcttcttgatgtcttaagttaatggtgtgtttttgttgattgagagaagcattcgtggtagctattaatagaaggaaagtcatcgactctagcgctgacgattttgaccaagtcatatgcatgtggtggcattacgtggtggtataatccgtgatcgttgttgagtttagcatctctggatcccttgaaagagacagtgtctttcatcagattattatataaatggtttaacatatcttctttttctagaattttgttgttacattgtattaaaactcataagtcatatagtttttttccactgtcttattagtatttctttctatcaaatttaaataaaattttatttttattatggaatttagttaggaaaaataaccattttgatttttctctaacatctatatatacatttttgcagccattttgtgaaataaatcctggagttcgaacttatttacaatacctgccattgccttttaattattggttttcttttggcaataaattgattaacaaacaaaaaatattccaaatatattataatcccatatatcacgcaaatttctccaaaatttaaactagatttcggaaactatttaaaacaaaaaatatttgacaaaccaaaatacaattgcaatcccttaaaatgagcaaaacgcacctaaatacatttcctatcagttcactaaatcttatttctccaatatttgaactagatttcgacaaccatttaaaaaaaaaatttgtttgacaaactaaaatataattgcaatcccgtaaaatatttatttaaattagcggtgtatcgcagatttttttaacgggacgggtttggtggaacgagtttggaaggatattacttaataacaattgtaaactataaaatgtaaatattttatagataaatataatttgcagactcttatatatactaattttaaaaacaaattgtctccgcggtgtaccgcgggttataatctagttatgtacgttattttcgtcttacttttttcaacacgttattttaatctgtccaacaaaatgttcgttattgaccttaaattagaagtgaaagatttgactgtttagatttagaacgatctaagtgcaatgatctagacagtgaaaataagttggcctcaagatggtcaggtaaacattatgctttattttcttagcataatctaacattagtagctttatctatttgcctattgtaagaactaagaaagtgaaaatttagattgttctcgaaaatcgatttgttcagttttcagtttatggtagtgacatttaagatgcatgctacctctcttatgaatgccgtagcgttcatcgagatccatttgtttttatagctttgaataataaggcaaatctcagtgtgtctacagttttaatatttcatattattacacaaataactctagttttcttgtctacaaagtcaccagtttcatgattctaatggaacatttattcccaagatcttcattacttcttggatgtagggtaggtaccgagagtgaatgtatcaaactattggtttatatgtgatattattttgtctgtctagattttagatatttagctcaccaatgattagactgcccacaaagtaatcaaattaatgttggaaattgagaataaccgatcaataatttgttaaaacatcaacatgatttatatttacatggctatgtactgtattatcaaatttcttaaatattataaggttttttttaaacaaaaaaatcacaaattatggtaagtggtcataatattattttttctaaacatgttttactttttcttttaactgacaaaagttcattattctgtaacttctgttaatgttctgttagttagtgttctgttctgttatcttttagggctgtacaaacaaaaaatgttaatttggagatctagagtgttagtttaattaatttggaggtttataatgctagtgaaaatatcttgaggtttaaagtgctgctcagtgttaggtttaaaatgtgattttccccttaaatattttgttattttctattccagtaaaaaaaataaaaatcatgtccatgtatggcgtagccgagtaggctaattttgttattacaaatcttattcagagctatgtgttacagtactcaactacaaaattgtacctttttgccgctaaattttacaaggagaaagcggagagccgcagagacagtcattaccgacaaacgcgctggccgggaatttagtcactggaagctttccacaaagatggttatgactcaagttcaatttttgcagtttagccacggtcattggtaccttcccaaatatcaaattccttgatagatcgaggctttctagtctctcacttaaattcagcttccccatgtcgaatcgaagtttgttccctgacgcttgaaactcatataggttatgcgctaggttgaagaaccatgttagactccctgagatctcgttttctgacagatcgatgtaaaagtaaatattgggtctcactggcttccaattgtctaagctcatattgatcccgcattttaccagcttcaacgagtacatggacggcgacgaggtcacccatttcggtatcgttttgaggtgaaattggttgtatgaaagatctagagtggcaaggccatcaacgttcttcatggcagggagtggaccagttagaaaattgtgggagagattgagatggaaaagtttaggcatattggctaaactcttcggaacaaccccagagaacctatttctagaaagatccaatgagtctagtaccttgaagtttgataaaaaggtcgggattgtcccagagagattattctggcttagatcgaggtaattgagaattggtttgagtgatgcaatggacggaggaagatttccagagaatttgttgcgggagagggttagagattggagcttctgcatggatttgaaaatatccggtatggtttcagagagacgattgttgccaaagttgagtgacaacaagatcttgagattagcaagacctaaaggtatagttccggttaagagattatctccaagattgagcagatataaccgggttaaattggaaatggaactcgggatcggaccagtaaacaggtttccgtcgagacttagttctcctaactcgcttagcgcaccaatgttagctggaagaggaccggagagacggctattcgtgaagtagacttgttttacatttggtaattggaaaaggaattgaggaaaagaaccagtgatgtttcgaagattggtgaagtaaataccaacaaggtgttggagtttggccaatgacggcgagatagtgccagaaagaaagcttccagtaacatcagattgtccgttgatagtgagtccggtgacgcggttggtgagacaaccgacacccttccatgaacagcagtcagtacctttcttccaagagctgagaatacccgtaggatcttgagttatacccgatttaaaagctaaaagacccgcctcgtcatcaggatgacacgtggcagcttcaatgggacttaaacaccggagaaagataacgaatgcaaagatgaagagagggaagcaacaagagttcatggttgagttgtgttgattgaaagacacaattggtcgctattaatagaaggaaaacgttgaatcaagagctgccgattttgaccaattcatgttcatgtggtggcaataagttgtggtaatatccgtaatcgttgtcgaatttattatctctcaacccctcgaaagagacagtttctttcatcagatttttataatattttgatgattatagataaaggatttatgtatcttatttttctagaactttgttgtcaaattacaattgttttctatcatgtttaaataatattttgggctattatgaaacttagtttggaaagaaatttcatttatgttttctcaaaatgtacgttatttttgaaaaaaaaaaaatatttattaacatgttatttttgtctaacaatatgtacattattgaccacaaaataaaagtcaaatatatctaagtacaatgatccagattgtggactaagttggcctcgagatgggccgatagattcatgccttaattttcttagcgtaatccaacattaacataagtagctttatctatttgtttatcgtaagaaattatagtggaatcttagcttgttttggaagaaccaattactcaattttcgtttatggtggtgaagttttaagatgctgcatgcattagtcttgttttggaagaaccaattactcaaactatctttttttgtatagtttttgaataatttttctaggttggtttactatgtctttgtctcattgaatatggatgcattagtctaatcgaactttagtgttttagacaaaaaaaaaaacaatactaagttgaaacctacttcagagatggtctaattcctcaatgcagacgctatatgtcctgtggatgaccttgtgttatgtgtatgtaaagagaaaaaagaggtttgatactagtatatatcgattacttggtttgttgtttggtatgtgttatttgtgatcaaataaattttgtagtgatgaagttatatgcatctatctagtaaggactcctcttgttttcatcactaggtttttgttaaccaattatagaacactgaagaataataaattacgcatagttctaaataagatatcactataactttctttctttttttgtatagagcgagttaaattccagtaaacatagattatttactgcatcatttgttgcgactattctgaattgagaacagattagccaagagttgcatactacataatcagtttaatatataagcaaaagttacataaattggagcatgttgtatcagaatactactctgtttttccttctattttttaaaatcatttttctatcatgttaaagtaatattttagctgctatataaaaaatgcataatagttgagaacttaaatactactttgagtactttcactaatacatattgttagaatgaagcttcttcataacataaaactactttatttgttgtaatctttttaatacaaattttatttggagctaaactttattggtcacggtaaatatccaactaccagttgtagctttcttgccgcttaagctttacaaggagaaagaggagagccgcaaagacagtcattacccacaaacgcactggccgggaactttgttactggaagctttccacaaagatggttgtgactcacgttcaatgtctttagtccagccaccattgccggcaccttcccaaataccaagttccttgatatatctaaagttgtcagcgtctttgcaaacgttagcttccccatatcgaatcgtagtttgttacccgctgccttgaactccactagatactctgtttggttcaagaaccttgctggactccctgtgatctcgttttccgacagatcgatgaaatcatagtagaatgtttgcgctggcttccaatcgtctaagctcatcttgatcccgcattttgctagcttcaacgagaagatgatcggcgacgaagtcacccatttcgggatcgtattcaagtgaaactggttgtaagaaagatccaaagattcaatgcctttaacgttcaagacagggaatggatcggttagaagattatgggagagatcaagattgaatatcttggtcagattggcgaaactcttcggtatgacacccgagaaccgattcttggagagatccaatgtgtcgagcgccttgaagtttgataaaaagtttggaatcgtcccggagagtttgttatggcctaactcgaggaacctaagaatcggtgcgagtgatgcaatggacggaggaagattcccggagaatccgttgcgggagagagttaaagatcggagctctggcatggatttgaaaatatctggaatggttccagtgagacggttacctccaaggttgagatacgacatgagcttgagattagcgacccctaacggtatagttccggttaggagattattgccgagtttgagttgagttaacagagtcaaattagatatcgagctcgggatcggaccggtgaaccggtttccctcgaggctgaacgcttcaagctggcttagcgcaccgatgttagccggaagagtaccagagagacggttattctcaatgtatacgtacttaagatttggtaattggaaaaggaattgaggaaaagaaccagtgatgttcttgagatcggtgaagtaaatcccatcaaggtgcttgagtttagccaacgacggcgagagagtgccggagaggaagcttccagcaacatcggcttgtccagcgacagagagtgcagagacacggtcagtggtgagacaagtgacaccgttccaagaacaacaagcggtacctttcttccaagaactgagaatacccgaaggatctcgggttatacccgctttgaaagctagaagacccgcttcatcatcaggatgacacgtggcagctccggtgggatttagacattggaggaagatgacgaaggtaaagatgaagagagtaaaggaagagttcatggtggtgaattgtgttgtgttgattgagagaagagagctattagtagtggggaaaagattacttgagagctgcgaagtcaaagttgacgtttttgaccaatccatttgcatctgcatgtgaccataattattagtggtatccgtaatcgtggtcgaatttatcatttttccccgacacacttgaaaaagacagtttcattagatttttattatagtttgtcttttcttgactattatatatgcataggtcttctcttgacaattaacacgtcttaatgttttgctaaaaacaaaattctacttttttcagacttcttataatatattttcgttttttttggttatattttgaaactccagtaagtcatagtatttttatttttcacaacatttccgacaaaagaaactgtcatagactcaagagccaaacgattctaacagcaagaacagagtaattgatgttccaatacatgactgggctggacttccgccaactgtttttggcgatgcaataacacttccaggaaacaatcagtttatacaagacctccttattaatattaaaattactagaagaatattgagcatttataatattatattgtagcagttaatcgtgttctgctataatttactaaccagctaaaacgttataacgtttggttttcaaaacgttatactatcttaccccgggaaataaaatgactcgggtcaatatttttagattaggggttattattcgatagcactaatttacaaaaaccgctacctaatatagtagcgcggaatgaaatttttttgctcgttggagaataaaatatttggtgacttttaaccccgaaatttttttctaaggccaaaaaacattgttcgtgttctcactgtttttcatctcactgttcttcatctctttcaattctctttttcaattctctctgtttgtgttcgtgttcttcagctgtctgtctctctcccgtctctgttcgtgttcttgctcaacgcctcaatctcttttggtactcttcagcttctcagtcacagatctggttctaaatcgagaaggttatgtttcttttgtaatcgatttagggtttgcattgtgaaattgtctggtttgagtttcgatttggggttttaatcacatttagggtttgattttcaggtttctcagatttaggggtttcgatttggggctttcgctatccgcgtttctcaaagatttcagtggcttctctttgacaagtatgttatttagatcgatttctgtggttcttagatcgattttgagtttcatatagctttgaacttgactattctcatgtgtcgaattgagtttcatatagctttgatagtgagcattcatttgtatcgaattgagtttcaaatagctttgatagcttgtattcacttgtattgattagaacttgactattttcagtgactattgacttgtatcgattagaagttgactatttctgtgacttttcacttgtatccaatggaacttgactatttatgtgattcacttgtatcgaattgagttaatttctgtggttcttagtatacgtgtagctttgagtttatgtggttcttgtattcaatatagctttgatagtattgaatttttgtttttgaaatttctctttgtgtctttgttcttgtatctctgttaactaatatatatatatatatatatatatatatatatatataaatattatcatatatatggggttggagcttgttggtgtttcaaaaatggataagagttgggtatggctgccaaggaatagcattgagtacgagaaaggagcaacaaaatttgtttacgcatcatcgagacgtttgggagatccttctgaaatgttttgtccatgtacggattgccggaatctgtgtcatcaaccaattgatactgttttggaacatctggttattaaaggaatgaatcataaatacaagagaaatggatgttggagtaagcatggggagatacgggctgataagttagaagctgagtctagtagtgaatttggagcttatgagttgataagaacagcttattttgatggagaagaccattctgattctcagaatcagaatgaaaatgatagtaaggagccatcaactaaagaagaatctgactttagagagaagttgaaggatgctgaaactccattatattatgggtgtcccaagtacacaaaggtgtctgcaattatgaggctttaccgcattaaagtaaagagtgggatgtctgagaattactttgatcaacttttgagtttagtgcacgacatcttaccaggagagaatgtgcttctaacttcaacaaatgagatcaaaaaattcttgaagatgtttggttttgggtatgatatcattcacgcttgtccgaatgattgcatcttatacagaaaggagtatgagctgagggatacttgtcctagatgcagtgctttcagatgggaaagggataaacacactggtgaagagaagaaggggattccagctaaggtacttcgatattttcccatcaaagatagattcaagcgaatgtttagatccaagaaaatggctgaggacttaaggtggcattttagcaatgctagtgatgatggtacaatgcgacatccagtagactctttagcttgggctcaagtgaattataaatggcctcagtttgctgctgaaccaagaaaccttagactaggactttcaactgatgggatgaatccgttctctattcagaacactaagtatagtacatggccagttttactagttaactacaacatggctccaaccatgtgtatgaaggcagaaaatatcatgttaactcttttgatacctggacctacaacacccaacaataacatagatgtctatctagccccattgatagatgacttaaaggatttgtggagtgatggtattcaagtttatgactcattcttaaaggaaagtttcactcttaggcacagattccacacaccaccagccgcaaaggaatgattcgtctagcccatgagatggtatagtatatgtccactctgtaatcaattaagcttgtgtaaattggttaccatcaactaatcactatctgttttgtagaaaaaaagagttccaaccctaaattggtgacaagaagtaaggtttggataacaggtcatacacactcagatgggagacctgtcaaccctgaatttgcagagacgattgtaagacaatcattaacttgctttctttttttgttttgctagtacttattgtcattacattctgtttcaggaaaaaatcaaatctatggatagtgaaatggactcatcatcattcacctatcttaaagaagatgttgtgagtcaagtattaggtaaagacaagcctggaagacttagaggtatgagcagaggagtcactgcaactaagttagcattcatgttagctagagattcacatgtggagaagcttgaagctacacaagctgatttgctgacaaagcttgaggacttgcaaaatgtagttagtggcttagctaccaaaaaggtaaattatctaactgaatacacgtgctattaagcaaaattgaatgttatatgttactaattccattgtttttgtcaggaacatgttgaagaggtttctaagtaatgttagtgcaggagttcgatgtcagttacttgattggtgctcagatgatgatgttgttgtaggtgaaggtgaattctgttctgctgaacaaatgtacaagattggacggattccatttggacgtaatgctgcggctgttgttgtgaagtcagtgtcaaacgccacaacttctttgtggaggcctacatcatcaattttcacacttggtgaaactttagggaacaagattgcctgacctttcgataagatcattctagacagtgacgtatcatcaccttctgagaatcagactgcaggatcttcggtaatgtcttttttgcatcacttgtcaattatctagctgaacctaaacattgactctagtaactttttatttatgcatcatgccttaggctaaagattcatcagccgttaaaatcatcataattgattggaatatggcttgttctgtggttggtgagggtcggttgtgttcaacagaccgactagaacttgtgaacaatatgcctcttggtccttctgcgggaattgttaaggttgagaaattgtttaacaaagacgcatatttgtggagagcaagtccagaaaagtttgtgatgggagatgtactaaatgagaacattgcatggtcacttcatagtatacaatatgtgaattcatctcctccacagtatgaaacagcatcagcagaaaaaagaccattaccaccatcagcagataaaagaccagcatcagtaaatttctgcactttaacttacagcctataaaatcacttaagtattatttctgcttgaatgcttggtattatttctgcctgaatgcttggtattgttttttaatcttgtagagcttaagccacagtactactagcactagcaaatctgccaagaagaaatgcatcatgttagattacaagaacggaagagaaagagttgcagaaggaagagtatgtgcctctaacccttcagacacagtccaccatatgcccctaggtccaaatgcgagcaaggtatgtgtagaagtttcaaagattggagatgctgctgtgtggagaccaaactctgaaattcaaaccattgccgatgcagtaggtagtattgtggcttggcctagtgataaaatcatgtttgtgtaaacattatgtgggtttttttattaagtactttgacattgaaatgtaatttgggatcttgaattttatataatatgaatttctttctgaattttgaatttatgatatctaaataatatgaatttttttctgaatttgggattaaaaaataatttatgaactgaaattaattgaataaatattgcataattaaaaatgccataatagaaatattgcaattaactaaatactattgtctaattatatgtagcaaattaaatatgctatgtataatagttattaatatcagaaactaatcgctattaaacaattaaagattgcagcagataaagcgatgtaattaatgaaataatgatagcagaacaaaaaagcgctacaatatgtatctgacctattatgacggacgatgatagaacgcttctaataacgctatagtataattaaatagcggttttcggacactacaaatgctccatattcttgtagtgaaattttgataaatttggagaaaaccttagaagtagaatagtttctctcagttctatttattacacattaggcttatttataaaacaattcttgacttacatagaaatatatgtaaaaacgattttgaagaagaaggacaaaaaacaaacatgatatccaatgagaagaaaaaacaatcaatatgtgaaaagcctaatgtgtaatcaatactagagatttgtaatcatttgttaggaaagcacaaaataaacatggaaaagaaattaatgttgagagaaaaacaaatatgaatgggatcaaaagtagaaaactagggcatgacatggggtcaacttagaaagtttataccaaaacattaataattattaggtaatttaccttataattaaaaaaattataatgttatggggttaaatgatcccctcctccttaattggctccgctcctagatatcgccattaaaaaccagtgcattaacttcataaacagaaaacaactcttcttaaagttaagatggatagctaaaaatgatcttatatatagagagaaacattccaaacttcaaataactcgctctaattactgctgatcaatgattaatacaaggggttatcaagagtttgaaggaacaagaagcctaatcgtcaagccaatccacggtgaagcattttttggcgacttcaatgcaaagttcaggaaccaccttcttgaccatttcccacatagacgaagtctcctcatcgcaaatgacatggcgtagagacacaagtgcagctacagaacttggtaaacccaataaactgcattctctcatgtcaattttctcaagactccctagctttccaaacttttcaggaagagaaaccaggctgacacactgtgaaatgtcaacgtactttagacatggcagctcacaaacttcgaccgggagggatatcagctcggggcaggcatataaccttagacgttcaagggactgtacgttactcaaattcttgggcaattcaagaatccgtggacagttggttatgctgagagagttgagagaggttattccaaatatggattttagttccaaaagatcatcacagtgatcaatagtgagatcagacaagcttgggaatattttcgagatgtcgaatgacgtctgaacaaagctgttcttgaccttacaaaagattagatgtatcttgtgcaggtttttcagtggaatggtgcagctggtgagttcagggacatgtaccctcttgagccagagactcctcagtttggccaaattggcaaagatggagaagccatgtagacgcgcaggagacatgccattgttgataatcacgagcaccctgagtctactcatcttaccaataaatggtggcaagacgtagttgtccgaagagaagttcagtattaaaacttctgccttagggaggtccatgtcaaaccaattcatttcatccatttcccctaaagacacaaaaaaatctatcaaacctgatacgtgataagagttttaggtgttttggttttattttagtggctttcttatttatcacgttaagaaagtctaggattacgagttcaaagactaaatctttggctcgtatcaacttgaagactctagtcactaaccaaattcatttaaagttaaagaagtcttgcctgtatgaagggaaactatcttggcatcaaatggctcatctttattcttttcccattctcttggaagcactggctctgtttttggcattaataaccgctctctcctatttacgtccacacgattggacatatgaagggctaggtctctcaaaacatcgtgttgcgtcacaaatacatcatagtagccaatgtgcacatcgccaaacctgcaaatttatgatatgattaatcccactgaagtgttggtacaagagacaaagtcataaaagagcgaatacctcggattgttcactatagtaaggagattcttgtcagctaaacgaagaacaaaggaaaacgcagtttcctcgtcaatatcatgcctctcaacccacacgctcgtgagaagatcaagagggatcttcttgtcttcagggaaagcacccatatccaagaaacagtctcggattttcgggtcgaggttttctagactttcttccatatgagcaaacactctgctctcatgagtttcatcagcagcttctcctcttaataacctcttcactacgccttcccaatatctttcaggtttgttttttaacgaagcaccaagaactttcaaagataaaggtaaacctttacactcatcaacaacctaccaaacagagtaacaattttagtatttggaagcaaagtgtgtttttagttacagattcaaatatttataaaaaggcattagtacctgcttcaccaaatatttgttgaatggagaaggcggggacttttgttcgaaagcacagagacacaaaagagacattgcttcatctttctttaataattccacattgtaggtggttctaggatctgcaagcttggaccgtgacactactaaagtagtgcttccacgaattttagacatcagcctgtccaaggactcccttgtccaaacatcatcaagaatcactagcttccgttgatgaactccatcataaagaaattctcgtatacaagactccaaattctcaaaattcggagaccgtgacacagtcaaaaacaaaaccttattcttaaagagtcctgcacaaaaatcttgattagaactcatgaccatcaacacaaaacaaaattcaataaaacttcacaaacctcgaacatcatcgtcctttgaaagctctattgcaagagtggttttccctgaaccgctcattccagagatcccaaacaaatgtgtatccgtaaacttaaacatcatctccttcacctttttcttccccaattccaataccgtctgaatctccggatcgcttaccgtctcaatctccatcatagtctccggaaacgacaaagaatcattccgctcagtcaacagtctatccatattcctctcaatcctgtcaccattgacccgtagatgacatacctcagcaagaacaaagagcaaaatctggctgttgaggaaacgagatatttgtttctcgagatccttcatcttattcgcgtggtacacatgtttaaggttccacctattgcatcttaaaaccttttcacatagctttcttgctttctccaagatctcatagaatactcccagttgagtttggtgatggttactcagctccgcgccactgtattggatctccctgatcgttggttgaacgtctctgatcatcgtgatcagtcgttcggcgattcctttgcaactgtagactgtgttagctactagagcgagcagctttaagagttgcgtcgtgatgtcgccggcgaaaagatctatgaacgaagccatcgagaccgatcttggagtgtaagacagaaaaaagaaagtgagatggttgagtggtaataagggttgatacgtttttagattagaaaatagcgaagaagacgaagtttcttagcaacttccaataacatacgttttgtcgtttagtgttttaaagttttgtttctgcggtaacacatgtaatagctttgtaatagatttcagagaatgtatggatcttatggttacgtatcagtttttcacttattatcaaacagatcgatttagtagttttttttcgaattcgattatctagacaaactctaaattacgatattccctaatacggccatacgggttcaatcactttgggagtgtaattgtttaaagttagctaaatcctatttggattaatacctctaatcttgttttttttggtcgctatctctatctaatttaactaattgggaaagaaaaacgatcccatatgcaaccttgtttataattttttttttcttgtgattatttggtgttgatatgtgtataaactatatagggattagggactcgaactttttcaatgtttattttgtagctttttttttttttttccttttgacgtcgatttgtagatctaatcatcaaagatcactttactctttttacgcgttttgattaatattttatatatttcttcaaattacttaatggtatatatacactagtgttggtccagctccaatggggttacaagaaccgtattcgcagatgggaagccgcatgtgtactatacggtggctggagaaggcatgatggttcaacagccattgcctcagcctcaaccgcagtaccagggaatagtcaaccggttagtaccatgtgttgtggaaaaaaaaaggtgttaccgtgttaggtaagaattgagaaaacattggatgttaaaagacttgcttccacactaactaatccacatgacacatacttgtcatatcattgagggtgtgagtcgtgtgactagttgactttaatagaagaaaacaaaaagaaagggaaaaaattacatgtattagtccaacaaaagaaattggaagaaaattgtttcttcgaaaaatatcaaaaagtaactaaatcacatgaattcttccatcttcaaagcaaataaaaattatttttcttcctgatgtgattattctatttttccatttattctatatgtttaaccagtcacagccttttaattaaattttacttagcgacaatcattatattgtcattatcattttgatcatctcaagtctttgtccttattatttgttgccaaattaatatgtctcaatccagaaacatgggtccatgtaaaagctatcatgtctttgtcattaggattcaaattgatatccatcttccccttaattgttcccaaatttgtcttatcaattttatttcttgtctttacctcatcaatggatatgatgtcagccagattggttctaattcggattttttcctccaagttccgcatttaactgagttggttagaaataagcacactttcccagtgtttgcataaatagtgtttataaagacataccaaaaacctaattaaaaagaaaacaattccactcggatagactaaaccaattaaaaaccataaaaaaaactaactaataaaaaaaaaaccaaaagcactcggttcttatattcagattattctagtaactcgttaatccatcaaagtttatgaaaacgctattaaacacatacaatagcgtttatcttgagttaaaatgtctattttttcttgtagtacgcgacttaacgatttcgtgaagtcaacataagttagcgattaaattgataagtcaataaaagttgggtatatatttcatcgaagaaagttgaggtttgtattcaacgaaatttgaaggttgacgcattaaatgcttagttttaatttggtctaaccttaaatggttaacctaatttgtaacacccgacctgtcatatagattaagatgacatgtttttcatttgattttaccaaaacgttttctttaaacgtcaaacacgaacaaaatattacacataacttcctcactcttactaatctgaagaaaaaatgaataagggggtgagtaaagaatactcggtgagaggaatacgctctgcccactgaaacatagaacattttctaaaggtatacaaccatcatcataacatataaacttagatacaagcaaccaacctaacatgctttaacttctaacaacacattcataataaccatcttatccataatagcaaatacatacatatcgttaggtccagtcatctttgtgacgactagaacctcatgagtggaggctggccctcgtggctcagacactccatgcattctggctcgtcagcctttcttgaccagcatttaatccgtcggcgcatcattgtccacattactagggagaccacggcccatagctcggacatgagctcctgttcttgacgagatacacttttcagctcactctacactatatacggaaagagtgaaacggccgtcgacatggagaagtgccacagcccgcagctcaattgactcgctttcttgataagcaagttagaaatagaatctcatccattcaaaaccaaggggatagaagatgtgatggttgcatgacatgctggtttggatttagacaatgaggtctactatattttgatcttattttttaatcttctgtatctaaaaaaactgtaaacgcaaacgttgcagtcaatgtaaacaagtttttttcgaataaattttaaattttattttattcaaaaaaaataaaaaaaattaaaaatcaataaaagttggctatatattttatcgaaggcaaagttgagacatgttttcaacgaaatgtgaaagttgaggcactgaatgctctaacggttataatttgcttttttttcttggagttgtaataataaatttggtttaaccttaatggttaacctaactttatggcactaaatgctctaagctaaggcacgagtttgattggttcacctttgtgttcaaatttttgcatggccataaactttctactattttataaagggattaatttgagagaagaaaagtattaaaattttagttgagggttaaaatagattggccaatacttgtggcttttttttcattaaaattccttttatagatacactaaaaacaatctttaccaaaaggactataaataagtacactaattgtctaattcttttcttttttaactacactgatccatatcacttcgatctagaatattaagaaaaaatgaatcatatgatagctcctttgttacttgttattttttttgttttggattaagtgaagcttgcaaagataaccgtcttatatttagaaacgagcttgttaatggtcgtactcttagagtcacttgcgtttccagcgaaaaccgtcgagttgtcaaagatgtgaaacatcacgaggttttacgtattagttttgctgtgggtgcatccgtaaaaaggttccattggaactgggactttgagcaatggtctaggtctaaaatgattactcattctcgtttcaggacatacactgcaatttttatgcctaaatgtgataagttacgcgtctatagtgccagacccgatggaatatacgtaaagatcaatactttttcaccaccggaacgtgcctttaggtggggtggggtttaatatggagctgagatattttagattttaatttcgttatagaagctatatatgttatctttggggtttgcggtaagaatatatattaaaaaaatgtaactagataaaagaattcactgaatatctatgaatcatgtatgaattttttaaaaacacgatgtcattaactagcccacactatgcgtgagcataaaatggatttaaagttttttcgttagtagtatatttaatttaatatcgtttgttatgctatgtttttagtattattgcttaaataaaaataaactaggatgggtacgtccggggttatgataacatagtaaattattccaaatataaagctcgactaaatggccaag

SEQ ID NO: 1164 - DNA, 80309 bp, Arabidopsis thaliana
aagcttttaggtcaagagctagaactgtaggagtgacaagcacgtgcgagtcacagagagttgttcaagaagatggtgatatcattaatgttgttgatactcctggtaagctccccaattgtgtaaattgtttcacttttagtctattttactatttgagtgttatgttaatggtgagttttgtgtataggtttgtttgatttgtctactgcagctgattttattggtaaagagattgtgaggtgtataagtttggcagaagatgggattcatgcgatcttgttggtattctctgtgaggcggcttgctgaagaggagcaaactgtgcttagtttcttgcaagcgctattcggcagtaagatcgctgactatatgatcgttgtttttaccggtggcgatgagttggaagagaatgaggagacattggaggagtatttggctgactattgccctgagtttcttaaagtaagctgactttggctattcttttcttgagtctttcattaaagaagtataatttgaattgtgtgtggcttgtaggaaattcttgggatatgtgacaatcggttggtgttgtttaataacaagactactgataaggtgaagaaagctgagcaagttcagaagcttctctcacttgttgaatctgttgttaaacagaacaatggaaaaccgtattcagatgagttgttccatgagctacaggtggagattgttgctttcactcacttttctgagttattctgttttggaggagaggattctaactgtggttgcaatttcaggaagaggctatcaagctaagggaccagaaaaaggaggttgagttacttcagggttactctaataatgagatagatgagttcaagaagcaaatcgatatgtcctatgataggcagcttagccgcatcaccgagatggtaatttaatttatcaatagttatggtctcacaggagagtttcattgaccgacagctttctgttttgttgttgttcaggtggagactaagctgagagacactgctaagagactagagcagcaactaggtgaagagcaagctgcaagacttgaagcggagaagagggcaaacgaagttcagaagcggtcgagcgatgagattaagaagctcagagagaatctggagagggcggaaaaagagacgaaggaacttcagaaaaaactgggaaagtgcatcaatctatgatatgttgagatgttgtagctccagtgaaatctgataagatcattcatgtcaagtttttttatgtagtcttttgttttcttttggttttttaacaatatggttttatcattaatggcagtgtgttataagtttgcttaaatcataccccttattttaggtgcatccaaatcactgatccaatacgtccaatttttttggtgtaaacatgacgttttgtttggtgacagttagaaaactcttttggtaagggccctctttgtcatatcaccatatggttttctaatcatagacaataagacgcatgcatgtgcatattttcgatcttttgattctggtcaaatttcggtttatcagttttctaatttttgttttgtgttgacttgatgggttatatgtttcaaactcattcttggctcgttttatcctcttgtgtttggaatccgcctatcttgccaaatgccaatgaaatgactccaaaacgcaactaaaataccacaaataattcccttggagttataaagttcaagaagtcacaaattaaccactaaatgcaacaaaaaaagaaatgaaaccataaaagagacataaggaaatatgtaaaacggtaagcaagaacttcgctattgcagctttctttaattaaaaacataattattggtaggaaaatgggaggaactgttttctcttcaaagagaatggtaagaaattcgtcgggaactttattaccatttttcttccacgttttcagtcggtaagaaatttgcgacgaacttcctgtcattctcgattttctacgtaacactacttatacatatttttttgtaagaaaaattgtaggaacttgcttgttcctactattatcataggctttacacggtaggaaaatcgaacattttcttgtaatattcaaaaattacaaatcttagctcttttcgcctcttcattcttacaatgagaaaaaggtgatattgattcaaatcaagtatacaaatcctagggttaacaaacatagactaaaacgtgaaataccttaatgaaagcgtcgagtgtgtcttgagagattatgctccataactcaacacaatgaaacttttcattgagaaaaaaaaatctctttctggactctctattaaattatataaaaacgtgtcacctcacataacacttacacacatatttattacactaaaaatacgtagcaaatcaaacaaagattaggctacgactggcctaatcaatttagataaataacataaatgaaaatgaaagaaaagcaaaagctgactcataacaggccaaaagtccaagagcatgctcaaacgaggaacatagaaaatgttccgcgttagaaacacaaagtctaggcaatggttctctatttgtcattaagaaggcaaagtgtgagggtggaagagcgcacagtgaatgatcagagaatgctgcactgctgacggctgagcatttgcgcttccatttcagcacgcatacgtccttccatctgctttaacttctcctgcatttccattttttgctggtagctcatctcctgagctttttctctttgctcaaagagcttctcctgcgcctccatagctattttcatatttttctccatctgaggtaaataaaaagatattgttaatgacaacttcaacaccacttatgcttatgtttatatgtgaaagaatatgaggagtttataccatctctgccattgccttgaggtttcgttcattcattatctgtaactccttcatcaatgctgcgagctgctcttctgaatgcccttttgattctagctcctcttgttctttcttgtgcctttcattttcttcctgatgagggagagaccatttgctttctttagcattcaaaacatcgcgagagatggatgcaaatggaaacaaaagtggtaaactctttaacctttatcatatggtacatctcatcggtatacggaatattgttgttctgctttctgaccaagtcgataagtttgagaagttcatggacttgctttgtctttttctcatcatccttggttttgttatcaaacagaatcattcgttggccacacaatatgagaactctctgaaaccaaagaaaatgcaataaataagtcacgaagctgaaacctctgtttccgtagagtgcacaaatttgatcacaaattaccaacctttaggaagtccggcatgttatcacccaagtaatcctccaatgtcataccgtcatcttccaatacatctccccccgtgaaaacaacgataaggtaatcaacaatcttactaccgaaaagaacctgcaaggtactaagtaccatctcttcctcttgactaattcgagtccttacagataaaactaagagcacagcgtgtagccctccatccgctagagttaggcatttaactatttctttaccgataaattcagcagataccgacaaatcaaatagacctgtaaccaaccccagtccacattagttacatactgatgacatataaaaaagtcaagatgtgcaatgataaaacagaaaaactatcataaaaatcctcaactattgaaagcgttaatgtaaatcctcaactctcgaccaaacgaaataaatatcaaacttatgtcaacaaaagttgggtatttatttggaaaatcaacataagtttgatatatattttatttcgtcgagaattgagaaattaaatcaacattttcaataagttgaggattttaatgacctttttcccatggcacaacgtaccaggagtgtcaatcacattgagtatagggccttctggtgtcactgctttaactgcatggcattccatcgtaacacctgatgattttgttttcgacttaaacacctttgatctgacgatgctgttccccgtggcgcttttgccgttccctgtacgcccaactaaaactatgttttcgaccggatgtggctgtgatgccgagaattcatccttatggtctacttctgctggagctgccgcatcatccttcttatgatcttccttcgctggaaaagactcactattcttctgatcgttggccatttgctgaaatttccttaaacccttcatttttcacgtaaaatgttaattattagctaatagatcaacataaaaacgttgaaaaagctatacgtgtatggttacgatgtttgagaaaaggaaaatataatcacatgaagaaaaactggaaacttaaagcttgtaagttgtcaattaaaatcacatgaaatacagagaaagcttagagggcacgtaatcgtaaaccatacaaattgatcgatgagaaatttaaaaaaaaaaaaaaaaggtgtgaaaatgacgaacttgatttttctggtagctcttaacagatgctaggcagaagtggttcatcatcaagctagttttcaagtttaaatagaacaattgaaagtccttttttcttcaaataaatataaatataaaatctatataataataaataaatacataattagtcttacatataaggatccttttttagactgcattatatgaagttttagattggtgaccactagaagaaatactaagaaacaaaaagaaaaatgaatgaaactaataaagaggaattaaattaagaaacagaaaatttggataatcagaatatgaaagtacaaacaataaataggaataaactatctaggtaactatttaaaaaatgtttggaacaaagaaattaaacttaaataacaataaattaaagttaattgtaaattttattttatgaatcaaatttataaattcatggtagatatatatgttataaatataagttatagtagtagtttcatattttaacataaatttaaatcttttggacatatctctcgtatttattttaccgtcaatataaaaatgaatttaattcattaaattatttaaacataaaatttcgtataaaaatattagtaactaatctaaaatcagtattttaaattattaaaaataacgtaggataggtagagtcatctatcgtgaatcttcaatgtacgaataaaactagccatggatatgttttcgataatggagataaagttaagtgagaagattgacctctttgcttaaaaaaataaaaaaaataaaattctttgctatgaaattggatgaacttatctattttgacgttgaaacattatgtttgatcactagttgcatgaaattgcttctcctcttcattggtatttttatcttagaagaaaattggtgtaacagattgttcaaagtatcttaatcaaaactaatggtggagccatagttaaaaattccatttcaggacaatcgtaaaaggttttaaacttctttattcacagctcattttaagttttgttttctttttgttaatttaagttcttgaaatgatagtactaccaaaaatacctagataaactatgagaaagaacatataaaaatatgagaaaattagatcgaaaagatttggttcgtctgatttgttttgtgccaacatatataaaacttcgtgagaattgatctctcttttctgtgaaagtacatgtgaacccatccattttgatgttgatacattaattttgaggaattacttctcatcttcctttttgttttttcttagaagaaaattggtacaacggattgttcctaacctcacaagcataaaaaaatggtggagccatacatcaaatttggagatcaagacaaatattgatagttacagtgaatttgtttgatgacaaattttccatgaaacttcttctataattagttgatatgtttccgacaaagtagataaagcttcgtgcgaagattgatctctttgttgtgaagttacatatgaactcattgaaacattaattttgatcactatttccaagaaattgcttcttctcttcatggttgttttttttattagaaaacaattggtgtaacagattgttcctaatatctttaatcaaaaataattgtggagccatacattacaatttcatttcaggacaaacactgatagttacaactcctttttaagtttagcttttaaacttcttgattcacagctcattttaaatcatttttctcaatggttaatttaattctaaaatgatagctcactactgaaaaatacctagattgaactattagagagaaataacaaaaaaatataggagaaaattagatctaaaagatcttggtccatgagacttgatatggtgtgctagcagacataaaacttcgtgagaagattgatctctatttctgtgaaattacatgtgaactcatccattttgatgttgagactagttttgaccaatgcttccatgaactaatcgcttctcattttccttgatgtattagaagaaaattggtacaatggagtaattgttcataacttcataatcatattgtggagccatacattgatctcctttctgtgaaattacatgtgaactcatccattttgatattgatgacaaaatttccatgaaacgttcttgctaagatcaacgttcccagtcaatatccaatgtcgacatttttctgtcactattttcagtttggtcctttctccacatatctctttggtcattcttatatttttagtttatagtaactcatttatttaatacaaattttttaactacagtaagatttcttcctcatgaaattcatagatttttcgtagcatacattttctttatattaagtatctattttacgacgaaatgtgcaagaaaattaaccattgttgttcttgcttgtagccttttaaaacttaaagccaactttatacgtacaccacacgtggcttaaaactttactttcaaggatagagttatatggtgtatgtttaaatgatatagtacataatatacattaagaattaggtttgttacgttgttttatatttttagttttatatatgtacggataccatataatatattacacccacacgtattagagttattataaaggacatgcatgtattaggacactatggattttaacatggttcacatgtgggtgtgacttgttttgcataaaggacttgcatctcctacaccatagtgtctcatcccattttccaaacagctagtgaaccatgttaaatatgtagcattatatatattagagaaaagatctacgaacttccaatgtgtgacaaaaggttattatttattattacaagctttcaagctcaccactttggacctcaattactcattcatagtaactttaatttagacatgtaaatacactatcttatagtactcattagaaggaatccaaagactccataatccggtcatttcggtgaagaacctcaccgaaaaagatgccggaaaattggtcggagggattaattatatatatatatataaattagcacaaactttaggcattaatttgcgttacaaatatagtcaaatataacttgttgaattatattaaaaatagttcttcatcatatgcacatgctagagggaaaattaattagaatacctttttttttattaactcagtataattctaggcctacggagatgctcaaactaatctttaggagagatgtctatagataaattctctctccagatattcaaatggactttaaaaatggattcatatctatgtaagtgtccaaaaaaatatgttgaagtttgtcgtagcagaaatatcaaacgtggaatgtattaatcctaagtccctttccttaccactagaccaccagcccggacatgatataatataataagttggtggaaccaaattgaatcaagtccgaccatatcatatctgcttcttaacgattatggaattgcaccaaattgagtaaaaggaaaatctgaaggggtcggtgaataaatgatatagacttattcagttaggttccaaaaccttattttgttgttttcatttcttttgataatgtggttccaccaacttacgtattttgtttgttcctcgagcccctgcatgcatattatgagaatttattttaataatataattcaacgaatgtaggataaaacgtcatgatttttttattttttttggtaaaatatcttctatataatatatatgacaagaagcaaaatgttacaaagtctattaagccttaatatgatttttaattacatgaggactttattctaatactatgcttttttaagaatctaagaactttaatttctataactaaatgataggataaaaaggatcatgatttttatttatagtgattacagtttctatgtgataacaattttttttcaaattattaagaaaattattatagcaaatcaaactattataaataatgtggataaacaaatacagcgcttctaacttgctaagaatgtggatatttcttgtagtgtcaaaacaattaagaaaattattataccaaatctcattttaaacctaaattgacatacctttacttgaatctctttcctctagcatcgtgcccctaaaactgtcatattttttgctcaaattataatgtctcttcctcatacgtaatgtacaagttaacttgtatttttccattttagtttttagggtctgacggataacacaaaaacgatataaactgtttagcggcaaacgataaaaaatagttaaaaacgttacaaagtagtggtgtaaaaagccgaaaatatcgattttaataatgcttttatgattggtaattatcaaaacattatacttcacattccatcgatacagtgttatatcaaactgtaaaccctgtttttttcgcgactccgtttcaagcttatttcttttcttgatatttaattttagttcttaaaacaacaacactacatataaatacctagataggagagaacttaataaattagatttttaattaagagttgacccatgatgaaggtttgatttttatttttgctagcagtgtgaaattagtctcttaggtgtgaaattatatgtatgaagtcatcaactttgatgttgagactttaattttgttcaccacttcaatgcaattgcttctccttttcctttttgttttattcttagaagaaaattgacgcaaaatagtggtggagctagacattaaaatttcacttcaagacaaacaacggtgaaaaatcttccatgcaacaaccttttttgttgttgttaaagaccatggaacgctctttctaggatcaacgttctcgatcaatatagagagtcagcggtttgtgtcaatatattcaattcttaagatccttgctcgtcgatgttactggccagttggatttttttcatttaatataaggattttccggaaaaaaaaaaagctttcaaatcgtcatattttacaattctacctttcatctctaataatatatcaatcacaatgtaaaaaataaatacacaatataacttttataggtcatttataagatggacttgaactcctcgttacaaaacttcattttgatctattatttttatcaaaattttaagaaaagaatgacaacagacttaattgtgtattattttatattttatgtgatttatcttcatttcagaagatataataaaattgcaaaatggcgatttggagggcttcaattttacttcacatgtttgtttacataaaaacaatgttgtagtaactagacacaaatatgaaatccgaagacaaccttgttatgaagttcttgtgaataggaataattgtattagtatattaaaaaaaatattcaatattattgtgtgcaaaaattacaggactcacttagttttgccatcgtggtgtggtttcgtaagcacatagtatcatatgctaaacaaaaatcgtggataaattgacggtgttatgtgtggtgtaattgtttgaatgcagaattgcgtatgcatgatcataatgttaacttcaaaatttgctcgtcatagatgccccctgacctcttaaatattttgttttttatgcactgtcacaaaattctagatgggcaatcatgtcaaaattcggttttgaatttagattataacgtgttttcagaattttagtgcctagaatgttcatcacccatttttcgttttaaacttataaaagaaaagacttttgtgatcgttcaatataatcgtcgacaagaaagaaaacaataataataataataattttctatataaggtacacttgctacattgatatatatacttgtctaatattcatatcttttggttcattcttcatcttctaccttgtctcacatattgttaaggtaaaaaaagttcgtcctcgtcttcatatctaaatccttaagctttaattcttagataactaggctagctggcaagaaagaaaaaataacttcgatgacaagtttatgctattctccaaagtgtcaagcttttttggcaacatctatttttaaaataaactttcatttctataatgagtagttatttacaaagtggggaaaacaaggaacaagaattgataaaatatgtaaaacagagatcttgttttgattctttgttaaggaggacaaacttgaaaccatatttatttgcagtatcccttttaatattatttctagaaaaatatcaaacgataagtatttcaataattaaattagcaaaaaatttacatatatttaaatgacctgcatgacattgttttctgactgttttgttcgcggttacaatagaagtaataattttaaatacgtttttaggaaaattttacatctactgactactagaagaatatgaactttattagcatactactttccatatagaaaatgtattatttagtatttttctttcttattttatatcatctttataaattaaaattttattagatgtaaatatctattttaatatatatatatatatattaaagcctcttttgaaaataaaaagtattcaactattttgtttgtttttgtaaaacattatcgtaaatacaattgttaaacgatgtatttgatatatatatatatatatatgtacatacatgatatataaaatgatggaatactatttttgaagagaaacaaaatgccaatagataagtgtggaccaagatgaccacgttctgttaactttagtgctaatacatacaaaagagtatactacaaattgaatttagaaaatatatagtaaatgtttaaatgcaagaaacaatgattaaaaatttagaatgacatcttaatcctgcataataacattaattaaatctaacttcaattgatttttcttttctgttttacgatttcattttgatttattgtttatgcttttacaatagtagatatgaatttaaatttttatatataaattatgcaaagacacattatatttcctcatgtgctttctagaaagtgttagccaacttttcattaatagttatgcatctaacaaaggatgcatgaattttgtgaagatgaacaagggtggagctcaacagaaaggtcattcgtcaaagcaagctgaaaacatagttttagtaggccggacagggaatggaaaaagtgcgacaggtaacagcctcattggaaaaaaggtgtttgcttcaaaggcacatgcttctggtgtgaccatgaaatgtcagacacatggagttgtgacaaaagatggtcacaaaatcaatgtgattgatactccaggtatattgttacatgaatcttggattgatttgggattatgattttgtcattccaattgatttcaaaaatatcaccagttgcttgcttaatatgggacaggtctgtttgacttgtcagtgtcggctgagtatataagtaaagagattgttagatgtctaactctagcagaaggagggatacatgctgtgctcttagttttatctgcaaggactcgaattactcaagaggaagagaacacacttagaaccttacaggctctatttgggagtcaaattcttgattatgtcgtcgttgttttcaccggtggtgacgtgctagaagagtgcaaggagacactagaagattatttgggtagagattgccctactttcataaaggtcggtactttggatataatgatttttaaaataccaaattttagttatatgattcttaaaaatatatgtatactagaagttgtcacgcgatgcgtggattatatattcgctcaaaataattaattatagcaattttgatgtttacaagatgctttttacaaagacattttagttgattaaaagttatgcactcaattttaaattatttttttgtgaaacagtatgtttttcttccaaaaaaataaacagaaattattcagtatttgtttttgtaaaattgcaaatgcatgtatgaccaattttcttgaaagtcaaaacaatagatgaaccttctttacatttaaaaatttaaaacctatgatttaagataactttcaatgaaaaaccctctaacttgactaaagattttatatgtcggttcaaaaaaaataagtcatataaaatcttataaatatattgaaagacgttaagttatatatataatttatttaaaaattgttaatatatcgctcaaaattaaataaaatttcaatttggatgtttacaaattattatgatgtgttaaaaagacactttagttgattaaaaatgttcaatgcactaaactgatttttttttttttttgtgaaaacagtatattttactatataagaacttaaaatattcaagaatgtatttttttttgttgtgaaaatgaatatgcatgtattatcaattgtcttgaaagtcaaaaaatagagggagatttgtaaaactatcatttttttactacccttttatgttgtccatttttaaaaataccctttctcttgaacaaaatgaccaaattaccctcatctaatagaaacatgtaattggaaactgaacttttcccgccaaatttattggcgccaaaatttttttttcccgccaaaaaagatttcccgccgaacttttttcccgccaaaaaaaaagtttcccgccaaattttttgttccgtaacaaattttttctgagccaaaaaaataattttaaaaatccttgtaaatatttgtttgcggcaaatagatttacaagggattttaaaagggtcttaaaagatttacaagagattttaaaaaggttttaaaagatttaaaagagattttaaaagatttacaagggttttaaaaaatttacaagtaattttaaaaggttttaaaatctcttgtaaatctttcaaaacacttttaaaccctttaagaatctttacagatcttttgtaaatattttaaagtcctttaaaatctgttgtaaatattgtaaaacccttttaaaatcccttgtaaatattttaaaatcattttaaaataattttaaaccgtttaaaaatctttaaaagacctttgtaaatcttttaaatctctttaaaatctcttgtaaatcttttaaaacccttttaaaatctcttgtaaatattttaaaaaccttttaaaatcccttgtaaatcacccttttaaaatctcttgtaaatcttataaaacccctttaaaatctcttgtaaatcttttaaaactctttaaaaatcccttgtaaatctatttcccgccaaaaaaaaaattggcgggaaaaatatttttgaaaacaaaatttggcgggaatttgttttttgaaaatttttggcggaattttttttttgaaaatttttggcgggaaatttattttggaatattttaggcggaaaaatattaatatttcattttgttaatctaaaacaatttccaaataagggtaaaatggtcattaaaaatttaaagagggtagaaacaaaatggataaaacaaaaggatagagttgaaaagggtcatcatgaaaagggtattagaaagaatttttcaaaaatatatgaaccttcttcacgtttaaaaatttaaagcctataatttaaaataagtttcaatggaaaatctaccaacttaactaaagatctaagaatgtcagttttgaagaaaacaaaagtcacataaaatatgataagtgtactaaaaaaacaaactatatataaaatttatctataattattaatagaaaactcgaaagtaattaaaaatattaattttgatgtttacaaattgtgatgtctttaaaaaagataatttagtttttaagagttttcaatgcactatagtttattttccgttttttcgtgaaaaatgtatgtttttttttttttaacttaaaatattattttttgtgaaaatgcaaatacatgtattaccaattgtcttgaaagtcgaaataataaataaaccttcttcacatatgaaaatttaaagcatatgatttaagatgtctctcaatgaaaaattctcttacttgactaaagatctcagaatatcggttcaaagggaaaattaaatcatataaaatttgataaatatagtgaaagacgtcatgtcactacccaatttccaaatgatcaacaatactttaagtaaatgtaagttaaattagaataaattaaatattctttttaagaacttaaacaacaaaaataaattgatatttgatattacataaaaaatttgtcaccttgaagatttttttttactggatttttcctcaaaagttatattaaaacaattaatacgcagcatgtttaataaaacatttgattcatgattttgaattatacaaattaaaatttttcattatggtaatttgctttcaacagtttaagattactgttaaacttttttttatttatcttttattagatatttccatgaatccattacacatgagtttcaatataggttgaatagaaataaatatttttattttttattataataaatgaaatgtcaaacaattgttattattagatttccaaacagataagacggtgaaataaaattctaattgtttttgttttattatttagcataaatatagttttatttatgtttaacttcaaatgatgggaaaaagtagggaaaatatgtctctaagttaaatgttataagcttttataaattgaaaccataatgtttttatataattaatttaatattatataacaattgttattatttatatgtgatgtaatggcaacaataaatgaaaccaaaaacttaggaatcatatatataaaagtaaagtttcactctttccttaatggtccacttggcaatataagtttttttaaaatttatataaataataaataacttatttaacacacagtttaatataaaactgaaatcaaaaaaatatgtatcaactatatttttccactctactttattcaacacacaattaattaaaaattaactaccacaatttatttacaaacctgaaatcataaatatatataaattaattatatttctccacaccattttattcaacacaaaataaattaaaaattaactcccacaatttatttttaaattgtaacttccatcacttctcatcctataaatatatacattctctcattctctcatttcttcatccccttccaccgtatcttaaatattgttttgtttagttttaagtttttttcttgttgttgttatgagtttaaaaaatattattgtaaacacttaattctaaattttaattttagattatgaaccttacactgttattcttttttgtttaaatacatctcgataatcaatttttcattaccatcttataaataatcattctctcatcattttgcactatattcatgtatatatatcttatgttgttatatgggtaaaacacaataaatttaaaagatagaagttgtccttggggtttaaaaaaaaaaacttttatattaaaattcatatgattttataagaaaacaaattagtttgtcacttacaaaataaaatgaattggaactattatgtatgagtttatatcaacaaattattttgtaatttactttatcatacatttattttgtaaaaataagatatgatatgtttattaatatatacatgcataaataacatagaaaaagaaaaactgttaaaatatgagcaaaagtaagatatcaaattttaacatatttttaattttttaatcatataatattgatacaaaattattttaattaattaaggttttaaaaaaaaaaaactaaagatggaaaattttcttataaaattggaggataatttatagtagtgaactattaatgtgcagtcttattggttcctaatttacaaggaattttgatgacttcaattaaatccttgaaaataaagaaatgaaagattttaaacgattgttagagagttttttataatcttgttgattagtttttcataatcttgtaaagtttctcaaacaatctctttattttgataatactttccatgacttttcatgacttcattttgtgaagaaaaatgtaggaaatcataaccaataacacaataatttaaatcattaacaatcattaacaatcaaagatttttttgttttaattgaataacacaaaacttttaatgactttataaaagtatgaatctaataacccaaaatttatgaagagtttagattactttttacaaatcttaaatgaataacacaaaaatttaacatacttttaaaaaatcttgattgaataacaacagattttacatgacaatttaaatcactaaaactcttttgaaatcatacacgaataacaccccctaaaacataatatcatgtcaaaattttaaagatttgattttgtaattagttaagggagttgcaattatgctagaagaaaattcatttcaaaattgtagtttaatatgaagtaatttcaaagtttaatgactatttttctaaatatttaatatatctattaataaattattttagtcaaactacaattaatgataagtacatgtgtcatcaaagtatagtgccaaatgtcgcattagtaggcaaagttaggaaaaaccttctcttattatataagattttgaattacaggaagtgatgaggatgtctagtaaccgaaaggttgtgatcgataacaagactcatgatgaaggcaaaaaagcagagcaagtccataagcttctctccctagtagatgatatcagaaggagcaagtgtggagaagcatataccgatgatacatatcatatgataaaggtgaaaaaatctcttgcatatattctcctcagatatttttgaaactttaaaatgatcaaatctcgtggtatcttaggaagagtcagagaaactaaggaagcatcatgaggagctggaatcaaagaactattcagaagaatgtgcagctgaaatgaagaatcagtcacttatattgtataaggagaatttgaaacaaatgtcagagcaggtaaaagatatgatcataaatcttatatgactacttccggttttccaatattaacaagctctgagtatattttgttaagttggagaagaagctcaaagatgctgcggaggcgcaagaaaaagcgctaagcaagatgacacaagaaaacaacgagctgaacctggcgcttaagattcacatcccgttgccgccaattactccatgcaacattctttgaaaaatgtcttctttctaacaaaggggtttctcaagaaatatcagtaactattatcgtccaaagggattttgggttgccataagaagatacaatcaaggaggttttgtttgtcaaaatttcaaatgttttaccaaacctttctgttttttttcccattttgtatttcagattacatgttctgtccaaaactatattgtggtttcttttgttgtgtgtggacttttgtataactatgttttcttccatgtttgaataagtgtatggaacttgattttgatgaaaacgatgatgatgagggacttgatgaatcagaaggaaccgagaacacctcttgtgcacaagaagaaagagttatgagccaaaatgagggtcacagaagacaaggagttataagcagtaatgtccccgatgagaactcgtctgcaaatgaaataccaacctcgggtgaagcaagagattgccatgcagagcagtcagagccaatggacgtgtcagctgcgccacttagtgctagtcctcaacttaaaactcaccgaggaagagaaatttctggtgttgctgttaatcatgactcattcagactgtcgtggaaaagctttcattgaaggaaatagcttcatcttttgtcaaaggcagtgcacgagagcagcaagtctgcttaaatcttctgaacatggctatgattggaagtcatcatacattcacaagctttggaaggcatctcgtgacattgacagaggagaaaaatcttttccctagtttactctccatcatagagcaaggaacggaagttctgagggggaaagctcctctctttgttgcatttctctgcaaaaacagtaggcgttggctgacaaatttcttctgcaatgcaagatttcttcctgtggtggacagattagctaaagagaaagacagttacctgcaacaatgtcttgaggcatttgtgaatgtaatcacctccataataccggggttgctggatacaataaccaatgatatccaacagctgatgactggaagacgccatggacctgtctctccccttaacagtcgagcttctgtaaagactaatgcacacctgttccctgtggttcttcaccttctcggaagctctttgtttaagaacaagatggtaactccacaagtcctaaggcagttggcaaatcttacaaaacttgtggaagcatcgtttcaggtcagtagttagaacattgccatccccttttacattaataaaatgctatctgttattttattttgcactaatgggattggtcaattgctcatcaacatttgaattccttaccttcactatgataaatgataattactcgtttattttattgttgatattgcttcttataggatatgattaagattttcatacaactatataagaattttcaactaaaatagtctctcagctcaactatgtcttgccttagcttcagctcatgagatggaaaataaactactctctcagctcaaagtagtgaggagaatcggaaatctgtttgaattcgtgaatgccaaagacatggaagatttcctagaacccactttaagtctctgcagagcttttctgctacggtcacttgggaacaagataggtctcagctccaactacacgaaagagccaatgcttttatcagagacatcgtttacattcgaggttgatccacaggaatgcataagagacattgcagatttcggtagcaacattggcctattcttacactttgcaggtttagatgacgacacaagcatcgcagtcgcagatattgcctctgaatgtgttgtgttgctactcaaagccgcttcgagagaagccacgacaggatttttaaccaatcttcctaagatcacacagattctggactcatggcgcaggaggaagagcacagagctacacttgttggttctgaagagagtcttgcattgtttgggttatgcttgcaagcagtatctatcgcaggcgatgattttgtcgatatcgggacacgatatctcgaagatcaacgccattgtctcggagatgaagaactcagacgtcgctggtcttaatagtgtcgcttcactcgttgccatggagttgcagagattacctcgttgtgtttgaagtcatctgaacaaaggtaacaacagttaaatgataattaagttatttttatcattgttaagtctttctacaatttctttatctcttgttgttaaaccaggattaacgacaatgacgctgagctgtagattttgaaacccagaatcaagatttgtctcttttaatgtgtatttctcttcattacaacttttgtaccactagttcaatctacttccttagtattatcttctttgattggtaacatgagttatcattaagttgaattatgggcataactaataaatagttcaaaaatgttaccaatcatgaactaaataattttttttgaagttaagtttgagttacaatgtgttatggttgatttaaaattttgtattatttcccgtgttaaattggttacttaaaagattactcaacatcatgaaaaagatcatgagaaagagttgagttattcattttttttttcctaattgcccaggattgattttttttttttctttgtttgtttgtatctatttctaataatgatcctaacgagtgagtcaacaacttggtcaagctatttttcttaaatataatatttttattataactaattgttggatttatggatttttatttttatatatttgttgaatcatacacaaaattatatataggtatgtaaagctcattatcaaatataagcacattttttattactatgtcacaaagtatttttatttttatttaagatagtatcattttatttaatctatttatatttattcaatttataaaagataatcttattattattaaaaaaaattaataattgatacggcaactaatacatcataaatgttaccagttattcgtttaaagaaaaatatcctactatattatttgggaagtacattttaaatataaccttaatttttgtaagtaattacataggtatgccattagaaataaaattttaaagagtaaattagtttatctctttgaggattaaaaagtcaaatactaatttaattaattaaatttaattaaaaacgaaatacattattaatttccaaaaataataaccaatcaaaatcaacatataagatttgatatctaaattttaattaatttaatttaattagaaaaacgaaatacattattaattcccaaaaaagtaaccaattaaaatcaacaaattagatttgatatctaaattatcatattaattttttattaaatattatagtttacttctcatctttatatgattctatttttgccgaaaaataatatcatcattatagaaaaataattagagttttttcgcatatgccataatttgaatttttaaaaacgaatataaactgttcaatacatgaaaaaatattataacgggtgaaaaatagatttaagaaaactttctactgagtaacatgtcataatttgaaatatttatattcaatttcatacatattatattgaaaatttataatcttatatactacaataattaataacatattagatgtgattcaatttttaatacaagctggaaaatcctaaaattgacgggattagatcgatattaatacaagatggtatactacaggtgaaactcttaaattaacaatcaaactacaagtgtataatcttaaacactaaacaatatagataatatcaacaaaatatatacaactcacagtttactatacatttaaaatcaaataaaataatatcatatatttttaaatcatctttacaataaaagtttttagttgaactaaaatataagcctacatgcggtatactgcaagttaatatctagattacagagcttattggatctaaagacaactcatcaaagatttcctaaactgaagcaaaatatactgaatattcaaatatttatctgttaccaaattataaacaaataagttcgtaaaacaatttaatattttatatacgaaatcaactaaatcttaatcacataaaattagcacaaaaaaaaagtattcaacaattaaaaatttatcaaatctctatataagttttgatactatattcgaataaagtgtaatataccttttcaatttgtattctttaactaatttaagcgaactaatatatttgctaatcttatacctatcaaaaccgactatcgtttcttatctctatagtatatttgcaagacttttttggtggatttggataaaagtgcatatcgtcctactatattatttgggaagtacattttaaatgtaaccttaatttttgtattaattacatgacaatgccattagaaaaatttaatcaaaaacaaaatctttaaatgacatcattaagattaccaaaatcatttaacgacaatattcatctcttaattatagggcttattggatttaaagacgggtcattaaagatttcctaaactgaagcaaaatatactgaatattcaattatctatctgttaccaaattataaacaaataagttcgtaaaacaatttaatattttatgtacgaaatcaattaaatcttaatcacataaaaattagcacaaaaaaatatggtacattcgggtctatagtagttttgcaagacttttttggtggatttgggtaaaagtgcattcgggtcatatggtacattctcctattaaataaatatggtgcactcctatgttattagctaaaatgtttagattataattcagagttatatcataagtaaaatcaatattaataaaataaatggctttttggcaagacggatttggagggacgggtttttgaatcaacattaataaaaagtaaaatataattaatctaccgtttcaatacaggttaaatctttgatttattatttttaataaaaaataatatatataaatacttaataataattataaactgtaaaaatataaaaattttataaaaataaaatttgcaagttttaatatatattacttttaaaaaataaatcatcccgcggtataccgcgggttaaaatctagttaacttatatttctacagcaaattcactacatcaatctgcagttataccacataacttttgctgcaagttacataaaattttaacatatactgcaactcaattttgataactcgtgttaccagttggagcaagtcatgtaactctttttccatccacctctctgtcttctctcccacatagtcactaaaacattaaagaccaaacagacttgaatcttttgataaaacaaatgtgtaacagtaaagtccaaattgcatctttatcgacatatgatacgacaccaaatatggttacattgttttatatggaaagagtagacggggaaaattagcagtcctcgttttttttgtctttttttttttttaatgattaggaagttttgggtcataagcccgtacatcctcgtaggagaaggtagtagtctcctttgaagagtagacatgcatcttaatacaaatcgagctagtgaactacaaaatctttgtatttttggtaaccaaaagatttaactattaggctacttcgtcgttggatagaaactttgatcatgatctcatattcacatgcataggtcacgttaaccaaaacgggtcgaagttttttaacacaagtcacttgtctttatttcagcattgataaagtaatttaaataaagagttgtcaacaagaaactgtacttgtataacaatcacaaaaggagtccataaacgcaaacaaaagaagagaaatcacaaaacacaaaaataaaaataaaaagtatatgaaatgtgcacagcgagaccgtactgtgtcttctttgaggttttatgaacatggacttagctgaattggcacacaccaatcacaggatgttgcattcttgtttcttctctgcctgcttctcttcagctcttttacgatgagcatcatttcctattattgaaatttccataaagtctttcatcatattcatttgtctctcattcgccgctgctgtttctttaaatatcctctccatctaaaagaagacaaaaacacatatttaaggactaaggatagtttccaccgggataattaggaaattgtaaggtatatagagttggcaaaaaaatatatatttaccatcaatgccatcatgttcatgttttggctatacgacatgtctaactgcttcttcaacgctgctttctcttcgtctgcaatgtttttttcttcaatttccttctcttcccttttaacccttgcagcctcttcctgacaaaccgtaatttatgaagcattaacaagttttctattggccaaagacaagagagtgatgatttatatgggaagcatcaatcaaatcaactatagttccacctgtatcctacggtgcatcgtgtccgtaaagggattcccaccagtttccttttcaatcgctgcgacatggaccagaagctgctggacttgcttagccttcacaccttcatctttcgttcggttatcaaatacaacccttctgcctccacatagtctgagaacattctgaaattgaacaatccaatccaaaaacataaattaatgagagacaggaggaaccattggacaaataatcaaactcatacctttagaaattcagggcaaccattggacaaataatcttctaaagtcatatttcgatcttccaacatatcaccacaagtgaatacaacgatcaaatagtcaacgattttacccccgaacaacatctgtaacgtacaaagtgcgttttcttcctcttgtgaaatccgagtcgacaaggatagaactaacaccacagcatgtagcccttctctagcaagaataaggcagttgacgatttccttactaataaactcagcggacacggccaggtcgaagagacctgcatcaaacaaaccatagtaaaccttgactttaatgcttatgttcattataagcatgctagttgtagtgacattaaattcgaattgattcatagttccgaaaaattactctaaattactaaaagaaaaaagaaaatgttacaaaacttacactttttagaggaaattaccatcaaattcttaggtcaagaaaaaaaaactcaagcaaagtattgtttgctttttatgtcaaaggaactctaactactcaaaagttacaaaattattgtccaaaaatatttatttatttattatctttcacaaataggtaccacgttaaatttactatttttattttatatatatatatatttttatttttttattttttgacatctttggatgaataaggcccgatctatagtcaatccctacaaagcgaggtaacacgatttagtggaatcgaactgtggagaaataatttattatagaatacatttattaaatattctaaattttttggctatcctgaaaatataaaatctaagaaaggttatcactctgtacaaaatgttacatttgcaaatttattacgtggtgttaccttttcagttttcaatttctcaacggtcttaatttctgtgaaacctaaatatatatattatctttttggtatgcgtttgaactgcggtaaatcctctataaatgaagcatgatatttaattaatttatagtgatattaatttatatgtaaattaatattttattgttaaaattgtttacaaaatataaaatatgatctaaaaaaactaatgttttggatgttgtaaattttatagttttagaaattaaacatttattagttggaaaaaacagtttttgtttacaatgaataataaaaattgtagaattcatatatacaaacgatatgcataaaatgaaatttataaatagtgacatccattgttgtatttgaaaaacctattacgaatattaaaaaaatatatgcatattcaaattttgaaaacgtacagaaaagttttgctgtttttataaaaatactaaaaacattatataaatatatatacacaaatatatatatatatatatgattattaatctatgatatttttgggaccatatttttatataaaaatttaaaacaaattattattttattagcttatcgattttggttaatttttacactgattaaacacttgaccagcaaaatttatttatttatcgtgtatattaatttatctagtattaatttatagaggtttgactgcagttaatcgacaaagagcttttgcaacctcatgtcaacatggtttcaggttttccagagttcttttgtttccctgtaacgataagattctaagtttccgagagatcaggaaagaaatctaaactattgccggtaaagctatgctatttgtaaaaccacttttgctaggaatatccatatgggatatgagagatgacatatactagcatataaaaggatatgaatgaattcacttattatcaattagttttgtgttgaaagccaataaaatttaacacctatttgaaatcgaccggctcccaaattagtacggccaagctaacctaaaatcgaccctatattagaattcagactacaaaagccaccattttgaaaagacatcaattagttttaaagtataatttatcagaaaatataattaaaatcattaaagagacaaagctaagagaaaatgtgtgaagtaagatactaaatcaaccatagttaagaggatcaaaaataacgaaatagatgtttttttttttcattctatagtgtagtatttattatttgtgtaggtataatcacaagactcatgtgatcaagtaagcaataaattccattcgatgtttcaagtggtctcataccaggagtgtcaatcacattgattatggggccatccggtgtcacagctctaaatgtcttacatcttgtggtaacaccaacagcttgatattttgactcgaaaacctttcttccgatgatggaatttccagtggcgctttttccattcccagtacggcctaccagaactacgtttttgacgggctctgacgctgaaggcaactcccaacggtcaacgtttttgacgggctctgacgctgaaggcaactcccaacggtcagttgtgttctgatcttcagccatctgaaaaagaaaaaacaaattttgtattagtaaaatattttaattccctacaaaatatagaagagtagagctatttcatatcacaagttttggtgatgcttgtaattgtgtttagaaatcgtgaaaattttgagccttggttggagctaataatccatacttacagctaattatccttttgacatacggagacagttgagaaaacttccgttcattacaagagatcaagttgaagattgtttaagagagaagacatacaactaatggaaagatatattgaaaactataagtagcacacaacggaaactcatatttttcttaccaaacagatcaagttgagcccacaaacagaaggacaaaactgagaataaatggacaagataatacatgatcttatataagtttaaataggagatggcttgccaaataatatgtgcaacaaacgcaaattgatatttagtagatttcagtggaaactacatttattttatttcttagccatttgagtttgttatgatattgtaatagtgtaatttgcttgttattatataatataagacaacggaaacggtaaacgaataagaaaggacaggacgagtttggtttcaagtacatttgtatttgagctagctatcttttttgattaatcgtgctagctaccttgtcctgcggctgaagaagtaacgcgagaaccttttttttgttttgtaaaaattatattatatcatttgattagtctaagttaaatgtcaactctacaacgtccctgcaaaacatcaaggaaaaattagtagaataaataaaaccaaaaaacaaatagtagaatagtcttaaattagagtgaatttgtgaactaataccttttcaagaaattgtaaacttaagtcttttaaactaaaatcctattgttttatgaatattatttaataatttagagagataaagttcaaaaattcatgagtaaacaaaaacatgtggatggtaatgcaagaatgattttattttattttccgttaagaaatgacactgaaaactaatattagtattatactaatattttgttttgggtgattttccgttaccatataagaaaccgacatgtgtctttgccacatatgaaacgattcaagagagtcatctggaatcatcttcatcatgaattggacggtgtaagttcccatagaatagaatcccgggagacaagaggatgatgttttgaaccgggccagctatcaacttaggcgcaacctgagacaaagcaagaccaaaaaggcattctgtacccaacaattgtgccagccacaaatttcgcatgttactccaccaaaatatgacgttccatcttggcgaagcatgtcaaccatcgatgttcagtcccatcaccacaaccagtagcacacggttcacaattatagcccttacacctataggatgacccgaccctctagttcggtactctaaatatcaagaagttgaggaggagagcttggttgcttgtggaccaagaaatgaccaagttgttggtctccaagacctaacaaactcaacactctcgactctacacctgaaaataaaaggatgtgtgagacctctcgtagtcctttttgtacgttctctatcttactcattatgatccctctcatgatccgagttacctcccagagtgttctaacacctttctgggctatcttatctcagaaagtatattttgatgtttcatatatcaaagtaaatcatatcaaagtatatatatttaagttatgttaaatcgtcactaagttaccaacgatatactttgatatgattggtttcatatatagtagccccaaaatagagcgagactaatcgttaaaaagtaacatgaaaataacgttcaaatatattcagttctcgacaatagtccgcggagaaagttaccaagctcggatttgccacggggtacgttttgtagtgatggtaagcatgcacataaggcatggttaatgatttgttcccccattccacatatcataaattgtgtatcacaatctattcttcaagattatagtcttaaatttaccgctaacgcaacctgatgtcagttatcataaaattagtgtatgttgtgtgctacacagtaacctgatttgactatagaatttatttattttcttaaacgtgtaactaattttatctactttataaactttaataatcagaattccacgaatcagcaagatttctgctgagtgagaaattgttttataacatgttaatattctattcttttgccaattgatcaaaaatcatatgatatgctaaaagactcggggggatatatgtgttcccgtctttgtgtcgaccgtgtctaatcatcggggatccattgatttctccaaattgagatggaagtctttgaacccacttacccacatatttatgaagacctttttccattataaaccaagataatattatgctctaacatcgatagaaaggagagtttatcgcttgcctatctttatgccagattggtataaagatattgtaatggtttttttatcattctcttgtggaaaacccttaattaattatcaaacgtgccaaatttgaattccataacaactaatgttttgcatatattcttccaagtttaccaatgtaagcccatttaaactgcacccgaactctaccaatattttgaaatgacacttgtagtttcgaagttttgatatatatatatatatatataagtagagccgatttaattgaattataattattgcaatatacccctatcgatcctttaattgttcatctaaactgatcgaacaataaaccaaaatgtgtatctctctttgaactcttgtggatcaaagtggctttcaaatgacaaaacgatcaagttacagctagaaagaaatttaggtgagaatatttatgttttacataactgaaatatgtgatcagacaataagtaatcaagcatgcatgtgcatcagcttgcaatgacaggcaattcagacataaatgatgccttagtttttcggacgaatttcgacacatttgacaaagagccctctcttccaacagcaagatttggtctcatacatggagaaactgatctctccagcattatctggtgatgtcacgaactcaccggctgatatatctatccaccgtttccctatatgctctttcaagcacatgcttcgctcttgtggccttttcttaccgtcgggcaaggtcaacttcagattcactggtatgttccatccagaagctgtatcttctaacttcacgacatacacaacctcataggttgtctctagtgtcagttctctcgtgtcaaattttccatttacatctagccaacaaactgcttctagcacagcagcatcaacgagtttttcgcttgaaaataaaacacaatagaaaatttaatgttaggaacagcagtcgcagaagcttaatgctcatactaaataatatctagaagtatagttaaattacaactttccctcaaatattactttcggtttactcgcttttcatttctgttttattttaatctaaaataaatatacttattttgctcaaaattaaaaataaatatatttattttacgcaataaatatatttattttgcgcaaataaatatacttgttttgctcaaattaaaagtaaatcaagatcgactttccaataaatcgactttccaataaatcaagattttagttgatgtattttcctttccatttaattcagaaatttctatacagtttcgtttcaatcggttaaagaagattggacactcacaccacttgtcccattatgaagtttttatagaagatataaatcaaacttataagaactctataccttgatatatcataccggagaggcagccatgaccaatactcgtctttgtccgaccatgcaatgctaagatcccttgcgtagatcatgtgtttctgtccataaattatcagtgtatattgcatgatacatatatgtaggaggcataattgatcacatatttgatacacatggccggtgaaaccttccctaaaataaaaagacaatattgatccacaagtagaacgctgcggtaacctgaacaaagtatgtactcaccatcatgattgatgaactcaaaaggctatcttttgttagtattcagttgatgaatgagaagaatctgaaggagcgtcattcaaaactagtattctgaaattggtctatacaaattaaaaaagaaatacaatgtaacttggtttggcaacttgatcaacagattttagatttgactttcgtttgatatattgtagttttttgttgattggttcaagaaaaaaaaagttgtcaaaattttctatagctattcatttacattggacgaataactcattttcaaacaattgtacatttttgacaaatattactaatgatttttggatatctaggttatttcagatatttttattaatttggtgtttttagttataaaattataactaaatataactaatacttttatatataattatatttcgggttttcagatataatatccggattttaatttggtacgtgtaattccggtagaaatatttaaaatctgttccgaattttataaatattcgttttggtttcggacctggaatttttaaattggtttttcgactttgattttatgccgaaacctaggtgtgtctcatataaaaatagtttctggatccgccacaaattctttctcgaccctaggataccctaggtattcatccatctatcgagaaactagcaatcatcattacaattcgtctcatttttttcttttacttccattctatatacatatatgtctgaaaaccactacccggagcccatttttcttgcaagcataaacaataaccacaaagacccagcatgctatctgtacaaactcgcgacctaacacgcataccaacccaattcaatgatatattgtgaacctatttgttaattctagagtcttttaacagttctaccatataaaccaagtgatgtccataatttaactagtccagttacgtgcataccaaccgattgatgcatgatgcatctcaaaagaccttttcaatttatttttctgttatatatgttttaattggtgtagaaaacaaactaatgacttgtttatgtgagttattggacttcttcgtattgacgtattacaggagcaacccattgaccatagtgcgggagcgacggctgtggctagtggtgactaagaaaaataacaaattcatttggacttttgttttagaagtaaaattataccacatggttcttatatgaattgttggactacttctctatttaatatctctgttacttacttattagatattactagtcagcacgtaccctaaggttgtgttgtattagtgaataaacattggttaaatagttgtggtcgagctgattgagttttgtattggtcgtcgatgctaaacacaaaaagttcgactctgcatgtcatccacgacacttgcatttacggtttttttaattaattgttagattttcctaccatttaaacgagaaaaatatcatttaaatcatcaatttaccatttcgttaatttaaatcatgaattctagacctgatgatttaaatttttatttttatgtgtacttaatgatttaaatgctcaattttatgttgagttttaatttaatcacaaatttttgttgattaaaccaattgagacacatcgttaactggctaaatggagcaatcagacgatgtcatcacatagtttttgaagatgaagaggaaactatgttggtgtagaagaaaaattatgtgatggctttgaagtgctagttatgcgataacttaaaccagttaacaatgtgattcaattgactttgtcaacgagaattcatgattaaaatgaaaatcaatataaaactaaggatttaaatcaccaggtctatagttcatggtttaaaccagcgaaaacggtaaactgatgatttaaatgatatttttccatatagagaaattagagtagtaaaatagagttaacaactactcaaagaagataattccccaactgctgaaatatattaatagttaactttaaaagaacaatgaacgattctatatagcttttgtatttatcacgcttcatagataaattttcatttatgattggccaaatctgatatattttggtttcatgtgcctagatattaacatgttcaaaatgattgctatgattcataacatagtgaattttgctctacccgtgaaaacatgtttttctacgataaggaaggtaaagaggcaaaatagattagtagatatatgaacgaaattgatttcctgaaatcacatagagcatgagatctaaattggatcagatacatgacttaccaaaattatgctaaaagagaaattataatccaatgttgattccttaaaaagacaagcatatacgatactgatgatacaaaataagaatattttattaccaaacaaaataaattggagatggagaaagaactggttatagagaagaatctatagtatgatgatgagaataccattattgagattttatgtgaacagtaagtacttcatgacctattttgaaagagaagaagtggtagtggaagtgagaaaaccctttatgatcttttcagaaaagcgactatactaatacccaaaatcagattaagattgttaaacccgctgatgaatgtaatgactaaagacattaatgatttgatagaaatgaaccttaataaggacaacaccaccttttggtttgaatattcccaaaacctagcttaagggtttgatgccttaagtcttataaggcattgattttgagatattttacccacatctatattattagctcccctttagacaacaaccttcacggaacttgcggctattacttatgcggtttcctttcttttaaggtatatcctattgggactcatcccaattgggtctttataaaatcctctcccatgtactcgtctccaacccgctttcatatcttaggtaagttacggcaggtcagcccgcactggtaggaattggcctaaatcaaacccacaagtctttaggaagaatactcaaacctaactatgaaatactcaaacataatttatgtgaatttggatgcccttaggtcttataaagaatttgtttctttcgctcataatctaagaaaacataatttcacattgcaaccctaaaacctaactatgaaatactcaaacatataattgaacaaacattaaagcacctcatcaatgaaaagaacttcataaatctatggaaaagatgtaaactcattaatcttaacgagatagatttataaagattgattataaaggatgtatacacgttttagcaactacctatcttttctttaggtaagaataagggatacatacgagcttatcgattacaagtttggtacttgtatagtttcacttgagttggggataaaaaatgcaaaagtaaaaaagaaaccacaaatcacacataaaattcatagagtataaagacatgtgcacatctaaaccttgactgtgtgtttaccgatctttattttgcaccgtctaggccttaggaaaccgatcacaggatgttacatcttttggtctcattatgcatgtcttcattttctaagtatgatctctcaactttatctttcagtgctagtaacattctctcatgtgacgccgatgactcctttagcgtgtcctccacctgaaagagatccagatctagttattacctgatacatcaagaatcagtagtgttgcctagagttaatggaaaggaaattaccatctgtgccatcatgttcatttgttggccatacgatatttctaactgcttcttcatctcttctacctctgtgttctcaggcttcttagattgtacctccatttcctgttccataagcatctcaccttgtctctgagaaatcgtaaggattcaaacatatcaacaaatgttatataggataagtaaacattagaattatgaagagtagaagtaaagtaatcacagtttcaccttttcatttagatcattttcttcagtaaacaacgctttcccaccgttgagattttcaatggcttcgacatgggcaaggagctgtttaacttgctcgatcttcttgacttcatccgtagtcttgttattaaacaaaacccttcttccgccacacaatctaagaactgtctgaaaatgaaaaagtccatttgaagtacgcatataagataggcagagacctatgttgcaaaaataattttcataatcaaactaacttgaccttcaaaaattcagggcagcctctggacaaatagtcgtcaagtgtcttgttttccttttccaaaacatcaccaccagtgaagagaacgaccaaatagtcaacaattttactgccaaaaaggagctgtaacttgttaagtgcggcctcttcctcttttaaaatgtcagtccccacagatagtactaacaccacagcatgtaaccctccatccgtgagggtaaggcaattgatgatctccttgttcatataatccgtagacacggacaaatcgaagagacctaaatcacgaaaccattccacagccagacttttacgaactttataaaggcaagattccgcaacacaatctaaccaccttaaaatcagatattatgacccaaaaatcataatgaacattgtgtgctcatgaaaagagacatagcctcacttcattcaaatgttaaaggagaaacataccaggagtgtcaatcacattgattatctggccatctagtgtcttagctttacatgtcttacattccacggtttccaagatgaacacttcttttccgatgagagagttcccggtggagcttttcccgtttccggtaggccccacaagaactatgtttctcactggctctgacgctgacggttgtgcccgatcactcatgtttttctggttaagaaactaaattactggtaaatcttataagctaataaaattgtacaatttgtagaacgattatagatgaaggagattttactatgtaaagaaaaaaaaactagatactgaaaatttttgcgagaaaaagaatgatataggtaggacacacttaagcacacggcaactctatgacttcctcagttttgacattcgttttcttagttattgtccggccatgtcttggcttgtcttcaaagtttttttaattttatttttgtcaactatgtttttttgtacgtatcttatttcacgttgaatttgaatagagtttagtttagaaataacataatatttttgtgccatttgattttactatggtgtgtaataattgaaaaagtctttttggaataacttgagaaagtttcaactcaatgataaaccttttcttggaaaaaaaaaggttgggagcaatcctaagtataatctgttatatggctacgtaaactaaatcaatctactcgtacccaaaaaaaaaattaaaaagaaaaagtaacgcatggtgaaatgaaccaaaaaaaaaacgtcatgttgccgatcaggccataaccgttaattctatcacatgaaggaatatgtttactttgatgcagattcttttcaactaaaaattaaacccatcgaactcaataataaacctaaagattcttttcaatcactttggcctaaacctaggaggtcaaataacctaaagaagcgatttaattagcagatgggaatctaaaccaggcacattgagatcaaacgggtccatatgaatttccaggtccaagtccaaattactactacaccatttcactcgggtttcttttttttatatatattccagtttcattatttaatgctttaaaaaaaaaaaacacaaagctacaatgtcctgagtgtttagttcgattgttaaagttcgggaagacgtgataaaaactcaaaaagagtgatgaatcacaaaaagttgtctcaaaacttaaagtcgtcttgtcgtttgtggttcgtttaccgattccgatttatataaaatcataataagcaatttaccctattgcaatatcataacaaatacaaagttgaaaataaacaaaactagcatctactaaatatcaataagcgttggttgcacatattatcggcaagccatctcctatttaaacttcgattatatcatcgattaatttgttgattcatcctaaaactagcaagtggacatacatactcaaagtcaaagcttcttccgttcccctattataggtaagataaatttagttgcttaatcgttttgttcggtcaacaaggtaagatacttaattatccgacatggctgcaaggatttttttcagatggctggacttgaggacacgactgatctgaggttgccttcagcatcagagccaataaagaacatagttttggtgggacgtaccggaaacggaaaaagcgccactggaaactcccttatcggaaaacaagtgttcaggtcagaaacacgagcaaccggtgttaccatgaaatgtgaaacatgtgtagcggtaacaccatgtggcacgggaatcaatgtgattgacactcctggtatgaattcgcttaagactttgaatatagcctataattcacttgatctatgattctaatttcttacatagatttgatgttactaaagataggtagttttgaaaatttgtttgcatactcaaaggcatgtctatctaggaatcaacaaatcagtctgtgttatttgacattaaaaagttaaaacacggtcgcttttgttttagccggattttgtcgcggaaacgagtttgaataatgtgaaacatacagacatatagactttgatattttttaaaagttcaaatcatattttgttgttttagaaataaaagtgaaaaacaagagaaacaaatttggggtaattttatactctagtatttttggtctataggatgataaaaacttgactatcagaaacaagggtaccccagaaacaataactttgtatttaaaagtccctcgaccaatcactcaatcaccggttagttatgttcatacttcttaatacaaataaactataaattttaggctatatatgtatgtgtaaaaatcgtatatccaccaacaaaaggatagacaactccaacattataagacattaatttaagcgtcaaccttgatcaaattttaggtacttctgaataaccgatgctacatatagttgaaaaaaactaactccatattggctatggttgttgatacaggtctgttcgatctgtctgtgtccgctgaatatctcagtcaggaaatcatcaattgccttgttcttgcggaagatggactacatgctgtggtgttagttctgtcggtgaggactcggatttcgcaagaagaagaagccacacttaataccttacaagttatttttgggagtcaaatcattgactatttagtagtattattcactggtggtgatgagttggaagcaaacaatatgacattggatgattacttgtccaaaggttgccctgaatttctgaaggtcttatatatccctttgatttaatcttaagaacttggatagtgccaatagaggttcaacatcacttatatgtttttttttaataaaaatattggattgtgcaattttagacagttcttagattgtgtgggggcagaaggatcctctttgataacaggacaacggacgaaggcaagaaggtcaaacaagttcaggaacttctcgcccatgttgcagccattgaaaagagcactagtgggattccgtttacggacgaaatgcaccgtaaaatacaggtggatatgcttaccatctacatccatttttagtgtgctttgcgatagctagaataattgttatatgattaaatctacggggtctcagaaagaggcggagacgcttagggagcagcaaaaagaggtcgaatctaaggaccttgcagctgccgagattgaaaaatggaagaagcattatcaaacagagcatgacaaaaatatgaacatgatggcagagatggtaattatcttattcccccctaatctttgtatattggcaacaattgtttaatttaatccaaggagacgttagtgtcatgaagtttgaaactctcctataaagtatatttctaactaatcggttcttgtttctctatcagctagggaataggctaagagaggattccgaaagacaggagaaaatgttgcttgcgctgagagataaccttgagatttcacaaagacaaaacaaattgaacgaacttactgataatgagcctgatctcatacattgtggggtttcacttaggcggatgccatgcaacatgttatgattggtgtatccatttcaggtgaggataagctaaccaaagatttaagcagacacggttcacatcatcatttcgtccaaaaggcctggtcgttatttctttcctctttcgtttgatttacgtttgcttcgtggtttctttatttaataataaaaagaataagaatatgtatcattgttgtatgttgtaatctttgagtttcttaaactctcatctttgtactcgttcttctttggttgaatgaaaacaaggtttgacaaaaaaaaaaaaaaaaaaagaatatgtatcattgttgtattaatataaaactttcatggtgcatggcaagcggaacttgatagaaaccttgtctcgttgattctgggaatagccgagagaagggtttgtcacttgctcgtttattcttaagaatggccgaacaatagacgaacttgaagatcattgattcacagtgaatggccgattatcaagagaaagaagaaaagcttaaagctctgaatattattcaataaaaggttgagttctgcaactacaaaagagcctttatatagaggcaacaagaagaaaaaaaatcctaacacgtttgggaaaaaacaccgactaagacatagcttaaagcccaaataagtaaaaggagagaaataaaagaaagcccaaaaagaaaattaaaaacagagcataagtataaggatgcgctgcatcagtgcataagttttataacgagatgttaagagcatcctcattggtgacctttttagagatgtctttactatactttattataaaaattaatattattttaatttgagtcatttattagtcaagtgttttttttttgtgcaatgaggatggtcttatagtgattgagtagtgatttcttctactaaaattgtaagcaaattgaacccaaaaaaatccgacctaaaactaggtcattttatttgctaaaacgttagacgatttaacccgcaaaagggtcaaccataaaaacattaaaagactcgatttttattatttgatcactctgaatatattaacaatttcatatgaaaatattaataaaggaataaaaaatttgatgaaaatgttagtaaataaatatcataaaaacaaagaaaacaaattctttcatatgatcatattggagaaggattaatcatagaaaaaaaagagacatatatatatatatatatatatatatatatataattatatttaatcaactacattcattacaaaaacatcaaaaactattatatttcttttaccgttgatgtatgtaatcaaaaacctcaaaaacattttatagatatgctcttctccgccgatatatgtaattttatttctttttaatatatagtagatgccaaaaattatcaaactttaagaactttgatatgcgggtagtcgtaataatatagtttaatttgagttgaaactcgaaaactattatatattcccaaaagacttcgtcagttaattaagaatggaaaagaaaagaaacaagaaaaaaaaaactcaagtggaacacgaaaagatggtaaaatttaaacttaattcttaaaaatttcaaaatgacttagcattcaagagaagatcgcacgacgagaaaacgtgttgcacaggtgatcttcgtcaatcattttgagtttgtcttttgtcattttttgatatttgaagaaagtttcttctcaattatttgagcttccccgggtaaatatgtatgaataattttgctcagagttgttccctttcttgatcaaggcttttatgttgacctaacaatctgttatctaatatttacatgtaatttgtttgtcaaagcagctaaaatatgaatcattcggaacaggcttcagcgtacaaagcggtaaaaaacatagttttggtgggacgtaccggaaacggaaaaagcgccactggaaactctctcatcgggaaagacgtgttcgtctcagaagcgaaagcaacaggtgttaccaaaacatgtcagacatataaagcggtgacaccaggtggctcgaggatcaatgtgattgacactcccggtatgtttttggtttaatttcaccgagtcttatgttttggtcatattactattcttcgacggttatatagttttgttgatcaagaacgtgtatattttatcaaagcaacaatggtttaatgtgatataggtctgttcgatttatcggtgtccgctgaatttatcagtaaagaaatcatcaattgccttaggcttgcggaaggaggattacatgttgttgtgttagttctatccgtgagaactcggataactcaagaggaagagaatacacttagcaccttgcaggtccttttcgggaatgaaatccttgactatttgatcgttctattcaccggcggtgatgagttggaagcaaacaaccaaacactggatgattattttcatcaaggttgcccctactttcttaaggtccgttacttattaatggtgttttaattttggactatttgcaacgggttttcggcctagttatgtgtagtttaaatttgcattgtgcaatttcagacagttcttggtttatgtgacgatagaaaggtcatgtttaataatatgactaaggataaacacaagaaggtggagcaagtccagcagtttcttgcccttgtcgcaaaggttgaagagcgcaatgaaggaaaaccgtttagaggaaaaatgtacctagaaataaaggtggatatgttgtggatacaatgtttatgtaatggctttccgaataaaaaataattgaaaattagttaatgtttgaatgtaccctttatcaggaagagactgaatggcttaaaaagcagaagaaggcagttgaagctagtaaccttggagaagcagagttagcaaaaatgaagaaggagctacaaatggaacatgacacgaggatgagccaaatggaagatatggtatatataagatatttttattcataaactcaaggccaaacactattgatataagtttaaggagatttggctctcattcaggtgaaaaatatgctaaaagagacttctgctgcgcacgaaagaatggtttctatgctaaatgagaatctcgagaacgcacatagagaaaacatagatctgcgcaaagcacatgatcatgagcaaaagaagcggatgatgattcagcttggtttgggagtacccggggcgctaggaatgatagcaccggcggcacttgcaatgtgtagcatcttgtgatcaatgtacccagttcagcctaaggtgataaagattaggtcaacgtcaattcatccatgggcttaggtcctgcacggcgtccaatcttcatgtacccttttttttttatgtgtgcttctagctagttttctttttcaatttctattttctttatttcaatgcaaccttatgtgaaatttgatttctgagttttcaacaaaccaagcaatgactaggccatgtcgtcattgttgtctcccttcgtcaaaggagtaattttttcatagcatgaatcaatgagcatcaagtaggcatgcatggttgctagaaaatgcataattctagaatgaatgaattactatttaattactaggttgctacatttctttgttgcatgctaatatatcccttatgaggatttgtgatgcgggatggtagggctagaagtatgttttgaaacatgtgggtaaaatggattattttcactgagtaaaattatttaattatgtcgtcatggatgcatgtttcttttctcaggagtaatagtacacaaaagcactgcttattggtaaggtttccgagaggcacacatggcatgccttgtgcacaaagtcagcgaatcgggtgtcacaaaacaaaccaaattgataagattcaattgtctttagttgcttcatctctctattctcatcaatccttgtcaaaatagggaacacgcctttggtggcaatgagctacattagctattgtagttaagatgttgaatgatatatttgatacaaatgaaactacaaactatatatatatatatatatatatatatatatatatattagaaaattgtctacgcaatacgtagattatatattcggttttggttttgaatatagaataacttatacattaaattatatataaatttatctataatgttaatatatcgcttgaaaataattgaaaatattaattttgatgtttacaaattatgatgggtttaaaaagacactttagttaattagatgttttcaatgcactcaatttttatttttggtgaaaacggtatgttttattataaaaaaaaacttaaaatattcagtgtttttatttttgatgaaaattgaaatgcatgtattaccaattattttgaaagtctaaacaatagataaaacttcttcatatttaaaaatttaaagcatgtgatttaagatgattttcaatggaaaaccctccaacttgactaacgatctcagaatgtcggttcaaaaaaaaaaataagtcatataaaatctgataaatgtacagaacaacgtcaaattatatatataacttagcattaattgttaatatatggctcgaaaataattaaaatataaactttgatctttataaattatgatgtgttttaaaaagacattttagttgattaaaagttttcaatgcactattttttttttttttttgtgaaaacggtatgttttactgtaaaggaaacttaaaatattcagtctgttttttctttttctattttttgttgaaatggaaacacatgtattaccaattgtcttgaaattcaaaacaatagatgaaccttcttcacatttaaaaatttaaaagcctatgatttaagataaaaatcaatggaaaaacctccaaactgactaaagatctcagaatgtcagttcaagggaaaaataagtcatataaaatctgataaatatattcaaagacgtcatgtcactacccaatgtttactcaatgaacaatactttatgtaaatgtaagataaattaaagtaaataaaatattctctttaagaacttaaaataacaaaaagaattgatattatatatccatataatgcataacaaaattaggagtttaaagttaacatatcatattattgagttttttccttaaatttgatttgtatataatgtaaaaaaaattaagagcaaataaaacagttgtcacctcaaaagtcttttttaacggattttccctcaaaagtcatgttaacaaaattaatacataacatgtataataatactttagatacataattttgagttatacaaataaaattctttttcgttatggttatttgcctccaacagtttaagattaatgttataaaaaaatttattagatatttacatgaatccattacacatgagtttcaatatgggttaactggaaatatatattcttgtttttcattataataaatgaaatgtcaaacaacttttattattagaactccaaacagataagccaatgaaataaaattaaaaaacaaattgaaacttgtttgatttatttttgacttcaaatgatggaaaaagtagagatatatgtctcgaagttaaatattataagcttttataaattgaaaccttaattttttatataagcaatttaagattatgtaagcaattttttatataagcaatttaaactaatctcaaacatttactaaaatgtgtgtctaatgctccgactggtaacacgaattatcaaaattgagttgcagtatatgtttaaatttgatataacttgcagtaaaaattatgtggtataactgcagattgatgtagtgaatttgctgtagaaatatgagttaataccagtaaagaaatcagtcaaaactttagttaggaatgatgaatagcaaactcatcatcgctctggtattcatggtcttcgatcctcatgtaatccaaaaggtatcctacagcatagtgccggttttatcctaataataagaaagttttcttggcctaaaaatcgtctttcttgtgttgattttttttttgagataaacaacattttattttgatatgccatttgagtttctttatgtgtattgtgctatagttaattaatttgtgtgaaactagcaaagtcaaccctaaaaagtcgtctcattcagaaacatgtcttgggcttctggttcgtttaccgtgtccagttcaacataaattatacagaataatattctatggaaattaacaaactaaacacataaacaaacgcaaatggcatataaaacaatattgtttatcttaaacaaaaaatcaaaacataatgttgggcaggtaatcgtccatttagtcttgaattgtttggtttcgattcttcttacaaaaaaaaaaactttgtcaattcgttttgtttcttcactcacaaaacgataagagagcttgcaagtttccatttggtacgatactatttcacatttttgttcgtcatttttgtttggagtatataatttgtcaacaacaaaactgttctttattgtcggtttttaaaagctatgtatcatttcatgaattgtttctttggtcaacatgggtacgtccaggaatttagcaaataattgctggtgatcaaaacatgggtacgtccgtgtctaagccggtttctgatgataagaaaaaaggtacgtcagtgtctaagccggttaaaaacattgttctagtggggcgttctgtcaatggaatatgcaccactgggaacaatatcctcggtcaaaacaagttcggctccgaaggtgctttcatgcactgtcagatgtatagtaccacgacaccagatggtcaaatgatcaatgtaattaaaactcctggtatgtgctcaattaaaacttgagatttagcctaaccactcataatcttccattgtatcttttcttacccacttcccaaataactcaacaaaatcattaataggaaataaacataaatggatatccttaacaatattcataatatagttaattctaagagtttccttactgaattggccaaggttaaattgatcaaagtcttgatttattattgtatgtacgtgatacaggtatgttcgatttgtctgtgtccgaagactacataagtaaagaaataatcaattgcttaactttagcagaagaaggcgtgcatgctgtgttgtttgttctatctatgaagaatcggatcacacaagaggaagagtatgcacttaataccctacaacgtatatttgggagtaaaatccttgaatatttgatatttttgctcattgacggggaaaagtttgaggcgaaggagttcgaagattattttcccgaatgttgtcctgaatttcttatggtctgatttctttcaaaatgaaaagaattccttgcccacacacatcatttcttctttttgatttttgttttccttttttattctgtcttgagtaaaaatttttttggaatttcagagagttctcaggttctgcaatggccgaaaggtcttgtttaataacatgactaatgatgaaggcgtcaaggctgaacaagtcaatcaggttatggcccatgttgcagcaattagcaagaaaaatgatgaaaaaccatatactgaagatatgtatcgtaatataaaggtaaacacatttttctctctaattgcattcatttaaaattcatagttattgatacaatactatgacctttttaaagagagatagaggaattaaaaaaatatatatatacacttagtctagttcatgagcaagaaaagatgatgtagaattagctaatggagaatagggagaaagctagagaaaagcaagatcattagagatccctagtggtggttaccatgactgcctcaaccaccatggtcaattgtccattgcatctcttcttttttgatattttgaccagttgtttctctctctctctcaagaaacgctgagcatatttggtatgttgaaatagctttatttctctcgggttctaatgtatcaatagattagttttgtaaagtagttatatacttttactataatacatatataccattacttatttatccatattttgtttttgctgttattgtttaacaattcggttaagcaaataatttgtttgaaatcatatgtgttataacagagtgtagcaacaaatggagaagagtttcattcgctagacgacacatttcagcatgatccatatttgtctccattccccatatcaggtacacaattcaagtgcaacaatgttttattgtcaatagtaacatatgtgatgccgggtttgaatttgattatcaatactttgaagcttaagccatctccattggtgagatactttgaaagtttctaaaaaaaaaatataataatattttattatgatttagtttctgtccaattataaacacacacatacacacatagtctctcaatcattactctaaagtttctctgcagagaaactattctcattctctctcctatctctctcctactttattattattttatattttttagttaatgagaaactatgtgagaaactactgatggagatgctttaatatcacatacgatttggaaatatgtcataatctaaatatttttgggtctgcgacggtggattgttatctaccccaaaactaagatattcaagtctgctaatcgtttagtctactatgtctccaagatccgttaaagccatagaaatatgagaaagtcaaataagaaaccaaataaaattcttacaacatctttcacattaaaataaaatgactaacacacctacgcataatcttaggcccgagcaagcaatctaatagtaaaactctaattacttggtcaattattttgtcatttattctaattcttctttttctttttctttacttagaaagatcaaggaaactcgtgagtttgagtttgcctttcgtatacactgctaattaacattttcattctcattttcaatactgtcagagccagttaaaaacatagttctagtagggcgtactggaaatggaaaaagcgcaacagggaacaccatcctaggtcagaaaatgttcacttcggaactacaagcaggaggtgttaccatggaatgtgtgatgtatagaactgcaataaaagatggtccgataatcaatgtgattgacactcccggtatgtatgtgctccattaaaaacttgagatgtaaccaaacctgcattatcacagaaacttgccaatattaaagctattttcattaaggttctacttaatttaatatggtgcatgaaacaggtctctttgattcgtcggtgtctgctaactatattactacggagattctcaaatgcttaactatggcagaaggaggaattcatgccttcatgtttgttttatctgccgggaatcggattacacaggaagaagagtccacacttgataccttgcagttgattttcgatagtaaaattcttgactattttattgtcgtgttcactgggggtgacaaattagaagcaaacgagcagacattggacgattatttttctgaaggttgtcccaaatttttaacagtatattttcctacgttataatcctcacatttttttacaatgcctctagtggtacatgttttctttcattaatggtaaaatttcagggagttcttagactgtgtggtggtcgaaaggtcgtgtttaataacatgactaaggataaagtcaagaacgctaagcaagtcaagcaacttttggctcatgtcgaagctattgaaaagaataatggtgggaaaccgtatactaaccagatgcatcgtatgataaaggtataaatttttttgtttggtatgcattcaatataaaaagtatgtttgatctcttgtatggtatttttaaatgttggaattcatcggtttcctaggaaaagggtgataagcttagggaacaacaaaggaaggttaagtctaaaaaacttgcatcagaaatagaagtcatgaagcaggatttagaactggagcatgacgaaaaaatgagacggatgacacaacttgtaaattcatattgatacactttgaactatatttgtttttcattagtttattttggtgtaatacaatctttttatttttcagttggagaggaggcttaagcagaattctgaagcacatgaaagagcgatgcgtgagatgagagaagctatgagaaattacaaataaagattgatcaaagaggttatgtgtgatcgttgcacatcttcccaactgacatcgagttttatttatgtgtgcttaatgtgacgttttcttgaatgaaattttcttgtaatgttgtagataaggataccttcctccatccatgtacaaatctatttttccaaattaatgcatgacattttcatcctaagttaatatatagggcatgtgtgttctgtgatttattctgattacgatctcgttcttttcgctttagtagttatctcctttagggataggaaaatatcaatggatatactcagatttgaaaattagatttttgctattgataattcaatattaggtaagtatgaaagagaaaaaaattagagtcatcactatccttcctactttgtttaatttaccaaatatgtcatctatcaactattgttataatttcactatatattaactatcttaccatatttataaaatattattcagatatataatatgttagcacgttatatccagtataacatgttattataatttgaagataactgtcattcttactttgtttaatttaccaaatatattatgtatcaactattgttataatttctctatatatcaactatcttaccatatttatataaatattattcagatatttaatatgttagcacgttatattcaatataacatgttattataattttaatttgattatttcatattaatttgtatgatatagtaaatggtttaatacgatatatataaatttatagtaatactatactagttaacatgttaatcaaatagttatctgtatttagcgcgatattatactaattaacatgttaattaaatagttatccacataaatcataaatgttttatgcaatctaatgataaatagtatcctaaattttggatgaatagtgtcgtcaggcagttgatgaacagtatcatgcctatagtatctgataataatactgttttaagacaatggcatatttggtaaataaaataaaataaaaaggatatttgtggttttaatttttttctctttcatatttaccttaatatcaaactatttataataaatatctaatttttaaatcttccaagcatatacattaatatagcgcttagggatatatcttattctccggcttatttaacattactttgtttttattagactcatcagacttagatgaatattatttagagcgaccaaagttcaacttcttcctatatatagtttatcttcatttgaattcacaatctttaaaaagaactttgacgttcaacatttattgaatccacgatcctcaagatcgaagcgcttacacgaccatggcttcaaaatgcaacaacaaccatgcaattgattgaccagccaaatccatggattaagcttcatgaagttctcctcgctatgcatggaatgatggaaatattctaagccccaattcacaattcgattcaaaagttatatgaataatggactagttataaattttaaaaatctttccaaatcattagccattcgcaatcacacaaatcacaccccgttttgatggctataacttataattatcaattgaagtcaatgctcaaaagttgtctctcactcctcaagaagttgtcttaccctttctgttttctttaccgattcttgttccactttatatacataatattgtaacaccatacaaaacataagtgcattttagtgatagaggtgaccaaatcaattctgttaaacttatgtattaccatatttctaaaaccgaagtgttatcattcatccccactaacaaatcgcaatgtcctcgtttcacaccaaaattgtcacccccgatggtgtgagtcctcttatctctatacttgcatgggttcagctctgatacaatttgtaacgaccggaccgcccctaccaatgagcacccatgttcactcttggacatgtgggcccacctctgtccaacaatcacccatcctgaaattgctccggcttaagcacgcttaatcctggagttctttcaggacgtttgacggaaaagatatttgcagtttgctgacataggtgggtaaatttattctttttaaatctcttcgcatggaccaccatattcctgaaaccgaggtgttacaaagaaagataacagtcattgttactttgtttaatttaccaaatatattatgtatcaactattgttataatttctctatatatcaactatcttaccatatttatataaatattattcagatatttaatatgttaacacgttatattcaatataacatgttattataattttagtttgattatttcatattaatttgtatgatatagtaaatggtttaatacgatatatataaatttatagtaatactatactagttaacatgttaatcaaatagttatctatatttagcgcgatactatactaattaacatgttaattaaatagttatccacataaatcataaatgttttatgcaatctaatgataaataatatcctaaattttggatgaatagtgtcgtcaggcagttgatgaacagtatcatgcctatagtatctgataataatactgttttaaaacaatggcatatttggtaaataaaataaaataaaaaggatatttgtggttttattttttttctctttcatacttacctaaatatcaaactatttataataaatatttaattttcaaatcttccaagcatatacattaatatagcgcttaacgatatatcttattctcgggcttatttaacatcactttgtttttattagactcatcagacttagatgaatattatttagagcgaccaaagttcaacttcttcctatatatagtttatcttcatttgaattcacaatctttaaaaagaactttgacgttcaacatttattgaatccacgatcctcaagatcgaagcgcttacacgaccatggcttcaaaatgcaacaacaacaatgctattgattgaccagccaaatccatggattaagcttcatgaagatctcctcgctatgcatggaatgatggaaatattctaagccccaattcacaattcgattcaaaagttatatgaataatggaatagttataaattttaaaaatctttccatatcattagccattcgcaatcacacaaatcacaccccgttttgatggctataacttataattatcaattgaagtcaatgctcaaaagttgtctctcactcctcaagaagttgtcttaccctttctgttttctttaccgattcttgtttcactttatatacataatattgtaacaccatacaaaacataagtgcattttagtgatataggtgaccaaatcaattctgttaaacttctccgtatgtattaccatatttctaaaaccgaagtgttataattcatccccactaacaaatcgcaatgtcctcgtttcacaccaaaattgtcacccccgatggtgtgagtcctcttaactctatacttcatgggttcagctctaatacaacttgtaacgaccggaccgcccctaccaatgagcacccatgttcactcttggacatgtgggcccacctctgtccaacaatcacccatcctgaaattgctccggcttaagcacgcttaatcctggagttctttcaggacgtttgacggaaaatatatttgcactttgctgacatagatggttaaatttattctttttaaaccttttcgcatggaccaccatattcatgaaaccgaggtgttacaaagaaagatagccaacgcagatatcatcaaaatggggtagataaccacccactcccacctaagtttaaactctttgtcacataaaaggcaatcatgatccagagatacaaaagaaaggttaaaagattattgatgagctaatgaagaaaattctcactcttgaggtacatgatcgcagaagactcgtgatatgtcccaataagagttgcccatcaactccatgatcgcagaagactcttctacctcaaaggatcaacaaggacttcaaatactcttacatcccgtacacactttaaggttataagagtatggtcctctcttccattgtaaatatatcatttttgtttactctcctttagggatttagacaccagaacagtctgaattaaagtcgaggaggtattctcgtgatctaatcattgtgattttcttgtgaacagtcttgcactaatgaaatttatattctcgtgatctaatcattgtgatttttcaaaaatcgaaacaatacatttagaaatccatgtcttcttgcatttgcattggggacaatgatttatctttcttgtaaaacatcattagctttggaattcaacgcccttatttatcgtacgctgtcttatgaatcatctagaaaatttggaagattatatttcagctttaatttcttggctaaattattgatttctcagttgataatcgcttggtcgttttcaattattttgcagttgaacataatctggatttaattttcttacatatggttttcaaatgcatgatgattatgatttctttttaagaaaaactcgagttctgttaatctggttatttttatttcctacaccgtcaccaaaatctttcttcgaacaatggtatttttgattgagtgagatagtttgttgtgctatcaggtgaaaaatctttagagaaaaagagcaacgagtcatctttcattagagactgatctaaaaaaaaataggaaaacactcttttgtttctctttcatcacttttttgtatttactattattttagtataagtgaatttgggcaaaataaaaataaggtataaaattagaaaatagatattagggatatttgtctaaaaaaaagttgaaaaaggttttagttttgccaattattagagaaaaccgattgcatattttatcgaagggggaaaaaaaaactgacatttaaaatagggtgaattaagcgtataaccaaaatccaaggtttaattagaatatcgcatcgtgtttgaaaaatttaaaaaaagtaatataaagaagaaaggaaaagactaaactagtgtcgctgaagaaagagaaattcaactgaggtggaaggaagagctccatcattggtggttcgaagctgagatggcaggagagaagctcttttctttttataactctttttcaattttcactcacaacgtttgttttaataattcgattcaaatatatgactcttctataaaaaaactatatatttttttacatgtactatgatttaaatttttcaaaacaaacataatatgtctaaatagaacacctctgaaatagtatatatatatatagtaaaatgaatggtatagaactaaacattcttacttagtatgaaaaacttatcgatgataaaaaattaaatggtaaatctaaattgttaagttaagctgacgtatcatagattaatcataagggtttttctaatttatacagagaatattatcttttaaattaaatctaaaagagttctacaacaaaatttgtccatttatttctttttatcgtagattaatcataagggtttttctaaaaaaatttaatcttatttaccatcactttaatttataatttaaataaaattagaatttcctaatctatttacaaaataaaaaatagaaatagaaaaaaaaaacaaatactctaaatgaattagagtctttcatacaaccctatttttcttggattttatctacttattctttctctatacaactaaaaaaaaaaacacagagctcaaatttccggcgacccaacacttattttcgccggtgaatcttttgccgtctctgggattgtcgccgacgagtttcttcgtcgtccctgtgttgacgccgcaacttttccactttatgctttggaaaccttatggtgaaataaaatggcatgttttgacagtatttgttcatgttgagttctgtccaagtagagatattagaactcaaagtatttatctccctctccacgcagcttcttctcacgtcttcttcatcactatcacttccttatctctcatctcaatctcagccatcatcatcatcgttgtgacaccggagttgacgtcaagttgtggtcgtgattgttctatgtggttggtttcgtcacagttcatcaccggattgtttggtaaagaaaacctatcatggttataaactatactactgaaattgtttcactcagcaattggattcagggattataacttcaactattcgatttttaggtgaatatacaaaggattttaagtacgtttcgaccagaacttaaaatcgtcaacggaaaaaatcgagtccgaggaatcctcgatccggaatcgtcgagaaaattttaccgggtccgagaaatcgtcgacagtggttggaatcgtcgagaaaaatctaacgagtctgacgaatcctcgaccggacggccggatggtcgacgaatcctcaaaccggacggccgggtgatcaatcgggcacttagcaattgtttcacgaccatccaacagaggttagacaagggttcacatttcgttcatcacccttagccgatcatcgaatagccagactcccatcaaaagatggttgccaagaacatcttcgttacagttagctaattcttggaataacatcaacacaactcggaaggattaaaaccccaagagtagtgagcattgctactcaaaatctttgctacccttcttgttccagttcatagccgcaaggtatcgatgcccatgagcgacactcacacctagctcacaaccgggacagcctaggcggatccatgctttccaacgaagcacggccatccaaccgagacgggtggaatcgatgcccatggggaaatctcggtatttcgtgcgcaattgaagatactgccacccaaacggcctaggagaatccatgtcggcccatgcatgacacgctcattctctttggtgacgaggtgaaacgagatccgtggggacatctcggtatgtcatgcgccaaatttatataccgccacccctaggcctcaaagaatccatgtcagcccacgcatgacacgcccattcttctcgaccactcaacaatttttgtccgagaattgccaaaaaaactccgatccttttataacgccgccaccctaacgcctcgaagaattaatgccagcccacacaagggaagcccattcccctcgatgattcagcaatttttgttcgagaaatgctggaaaaactcgggaaaagtcaaataaccgatcgccagaaaacttttcaggcgaaaatttcgacggtaagacggtcagccggtcgatcggtcattcctcgtgtcgatatccgacggtatccctcgttcgcaacccaagtccggaacaaaggagggggttccctcggactgctcagactccctcaacacccacccccctatatagctttatgtctttttttcaacttggcaccacaaggagttactggtgccaaaaaaaaaaaacttggaatttgaaaattatttttggcaagtttcataaggatagtgaatcctattttcaagtaaatttacgttattttctgacacctctagctaggtcatttgacctgatacaacatcggattttcatagtttagtcggagcccggtgggtatatttgatgaacctttgacatcttaaactctttattgatgtattttaagagttttgatcataaaacattgcatcttactcgttgattttagaaagttattcgacactttcttttttcctagactattcggacgtacggatcgaggattcctcgaccggacagattttatatcgagtattccaacttctggtcgatctaaactctttattgatgtactttaagagtgtcaatcacaaaacattgcgttgtactctttgaatttgaaagttattcggcactttcttttttcctcgaccacccggccgtccgaatcgaggattcctcgaccagatagattttttatcgagtattttaactcctggtcaacctaaactctttattgatgtattttaagtgtttcaatcacaaaacattgcatcgtactcgttaatgtttgaaagttatttggcacttttttttttcttcgaccatccggccgtccagatcgaggattcctcgaccggatatattttctatccaatattccaacttctggtcgacctacactctttattgatgtattttaatagtttgcatcacaaaacattgcattgtatttgttgagtttagaaagttattcgacactttctttttcctcaaccatccggccgtctggatcgaggatttctcgaccgggtagatttttttattgagtattccaacttctggtagacctaaactctttattgatgtatttttagagtttcgatcacaaaatattgcatcgcggactataacttttgaaagttattcggtacgttctttttcccacgaccatccagctgtccagattgaggattcctcgaccggatagatttttgatcgagcattccaacttctagtcgaccgaaactctttattgatgtattttaagagtttcgatcacaaaacattgcactttcttttcgaaagttattcagcactttcttttttcctctatcatccggccgttcagttcgaggattcgtcgaccacccgaccgtccggttccaggattcgtcgatcacatggccgtccagttcgaggattcgtcgaccatacggctgtccggatcgagaattcctcgaccactcggccgttcggccgtggattcgttggacccaatagatttggctcgacgattccaacccctggtcaacgattcctcggacccggtaaaattttctcgacgattccaagtccaggactgatgattcctcggactcgattcttttccctcgacaatttttttccatctactgttatagctaccaacataactcctttgtatttgcttttcagaaacgtaccgtcaaccacaatcacttttcgaataggcttgtaaaaccctttaatagactgaccaaaagatataaatagatatctgaatctatcctcaccatcaaattcgtagtttgtaaaagtaccagggttcgcttgttctagcatgtacaagtattttagtatcttaccataacttttctcaggaattcctctaacctcgttaactgtatactcatgagcctcccacacctgatgataagttagctcgtgtccgtattgtgtgcgaataatattgctgatatcattcggtttaggaccttctaacacaccttcataattatgcataatgagacgtccaattgttttggttgaaggtgtgcgacaaaatttgtttttttctgaaagaagcacatgaatggtcatccacaaacttgttgactttaaaatacagagatctctctaaacgctccgctcgaagactccacttgcagaccacatctacgcatcgtatacaccaaagttttgtatcagactttgtaatcttgttgtcgcagttatacttcatcgcatacaactccattgttgcctttaaatcatctttccttctgaaatagtgctcctttcttagaaaaaaagatttcgacgatgatcccactccatcacttgcaccgtgatgatgctttcgctattttggacttttggccaaatcgatgacagactgtttgtcttcttccaccactctacctaatacttttttgtcggctttaaaataagcatctccatcacttggagcatctggttccttattcaaatcgaatttttctttacctcctttatcttcaactccaccattgaacgtcacacataactttaccgtatttttctttttgcaatacgaaagaaaattactaacctgtctgttattcatcataacaacaggaagacaatcaacactaagatccgtggataagtagcttaactccacatcgtttgtactacgttctattccatagtcttctctgaccatcagcttaagctcttcgaaagttgtagtcaattccaaaaacagtaatctccgacgatttttttcatcaacaataaatttccactccttgttatcatacaatctccacatgccactcctcacatagatatgtataatgaaaaacagaacacgagatggaaaaagaagaacgtgaagaagaaaagatcaataatagggcacaaattgactagggcacaaatcgtttgtttacaaatttttttggtgtttttttctttctgtattctaaaaataattagaatttgttttctaaacccagtaaaaatcgtaatcttaacagaaaatatatcattaaaacgtaatatttaataaatatttaatttcttttttcaaagattcgctttctatatttaggaattctaagtaatttagaaacaaaattttaaatatgttttaaatattaattctaaaagagagaaaacgttttctactgttttcagaaactatagaaattcgtagaaaacaatttcgcacataatttagaacatgcaggaaatcttagaagacatgttctaaaatttttagatattgaatttcctattttctaagattgttagagcgaaaatagtctaaatatcgtagaatatgtacaaaaaattagaatagaaattctaaaataagtatatcactagaaatcgttttctaaaaaattttagaaaaaattgtatctttcaaaatatcaccttaatatatacaaaaataggggtattttaattcaaatttaaatcaactatattcttctagatctacatgttatcaaaattaaactttttcaaaaatacttaatatataaaataagagtatttttgttcaaattagatttaatttctcccggttgaattgacctttacgaagcaacaaacaaaaactagtgacagttaaatgcgaccggttttaatttgaaaaaagtaacaaaaacgtatgggcggaaattacaaaatctaaaccactaacctagttgcgtagatatctattactaaatgtagtactctataaatcgatatataactctatgaaagcgtatcgacatgtagctaaatttatagttaactattaattcattaactaaatgggacatgcttatccaaaatgaatgcatgagccttgtatcgcccatctacgcttcttaaatatgcatatacgctttgtatagatctatatgtggaggtccaaagattgttttaaatccatatttgtatcgtgaaaattgtttcttttaacgaataaatataccatttaattctctggtaagttagtgtgaatcttatattataagacaagttttttttgtaaagagctctattatcatgatatttggcaatatctttttacgacatgtggcatatacaataattaaatatttatcttctacaaaactttattagtatgacatttaatatatacactaatatctcaacatttaaccaattaaatacataagaagtttaaatacaaaaatatatatagtactataaaaaatcttagaatttgtttttccatataatttatcatttacactaagctttttgaattagttttttcataagatttattatataatggagctctattatcatgacatttggcaatctctttttacgacatgtggcatatacaataattaaatatttattctctacaaaactttattagtatgacatttaatatatacactaatatctcaacatttaaccaattaaatacataagaagtttaaatacaaaaatatatatagtactataaaaaatcttagaatttgtttttccatataatttatcatttacactaagctttttgaattcgtttttccataagatttattataatatatatatatatatatatatatatatataaatgcggttgtttgaggaatgccctattccccttctaacaatatctatattttattacatttacccttttaactttgtaaaatgtaatataatagatgattaaatcaaatctgtatttttattattttacatttccaataatatctgtattttttaaaaaagaaaaatccatcaatgtaattaatgaataatgattaaggttaagaagaccagttgactattgtaaataaaaaagtaaaaaccatagtaatgttttttggtttgaacattctagtggttacaaattagaaatacattaagttgaatacatttagacccacactaataatggggacaacaatacaattttataaatcttgcttacatatttaatccaaatggtatattatatagaaaaatggaaaattgcatatggaactaaagagttatattttattccaataatcttattggaataattgtttggtgttcaatttttccttttatgtttattacatttggcatattctccaatataatcttattttttctcttcactttaaaataaataattcacacaacatgattattacattattatgtaatgccatttcaattgaaataaactgaataagttttcttccattatatatagcttataaatatttaaaatcattgttaacactacattttatccaactgatattttttttttgtccatgtatactaaataaacgtacaaatattatgctatataatgttacattaatagtccattagttatactgaataaatgtaagaaacggaaagccatgttacaaatgtttatattgttttcaaaacgttttattttttttgtgtgttagcaatgtcaaaagaacacacataatagataataacttagcccattaatacaattttcataactatataaaaatgaatgaaacaataaatcaccccattaatatagttagaccaatttgaatggcttttccattcatatttttctaacggtcaaataaatatcacaatatcataaaaaaagttttagagttataggctgcgctacctatttatttggtgtttaagttaagttgtttgtcttttgagcagacacttttattttgagactttgtggatttttagagtttcatcgatccaacaatgattagttccaatctctgtctctctgaaattttatttcgtgattaaggtttcgaacattgtggttgtaatgtctcgtcatgtgaatttataggcggatatggaaccagaggttgttgcggctggaattgtgaaaaagagaatcttcaagaagttttctttcagaggagtcgatctcgatgcgcttctcgacatgtccaccgaagatcttgtcaaacatttcagttcccgtattcgcagaaggttagcttctttctttgaaccaaacaaaacgcttttgtctaattggttttgtgagactgatgatgtgttttgttatctttaaaaggttttctagaggatttaccaggaaacctatggctttgatcaagaaattgcgcaaagcggtaaaatcataatttctcacatcactaattagatgttacgtttgttgaacaacatattcaattatccaaatctaggaattgtgtatcttgagtaaatacggcgatgtttctgtttggtttgaatgaattcgaacaaagttgagagagagaaaagatagaaatgaacatgagagaaaataaagatccaaaaatcaaaaattaaaaacaaaaaaagaaaactttaggtacataaggttaaaatggataaaattatcattgtcttggatttagactaataataccaaaattctatttcatcagatccattgtttcacccaattatcttttggaaaaattacaacatctgccatattttttccaatccttatgcaatctgccataatttgttgggccttacaattcatgccacatttcatattgaaatgtcgattttgtctctctacatttcttctctattttatctctccttcctcgaaatctgtgcgctttaaccatatattattttcccgaagacgaaacgcttttgtctctctctgactttctctgacaatctgcacagattctttacatgtaactttcaattaaatttgtctcccaattttattcatcataatatttctgttgtatctatatcttgtccccgatctaattctattactcattcgatatgaacttgtccccgatataacatattattaaaatatgttaacgtgtaggtgaagacaataacgctcaactaacctgtggaccaaaatagatggcgaaaatctaaataaaattcaaaattcttaaatgagaacaattgcatataagatgtaggattcataataatagagcaagatgatggaatcgaggacaaaacgtagatgcaacagagaatttctattcggggataagatctggagactaaaacaaaagtattgcttcaattgttctccgctaacaggtaatcatgtcccctaatgcattatatattacgttgtccttcgctatcaggtaatcatgtctctaaatgtattatatattacgttttcccccgtagaattttgaataatcaatttgtttaaacaagtcattttaaaatacccaataacaacagtagaagccagttgttctccactattctgtcctctaatcctttatgcttccaccatgattttttgtcctgtatcatcacatcagccaaaaactgttatgtcaccatcttcgtcagagcgctgacccaccttaaggataatttcatccacggaattccacatgtagtaaaatatggcaaattctgtaaaataactggaaatataacaaagattgtaaatttttgaatgaaatatgacagattttgcaagattctcttatctcttttagtattctaaattattttaagacgcccaccagacataccgatggacatggcctaaaaagtcgtctttctcgtgttgatttttgttttagataaacaattcttttattttgatatgtcatttgagtttgtctatgtgtattgtactagtgtaaataattaacaattaagtacgaataagtacgaaaagatcttcttttagtagcatttgtgaactgttcctaaaatattttagatttgtcattttcttatatacacatctacacattattacgagagtcaatcctaaaaagtcgtctcactcttagacgtttcttcggcttctggttcgtttaccgtgtccagtagttcaacatatattatacacacaatctacgcaaattaattaactacactagcacagtacacataaacaaactcaaatggcacaataacattctacggaaattaattaacaatactagcacaatacacataaacaaactcaaatggcacaataatattctacgcaaattaattaactatacactagcacaatacacataaacaaattcaaatggcagatcaaaataaagatattgtttatctcaaacaaaaatcaaaacataatgttgggcaggtaatcgtccatttagtcttgaaatgtttggttcagtaaaagcattgccaatggtaaggaccattaggagttcttaattacaaacatttataacttaactttgcaaaatcaaaagtttagaaacccccatgagttcttatgttttacttagtccaatggtagaacttctaatgaggttcttaaaatttaaatttgtaagaatttgtgtttaaatattttggttaaaaaatttatgtgttttggttctcaaacttgtggttatgtgttttggtttttaaacatgtggatatggttttgaaatgtgtgcttatgtgtttaagtgacagtcacaaggaacataacagaggaacaagtgattagggttctcttatttccatacatattgttttttttttctcctttttatatataaatatcttagtttaaaaactattagaatttttaaaagaaaaatgtatataataagtttatccccgtagacttttctcttttaaaagtcaacatattcgaggcagatgtttactttataaattctaagaaccttacactttaacttcacggcataaccagacccaaaaaaaaaagcatatcaaaacaaaactgagagagagtatccatatttggaggaaaaagaaaagaatgcagcagccctatgagtaccgttacccacaaggcactggcccttcggctcctccgccgcctccaaaagccggagtgatagtggatccaaagtactgctctctgcaccctgtagatttggcgatcgtacggaaggtgttgaagataacggacggtaacttcgtgataacgaatgcggaaggaaacttgttgttcaaggtgaaggatcctttttttagtcttcacgagaagaggatcttgatggatggttttggaactaaggtcttgactttgaaagggaaggtacaaatttattaaaaacagagcacataactagatatacaataaaaaatagagctagctttattagtataataaagataatttggtgattgcagataatgaccatgcatgacaggtggctagtgtttagaggagggagtacggaggaggttgatctgctatacacggtgaaaagatcaaacatggttcagataaccaccaaacttgatgtgtttttggctgataacatagagcagaagaaatgtgattacagactcgaaggggtttggctcgagacttcttgttttgtctacgctggcgattctgacatcattcttgcccaagtaaacaaactctatttccttttcttagtacaagtctaactgtatattgaaaagaagtttttttgacgtaatttaaataaaatatgaaaagaaaacataagatttatataaaaggaaaatataaaaaaaatgaaaaattgtaactttatgttaagtttgagacatgaaaagaaaatagatgattatcagttaccaattataccaaaaatatagcgttacaaaatgttacatagaaaataaacatttttatttatgatgatggactgggtttaagtgatgagtaggtgattcgtgccacggcttctttctatattctataattttctgttttggtatggtttagtttctttaaaataaacttttttcttttttttcacatctggaataaacatgtttatactatatatacccatctatatatattattatgaactgggagttgctaatgttttattaattgttaaaacttgagaaataaaaacatttatttatgataaaataaaaatggtatggtttgaatggcagatgcgcgagaagaaaacgatgcagagcgttctctttggaaaggacaatttctgcctcactgttaatccaaatgttgattatgccttcattgcctctctcattgtcatccttgtagaaatacaaataagtcttagaaaattaacaaaacaactcttgcttttagaataagatgttgtattatagttagtgggctacatttaatttgtttccattaatcaaggtaatgtcgagtgcattttggagtttcatcaaaaagatgatatatacccaatcgaaagtttatggaagagggacataacagatttcatctgttagcctgtatgtaaggcttcccaaaggacagcgaggttatattccactcttgcatcgaaattgtttcagttttctttatttgcgtacaatggttgtattgtatttgattctatactttgtaagctctttgtgatataaaagtgtttgatttgtcgttaaaaataaaagttgtaggctacatattgtatgctgcgcctagtcgactcataacttacttggtcggcaagtcttgtttagggttttggagttaagtcttgtgttgtgtatatatatcatcgtattgaattgaacttgagtgcccaatggctttgctaatacatctgccaaccgatccgttgttagcacatgaactgtagtatttatgagatttcacatatatagtgatgataacattaacataatgttaattaacataatgttatcacccacataacataaggtttcctaaacaataaagaaatagcttgtacaacaaataatatagagacttaaaatatttttcggtttgggtttcacgggctttactttatgaacggattttaacggtccatattacttggtttgcaaaatagacattttgctatccaaattttattacattttgctctcttgttgctttagagattgccaaatattcttcttaagcagaagaatgtgatactacttcgtacttttccgtttcccagagataggctagctgccaataagagaaacatactcctaaaaatttttagtcgtcaggacatctacaaccctactctataattgactaaaaaaatatagatttttgcagattgactctttatatagagcaactatattctctacactattttggagtttaactttttttatatactttactccctcaaatttaaactttttatttaatacatataatcattttacaaacaacagttacaacacataattttataaacttaacaaacaaacaagtattaaatttaaaataatttatatacttaacaagaaacaaatactaaatttaaaataaacaacataagaaaactaaaacataaaactagtgatttaatagtccgagaaattacttttacataatatgattatcgaagatgaacgtgatctcaatgcaccaattcaagttggaagagaagctccacctcccgaagtcgagataacagaaaatgattatatccggtttccagagtttcttggtagattttaaaaaatcaaagataaagaagctcatttatcactgcgaaatgttttaattgatcatatgtgggaaaatattttaatggtgttatttaaaataaaaattttaatgttttattattgttatatgatgtaatttttttaataaataattagtgtttaatttaaataacatcatattttatgggaattttgcaaatctataatatataggatcaaattgtaaattatataattgaaagtattagtatataatttagaaatataatattcctaagaatatttttttttaagtagaaaatagagatatacattggaaagaaaccctcctctaaactaccttttttaagtagaaaaatgtattagttactccattttagagtaagatatagaactatacattggaaatggtcttaggcaagcagctcaatttttgttgcagtacacagaaagctcaagtttgagtcagttcacaacaacactccttgaccagctgttcttttgagaaaacgcaccactcttatcgaggcctccacgacgcgtttgcataaattgagacatgaacataataagaaatatcaggtcttgcattagcaaaataaattaaatacacaaccaatcctctataggtcaatggatcagagagaacgtcacttgtatccaaacccaaacgatggttttgttccattggagtatgaactagtttagaaccgactaagcctgtctccgctgcaaaatttaaggcatacttttttgtgtcaccatgataccttcttgacttcgagcaatctcaatttcaaaaaaatatatgagcttgcacaaaaatcacaccccctttagatggctataggttataattactaattaaagtcaatgctcaaaagttgtctctcactcctcataaagttgtcttggcctttctgattcctttaccgtttcttgttccacgttatatgcataatattgtaacacctaaattaaccacactagtacaaaatcataaacaaattcatatgacacataaaaataacgatatagctgttttcaaagccaaatcaatacaaaatgtcttctatttagtcttgaactgcttcgttgattagtttttacaagatcgtgagttcccatttggtgtagtctaccaattaactttttcttctcttcattcttcattttaaatatctatttgttcatgtataatttatttgtaatactatggatccgtgcagaaaattagcaacgtcttggtggttttcaaattatggctgagcaggaatgccccgttacaaacttacttctcctaggtcgtagcgaaaatggaaaaagcagcaccgggaacaccatcatcggtgaaaaatatttcgaagtaaatttgtttggaagagatatggaccagagatgtaagatgttcagagctttaatagaagatggcccaataatcaatgtgattgacactcctggtatatactccattaaaacttcatataaagtcttagttctaacattatatacaccaaactggcatttaaagtcatttgggaattgtttgtctaaaaatagtcctattacagctgtgattggcggataaaatacaccattgccaaaagaaaagttgaaatcattaaagtcagaatgtaacattgtacatgatacaggtttgctcgagtcatccgtgtcaggagactatctcagtaaggaaataatgaattgcttaactatggcggaagaaggaatacatgctgtattgtttgttctgtctataacgaatcgaatttcacagcgggaggagttcacatttaatacattgcagcagatatttgatgataaaatccttgactatttcattgtggtgttcactggtggtgatgagttggaagcagacaaccagaccttggacgattatttacgtgaaggttgccctgaatttttgacggtctgctagcattcgtttcgatcttagcatatatatattttttaaattagtgcaaccattaatatttctgtttttttttaacttggattaattacgaatttctagagagttctcaaactatgtggaggacgaaaggtcctgtttaacaacaagacaaaggataaaggcaagaggaataagcaacttaaccagcttctagcacatgtcacggatataagacagcaaaatggtgggataccgtatacagaaaatatgcaccgtaagatcaaggtaaaaaaaaaaatgtgtttgatatgtgcataaattgatcgtgtatgcttttcctttatatataagttatatcactaatttttgcacacaaatttttataactacacttcccatgtttaaattgtttatattaaaattgaacctcttcaccagctcctcaacggaagtaaaaacaattaatgatataattagtgaaacggtcatttccatctcatttaaacatatccttaagctttcatgttttcactaacaaactattttctagaaattgttactatttacatttttcactaacaaactattttctagaatttgttgtactacatacataataatggtaaatgttctcagtaaagtggacaaatctgaatcaaagcattaaattatatgttacttgaaccttccaatgagtaagcttctaggagaaggttgaaaaactggatagactttttttgaggggaagggtttgtgaaacagcccagtttaagaatttaaaatactcaaatgttaaactctaaactagaaaaatatcgtccaaatgaaaacattttttgattagaagtcgataaatagtttcaaaatgcctgaatgctagtaccattaaatgtgactttaaaacgaagatcatgtgggttcttttgctattcttcctttgtaacaaaacattcttcttgttgtaatatttaagctttcaaaattatgaaaagctcaaagcgtttaagatattgaaagctttggtgaaagttattggatgatatatatagaacctctggttcgatagattcaaattcattcactatgttatctattttatttctcaagtgtatgtctagtgtctttatattgtaattcatgttaaatatatcttgactcaatttcaatagatgtaatagaaacaacctatgtaaagatttaaatattgaaaatccttggtttttcaggaagagaatgataagctgcgggaacaagaaagtaatatagatgctaagaaacttgcagaagaagactcagcaatgatgaagcagaaattacgagtggatcatgatcaaaccatgaacatgatgattcaaccggtaaaactatacacataaaaaagctccatgctaatattgattacgtaatgcatgcagttaattcaatattgaattgttatcatgtatgtgaagattatgttaaaacaaagtacaacgacacatgaaagagagatgactcatatcgaagacacacaaaccatgaaaatgatggtacgtatggtaaacttgaattcataaactttgaaaacttgaatactatttttccaacattcaattaatttcttattctctggcttccatataggtggagaatgctttaaaacaaagtgctatggcacatgaaagagagatgagccagcttaaagacacactcctattgaaagacacacaaaccatgaacatggtgaaacaaatggttaattcgtgttcataaacttgtagacgtcaattcttattcttatctccatgattttttttagtatttatggttatatttcagatggagactgcattcaaagagaatgcgatggtacatgaaagagacatgtgtcaactaaaagacacactccagctgaaagacacacaaaccatcaacatgatgacgcaaatggtacattcttatttataacatttgttagtatgaatactttttcatttcacgcagttaatttagtattctttggttttatttctggtcaaaatgtgttaatacatgcagagtgcagaaacatatgaacgacagatgcgtcaaatgaaagacattattcaacagaaagacagactaaccatggaaatgatggaaaaaatggtaatttcatatagattttctgtaatcttgaaatgtttatctttcactggatactattaacttgatatattttggttatctttcagatggaaaatgcattaaaacagagtgaaatagcacatgaaagaggaatgcatcatcaatccccccgaaagggtaagacatgtggatgcaacattatgtgatgtcgccaactctattaataaatatcaagaacaaagtttctgtgtgattgattcaaaacttccagtatccatactttcattttgtgtgctatttttatataattctctacaactctctcatattgcaagaaacgaaggacatatttaacacatgtgcaaaacgtttttccaatattgtgtgtataaatgtagttatacattatttctcttaataaaggaggaagacatatggatgatggtaattttgtggtatattgtgtggtgagcctagtgtcacagacttttcttagaataccatgagactgtcgacactctccacaattgaccatcttcgactagttttaccctactttgggttcatcaggtgatcggctccaacaaaacagacttacccttgataacttagtagctatgttcgacatttataataataaactcgcaaaagtaaaagtgaaagaacggaacctaaatatattcatcacagtggcatatttagtcatgttcatcgtaaaccctaaaagtcaaatgtcaactctttcctcgttgcctttttaggctcttaaaacatgcagatgcatgagataagattaaattaaaaatttcatataatgcaacttgaaatacagattcgttttgtttgagaaaataatcggacttcacataatgcaacttgaacaaagtttttaaaatagggtctatagctatccagtagctagttttaacattcttacaatatatatgtaatttcctgaccgcccatgctagtgagcacctacgtcctttctcgggtccatgggtcctatcctgtctgacattcggtccgctacgtccaaaaggttttaaagacttggtttcagaccctacaaatcaatatatgatttttctttgtgttttttcctcacttacacagttccgacaatataatcgcaaaaaaatgattttcttttgaaaaagatgatttaatagtgccgaaacagttagtacaaatttacgaaatggtctatatatacatatttatgtttaaacttagttaacaacaaaaaaaattactttaataaaacagtagataaatatttttgcgaaataagaagatgaaataacagaacctaaatattcaatgcagattcattaagagccatgttccttcatgttcatcctaaacccttaaaagtcaaaaatcaaatgtcaaccctctcctcgtggccttctcagacacctaattgatatgccgatcaatatgtatgtgacgtagtgtttttagtgttttttaattgtttttaagattacaatagtgacatatccatataatgaatgcaattggaaagaaatattcattctttttctttgaaaataaaataatataatgcaacttaaacaaaaaaaactcatacaatgcaactgtcttttggccacgaaaagttctacatatggctagcccatgttccaagttagtttaataactaaatatattactcaattggaaacaaagtaggagcttattgacatttctcgagcagctatttaattgataaataaatttctttgtatttaaacaatagctcttagtaaatactgattacatactttttcgataaattactggtgtttcggacttttggtacataatctcgttcattatccggagctaccctttagtccattcctatttaatgaatgcttctccgtcgcaaagaggaattgaacccagacaaaaaaaaccaactcccttgtactactactaggccaccagccttttggtatccattacatacgaaatagatagacatagatatagattttaagggagattaagaacacaagtataaagaatatctctctttattagtttatgaaaattctctcaaaacctaaactctcaatctctcttaaaacccataagttgtatcacaccttgatacctccttatataataagcttttaaccttatcctaattattagataactcctaataatataagataactcctaacaatatattctagattatctcctagaataataaaagcttaatttccttatctcttttgtacaaagctcgccttgttgccaaagggtatgtacaacaatatggagtggactttgaagaagtttttgcaccagtggcaagaattgaaaccatacggttactcattaacctcgcagcttcacatggatgggaaatacaccacctagacgtcaaaacagctttccttcacggagaactaaaagaaacggtctatgtgtatcaacctgaaggtttcgaaagaaagggaagtgaagacaaagtgtacaaactcaacaaagccttatatggcttacgacaagcaccaagagcttggaacaataagctgaatcatatccttgtggaactgcagtttttaaaatgctctaaggaaccgtctgtctatcgtaaagaagtgagcaaggatcttcttctcattgctatatatgttgacgatttgtttgttacagggacaaatctagacatcatcaacaagttcaaagaggagatgtcttctaaatttgaaatgagtaaccttggaaagctaacatactaccttggaatagaagtcattcaacacaaagatggtatagctttaaatcaaaatcggtatgctctcaagatcttagaagaagctggtatgatagattgtaatcgtgttcatacaccaatggagatgggcttgaaattttcaaaagcagaggaagaagaggaagttgatgccactgcgtatagaaagaatgtgggttgtttaaggtatctccttcacactagaccagacttatcatattgtgtgggagttctaagcaggtacatgcaaagtccgagagtctcccatgcggctgcaatgaaacagtgtctaaggtacttgaagggaactacatcacttggtctaatctttaagcgatgtgagaagataccaaagttagtagggtacagcgatagcagccacaatgttgatccggatgatggtagaagtactgcaggacatgtgttttatcttggagaaagtccaataacatggtgctcgtcgaaacaagatgttgtggctctgtcatcgtgtgaagctgagtttatggcagggactgaagcggcaaaacaagctatttggcttcaagaactactaagtgagatcaccggaacagtgtgtggaaaggttactatactcattgacaacaaatcggctatagctctcaccaagaatcctgtttttcatggaagaagcaaacacattcataggagatatcatttcataagagagtgtgtagagaccggacaaattgaagtcgagcatgttccggggaatgagcaaaaggcggacattttgaccaaggctcttggaaggattaagttcaaagagatgagggatcttgtgggagttcaagatgtggtgaaagaagatttcaagcttaaaggggaaaatgttgggataagcttgaaagagaagaagtgacttgaagagcaagttactaaagagataaggaaattaagcttttattattctaggagataatctagaatatattgttaggagttatcttatattattaggagttatctaataattaggataaggttaaaagcttattatataaggaggtatcaaggtgtgatacaacttatgggttttaagagagattgagagtttaggttttgagagaattttcctaaactaataaagagagatattctttatacttgtgttcttaatctcccttaaaatctatatttggtatcagagcaaaatcaaaagtgttttgagatcataaaaaccctaaaaacaaaacgatgtctgaagttgctgttacgatcgagaaaccgaaagaaggaggagcatctacatctattcaatgtccaatactcaacacaacaaactacacggtatgggctatgaagatgaaggtggctcttaaggtacacaaaacgtgggatgtcattgaaacaggagcgaacgatcccgagaagaatgatatggccatgcatctacttttccaagcaataccagagtctatggtgctgcaaattggagagttagatacagcgaagaaagtatgggaagcaatcaaagaaaagaacgttggagcagagagagtaaaagaagcaaggttacaaaccttaatgaatgagttcgaccgcctcaagatgaaagactcagagaatattgaagctttctccgggaggttggctgagatagcatcaaagtctgctgccttaggagaaaatattgaaacagagaaacttgtcaaaaagtttcttaagagtctcccacgcaagaaatacatacaaatagtggcttctcttgaacaagttttggatttgaagaatacaagctttgaagacattgttggacggattaaggtttatgaagaaagagtatgggatgaagaagatgagactcaagatgatcaaagcaagttgatgtatgctagttcagattcaaaccgagattatcatggtagcagaggacgtggtggcagaggaaactacagaggaagaggtcgtggaagatatggttcaagagatctttcacaagtaatatgtttccgttgtgataaaatgggtcactatgcatctcaatgtccagatcgtcttcttaagttgcaggaaacacaagaaaacgatgctaaaagtacaaaagatgcagatgaactcatgatgaatgagatcgtttacctgaatgagaaacattgtgtgcctagcaaaatcgaaacatgtggtgatgatctttggtatcttgataatggagctagcaaccatatgactggagataggagatatttcaataaacttgatgcttcagtcactggaaaggtgagatttggagatgattctcggatagatattaaaggaaaaggcacaattgctttcactgatatgaatggaacatcgagaatcatgaatgatgtttatttcatacccgatttgaaatccaatatcattagccttgggcaagctacagagtcggggtgtgacatacgcttaaaaggaaactacttgacaatgtttgataaagatggtaagctacttgtgaaagctgagaaatccaaaaacaggctatataaagttcagatggggctaagaaacagagaatgcttgtatctaacaagcgttagtgaagcaagtctatggcatgcgaggatgggtcatatgaactctgcaactttaaaacccataagttgtatcacaccttgatacctccttatataataagcttttaaccttatcctaattattagataactcctaataatataagataactcctaacaatatattctagattatctcctagaataataaaagcttaatttccttatctctttagtaacttgctcttcaagtcacttcttctctttcaagcttatcccaacaatagacatagacatagacataaacatagcgataaacatttggataaataaaaattttagggacaatgtctaccatttgttacctatatattttgagaaaaatatgataaagaacatctacatatatatttttgtagtcattttagcaaataaatcttgtatttgaatttatttacaatgtcatgccattaatattaattattaataaataaaaatgtttaatcaaaaatgtaaatcaaaataggtttggcaaaaattctggacacatctttcctactattgcggcaatgatcatttagaaatctaatattattaattaatttcaaataaactatcacattatcaaataatcgtgcaaggtttgatattatggtcatattttgtattatttgtttggtttgctttattttgtattattttcacataaagaaaaataagttaaggtggtcatgtttcattttcctgaatattatctactgggttttgtgatatcgagtaaaaattaccattttacgttcatttcgattttaatgtttctatgttggcaatgtcaattagttttgaaaaaatattcaatggattaacccaaaaattttaatgatatcaatctagagttatatgatgggatgggtttggattgatattattacaaaatttataatatcattaacccaaagttataacacagtttaaatctaattttaatattttatcagcatcaatttcttttttttccagcactaatataaaattattaagtttaatactaaataaaaattttgtaaaatctaatatttatcatatatactaattaaaaaaattgtccgtcgtaccacatgttaaatcctaaaatagagtaattatacactaaataatatctatatatatatatatataaggtttgtacattgagaaaaatacaaacaatagataatataataatattaatcaattaagcaaattacagtttgattttttctaaaaaatatagctctgcggtacaccggaggttaaaatctaatgtgacgtatttctataataaaatataatttatattttaaatatatataaattatgagatttacaacaatgtatttctaacattacgattaaacaatgttcaagaatgtttttaggcactaaacggatgatagctaattcataacgcctaaaatgcttaacggggtccaacaaaaatattacgattttccaaaatcccggtgattaaaggtggtttaggttggcaatgcttaaaatttacaataaaaaaatataagatttaattatatttttaataatgaatttcagaagttctatttaagcatgaaaactagcgtcgtcgattaattacttcagtcgtctagcatcagccaaaaattgacgatagcaccctaaacactttcctctttaaaatcaagtttgtccttttctcaccatttttttctttctcttttgttgttgtaactttgcatctattaatttttatggtttaactatttctgtactcgagttcagaagttgcctaaaatttattatagatctgttagtatcacatatgctataattaacgaaacttgtttctttttctcagatggtgaaaaatattaaaatagctgcggaggcacaagagaagttctttgatgaaagagaacaagctcgtgagaatgaaaaacatgaaatgaagaataacgtggatgagttgaaaagacgtatgcatgaagaaaatctgcaggaatgccgcattctctaatcaatcattgacaaacatcttttatattcacaagctttcgggctttttctgagtgttatgagtctgcttttgcttatgttttgaattccatctattttatttcccttaaatgatttggtgagtctacttacacagctcatatgcttcttgtttgcactatgtataagtgcatatgagctttgtaaggagacgcattttgtttgacatttaattaaaaagagtcgagaaagagttttattctcaaatcccttgttttgctttttgacttggaattttaaaaatatttcaagaggttcatcgtagtccgatgattcatagaatcaacggcttaattggagctttctattttggctcttgttaggtattctggtatcagagtgttgggaaatcaatcctgcaagttaaggaaaccttataagttcatcatgtagtttcattatacaatttttttttctttctctgtgtctttatcgaaagtagtaggccaagccttgatgtgtctatatatcaaagtactaaataaatgaaaatattaggcctgagcacaatacccaaaccgaaagaaccacacagaacccgacccgaaaacccaaacctgttctacttcggttcttgtaaaatatccgatcggggtttgttctcaagtaacttcaggtatcgggtatcacccaaaccgaatctgatccccgtaagtacttattattacccgaacatataaatacataagaaaacatatatacactaataactttagtttgtgacttgtttaattattggattatgcaacaagctcaaaacaagctt

SEQ ID NO: 1165 - DNA, 125632 bp, Arabidopsis thaliana
gaattcaacaaaacagtagctagtattgtcgatgaacttatattgtcttatgagcagagatttttgtttggacacctgaagatgtcacatcggagaaagaagtcacataatgccaaagtttaccagccatagtcactacctctgctattaaagctggaggtatagatttacaagcaaaccccggtgccacattaaacacagcaaaactcgtgagtgacactgcaccaagtctttgaagctctatgcagtatatatccctagaatttcttggtgatggatgaaatgtattgatgaaatgcttgcagccatgcgccaaggagatctttaattgacctctccaccaacggacgccgagaagatatcatacataaacccctaattactacatctactaaaagcatcgacacaaacaaatctgatctaacttctgagctctttctcaccggccggagagaaacaccggttcaaggttattatcaatcgactctttcacagcatcaacaagcaactgcgtattccggctaaacctcatccaaaacccatccggtttagctcctctgtttttgatttctccaaccaaccgagcaaattccataaccatacacgcctcttgtgaaagctcagtcattactttatgttcactaacacaacctccaccacttgtagtaaacacagcctcggtttccatatacggtataacaaaatcatgaacacgaagactacctttcgtaccgatcgcagttatctccatcgtcaaattcgccaagaaagaacagtaaatcgttgcattgaccccatcttcccaatcaaacaacgcaccacaagaaagaacaatccccgcatcgtttaaaacagaaccggacaaagcagtaacggtcttcggaagtttaaagttgttaacaagaagaatcgcttggatcgtataccatccagcatcaccgagagctccaagtccatcaagaccaggctttacacgaatatcatgttttaagaaatcatcactcgcagcaaatgagaaacaactatacacctgcataagcataagaccatcgttctatactcaaaatttcaataaacatgattaagttactaatttaagtacttaaacacttacagatttaatctgaccaaaactctctaaatcattcacaaattctttaatcttatccgttctagggctatgcatccactgagttccatccataaattgaacaccattaacctcacaagcttcaacgatctgatcaaactcagctacgtttaaagcaacaggcttatcaaggagtatatgtttacccttaatagcggcgagtgtagcccactcgacgtggaggcgagtggggatagggaaatagacggcgtcgacgtcgggatcttctagaagtgactcgtaggagctgtggagttttgtattcggagggaaattgttggatttagcaaatgattttgcttcttcgatggagcttgtggtggctatggcggatatagtagcgtttggagagagatttatagctcgagagagtttgcggactttgtttgtgcagcttaagagtccgattcggatctggttatcaccggacattagctcgattttttcgacggtaacagaaaggagagagtaaagaagaagaagacttggtcacttaatttcctctttagtgttttcaatttttagtaaattttaagatgttgatattaagccttctgttttgggaataatttgtatagttaattgttgaaatatgtttgttactaaatctgccattattgaccacatttagtgttcttggaattttcaaagagagcgcaataacaagttgtttcaatttatattaatgtaaaaaagaagaaaaaacagatttttttccttacttatataaaatagaaaacaatcagatccgtaacaaacacctaataattcatttttttaactcgctaaacattatccgatgctaaaaatttcacataatttaattttaggggtcgacaccaacggaatattcaaaattgtaatattatttgttatccgatttgttttatccgaataattagtgttctgatttatatttgtttcgaaagtaaccgaatttttggatattctttaaaatctgaactatttgtcaaatattcaatttgttatgtatatattaaaaaataattataaaaattaataaaaattataaaaatcaaaaatttaatcccaaataaataatgattcactaaaaaaatatttaaataattaatttaatgaacataaactgagtgtgatatattcgaaggtgacaatagaagtgtggcagagtgtgtcaatggcaaagcccgaagttttgagttacacaacttgataagggagattcaatactggcagaagaaatttttcgaagccgaagtcacatgggtgcctagaacgtgtaataaagttgctgattgtttagtgaagactccattcccaaataatacttctttttctcttttctctttggttccattttttattgtataattcatccatgaggattacacttcatcactataataaagcctaaagtttgaagttaaaaaaaacaaaaaaaaaactgataaaacttacataaaaagtgttaaattattaatatatatgtatgtaattatctatatatatatatatatatatgttttgtgtataatagatcgaaacagatatccacttatttaaattttagtattagttatttgtttcacttttaacaaattttttattttttaatttgctttgtaaaactatagatatcccgatttttcgaattgaatcgaaccaaataacggatccgatcgaatcaaactaatattttgcccagccatacgacttatattgtagtcggcaactagtaacttcattaaagaatggcggcgcaaccgcctcagcgatcaataacagaggacgggtgatagataaaggtttaagctttctcttggaagctgccatgagtagaacagaggaaacttcggttggttgcgtcgtcggtatctgctctctagtttctcaagcttgcagattcctacggatcatactctctttcctcagtggcaacagttccacaaatcgggataacaatcaccgtcaacacgacacagatcaccggagctcagcctaaagtatctacaacttcaacagagatgaatacacgagtttgcttcacgattcacagtacctcttcaagatcatgctttgatgaaaccaaaaccagacagtctactttgtgaatattgaaacccagaagatatgcagaaaaaaaaacaaggacaatcgagaaggaaaagaaactcctttatcacgaattattgtactttactctttcaaactctgtacatattcaaagtttcatatattatagataggtcaataatcccatgaacactaatgtggatcatggtttcttcttctaacttaccagtagttaagagttcaagagaaccaccactagtctttcaagagaagacttctacctgagactcgaactgtggctaccaacacccagaagatggcacacaaagcacccacgattgataatagaagaaaacctctgtttctaatacccttctttgctatggtagtactcactggcgttccattagcctttccattgaacctcatacggctgaagctagacatacgtacaaaggttcggttaaggggaccctcacacgcagaggctggcgttgaaggtattgagtccattaatgcccacaaagccgatgagaactggcttgttgttccaccaccattttggatttcatggccttgggcattcacactcatagtaggattggtggaatcaggcatcacacctaagcaaatgaggattattcacaatgtatcagtggaaaggcttaggcttaaattcttacgttttaagagattaacaagggggtttgataatcgaggaataacaacagccccagtatcatatatatacatgtcttggtttaagtcaaagacaaacgcagaaaagaaaatcgtgcatagtggaaatagcttagcagacatcaaaaggtgaatgctccaagacaagcatgagtctaagtacctgatgagggtgaagcaaatgctccagaaaaggattgttgttgatcaaatagaatggcctgatcatcctcgaaccaaatatcgctagtgatttgattgagagttgtactaggatccatgatgttgttcagctggttctcgggagtctggtcctggaactgttgataaaggagttgctgtttttggtctgatgtgtagttagcagaatcactcagagaagacagatttgcagaagttccctgatcaataggttccatatccaaagacatggaaacgtcatggaacaattggtcaaactcattaaaatcgtcgaattcaccatggttcgagaactgtgcggctttctcagttgaagaagctccgaattcagggatcagaagaagatcatccatttcaatgaaatcttccttctcaaacaccagaggagctgaggtgacctcagcggtctctaatgagtcaaaacttgagggcctgttgtattgctgaccgtttggcaagaactctctagcagaattattcaccaacgtactctgcagctcttcttcactattcacctgcaagtacaatcatcaaattagtgagcaaatcacaaggaaaaaaacatgtgcaataaggcctaatccaatagatagatattaaaaccatctttcctcatttaaagagagaactaactgacctgaggaatacatctttgaggaacaccaggtgcattagggattccattgagaagctcatcgatatcctctaactgaagaataacaggattaaaaagtctcctctcatccacacgacgagcatcctcataacgaaccacaggttgctctggcacagctacagcaatagcattcacatcttcattatcatcatcaacccattcctcttcttgaaacggagcaccatactgttcaccattcttaggaccagccccacttttcttgaacaacttataaagagcatagtactcctgagggttcttacatctccctagttcatcttcatccatcgtatactcatgcatcacccaatcagtccgctcaccactaggagcccggcctctatagaaaacaagagtctttttaagtcccaccgatctagaattatactcaatgactcgatccttccctgtagccttccaatacccattttcagttcctctattagacctagctgcgtttggatacttcctactccttggagtgaaatagaaccactgtctatctcccgtcttcaacattgattgacctgtatcaatcgaaatacacaaaatgaaatcagttccagtataatgataacgaatttgatgtagtcatcaacaaccaaaactatatgatcaagaaacaatacaaatctaaacaaagcttaagctaatttgtaaacgagagacgaaatttaccaggcaattcctcaggatccattttgtaaacatcaacaacaccgataacattaactctaagcctcttcctacaaatcttcctcttcaaataatacatcacaagctcttcatcagttggatgaaatcgaaaccctggagcactaaatttgcctcctttgaaacacgaatcgggtgaagaatccgccatctacgtaacaaatcaaaaccgatccctcaaaaaaaatttgaaaatccccagcgacgaaaaaaaactgatcgggtcaacgagggagaaaaatctctctctcagaaaaactcagatctcttctctcttcgtcactcaagatccagaagagaagatgaatcaaacctacatgacagtgagaccaaccgccgggaatctgaacgaattgatacacctagggtttgatcggcgagagagagagataacgaaaatggaaattaacgagaaatgagactttgtgtagattgaggtgattttttggttggctatttgatggtctcagctttttctgctacttagtttgtgagaacctactgggctcgaaatatactagctcaggcccattaattcgacaggcccattattgttatttttttccaacattcttgtctgacacgacagaggttcaaaaattctgcttaatatgataagtgcaagcaaaatttcaaagccatcagagaatccaggaaaaaagaaatcttttgttaagaattaaactctttcaaactctatacataatcaaagatgtggatcaggctaacttatgctgaatcaagattcaagagtctaggtcacgacaagagaggtcttcccataactccaacggtggctttgaacacccagaagatagcacacaaagcacccataattgataacagaagaaaacctctgttactgatacgcttctttgctacagtgacttttctactagtcactgacgttccattgaacctgatgcggctgaagctagacatacgcacaaaggtctggttaagaggaccctcacaggcagaggctggtgttgatggtattgattccaataattcccacagagctgatgagaactggctccttgttccaccaccattttgtccttccttgtattggggatttacactcatagtgggattcatagactcaggcatcacacctaagtaagttggtattcacaaagtatcagtaaaaaaggccctaggttattatgtttcaagatcttaacaagagggtttgatatcaacaaaaagaaaacagagtataatatatacatgtcttggttaaattcaaaaactaatgcttcgtgggaaatataacttggcagacaacataagggaatgctctgagatgagggtgagtttaaagactttttaagtacctgttgactgtgaagtgaatgctccagaagaagattgtggtggttgaacatagagagcagcctgatcatctttaaaccacatattgtcagtgaactgattaagagtggtactaggatgcatgtagttattaagctggttctcaggtgtctggtactggaactgttcataaagtaattgctgtctttggcctgatgtgttattagtaaaattactcagacaagacagatctgtagaagttccctgaaaaacagatatgtcattgaacaattggtcgtattcattaacatcaccaaattcaccatggttcaagaactctgtggatttctctgttgaagaagcaccgagctcagggatcagaagatcattcatttcaatgtactcctccttctcattatctagaagaggtgccataccagaggtagcctcaaatgaattcaaatgggactgaaaactcgagtccctgttgtatagctggccatttggcaagaacattccattcgtccgagggtcaatatactctccagaagaattattcagcaatgtgctctgtatcacttctgcactattaccctgcaaatacaagtatctatttagtgaaggaagcacaacagaataaccaaaggacccaaaaaagaaagaaagcataagccaatatgttattagagaagaaactaacctgtggaacaccaacaaactcatcaaactgtctttggttaaccccgggtgcatctgggatttcattgagaagcttctcaatatcctctaactgaagtttgacaggattgcaaaatttagtatcatccacacaaggaccattctcataacggaccacgggataatccggtacagcgacactatctgcatcttcactatcactatcaacccattcttcttcttggaacggagcaccatactgttcaccattcttaggaccagccccactcttcttataaagcttataaagagcataatactcctgaaggtaagacagattagttaaactacaaataaatcaaaaagagaaacagatgagttttggctataatactaaccttagcgttcttacatctccctagctcttcttcatccatagtgtactcatgcatcacccagtcagttctctcaccattaggagcacgacctctatagaaaacaagagtcttcttgagtccaacagatcttgaattgtactcaatgactcgatcctttcctgtcgccttccaataaccagttgcagtacctctacttgacctagctgcgttaggatacttcctattccttggagtgaaaaagaaccactgtctatctcccgtcttcaacatcgatagacctgttacattcaccgtgttagaaaaccaattccaacataaatttgatacttgcataacaaataaacaaattggaaacctaaacattgtgaaaatgaaatcatatgagcataaatgaggatcgatacgaattaaatagtgaataaagacgtttccttgtcatatactcaacaaatcatcaacaaccaaaacttttccttgtcatatactcaactacatcattaataacctaaactaattgatcacgatacgtagagaaaacatgaatcaaaatcgataagaaggtgttgaaaattaccaggcaattcagaaggatcgactttgtaaacatcaacgacaccaatggcattgactcgaagttttttacaacagatcttcctcttaagataataaaccacaagctcttcatcagtagggtgaaatcgaaaacctggagcactaaacttaccagctttgaaacacgaatcacgagaagaatcaaccatctcgatcggggtcaacgagaagtaaaccctttgaaacagaacacacaacctaaaaccctctttctctcttcgcctcttagtggagacaacaagatcaaacttacataacagtggaagaaattctagggttttttgatcggcggtagatagattttggatagagtcaaaaaaatgattttgtttgtgattatatgtgtcagcttttttctgactaacgaagtttccgagaatcttactgggcttttggaattacacgcccaaaggggccaaactgataaattttaatattcgttaatttgttgttgttacaaaggaactaaatgttgaatccaccactcactactatttttcaaacttacaataaaataatcgtataaaatcaaataaaataaattttgtagagtaaaaacttgtacaatataaatttgtagcatcaattcacttcaataaattttatgtgactgattacattttgtaagataacataatttactattacattattcataataacttaataatatttgatatattagttagtatttgataaaggtattgaaagtatataaatagtgcttagaagttatgaaagtcttaatattattgtagaaagtaacatatttttcattataagatttttttttttttttttacaattgttaatatattttccaaccgaaaaaattaaaaaatcccataatagagtgcaattcttgcagctcccatgaagagagtgaataatccaaagacgggaagagtaagctttgaagacgagatagctatataggaccgaatatcggcaaacgatctattcgattaatggaatgaacaacctatgcatatagaactttattcttattctaaacaaaaactaggagacaaacaaaaaaggacaaaaattacaagacatctaaacctaaatgtggcaaaaacatatggatttatttagttatgaagactcacaaatctataagatcaaggatgagaaaaaagaaaaatcgacatgtgaatcaacgttctctatgcagttgtagaagatgttttaattttcacctcttgtcatgtggaaaattctcgaaaaatccatgaagaactcgttcaattctccagagagcttttgtgagggattctgatcactggtaaacaacattagagaaggattcatcccaaaatgaggagttattcgacaactagtaataagcatccaagcaaacacgctaaaaaaaaattaatcttaattacaaacaatggaaaacaaaaagagaaataaacaacatcgtcgaaatcaaaagattctggacactaagaactaattaaaacaatagagaaattatcagattaagccaaaaagatagtagcatgaacaaagatagaatatatatagttatagatatatattaattcaatagaatcaatatttacgaggtttccactttccatctaatcgagtcaaaattaataataacctataaccctaattactttttgtaaaactcattaaacaactgttgggcttctttgaccgtggagttttagtaggttcttaatttcccaaaatacattaatttcttgcgtgtaatatggtagctttattatgtatatcttttggtgacttaataaggtcttaattctctataaatacatgcttattgtatacatcaactacacatcaaattaaaaaattactctgtgattggtagccggatctagagaaaaatagtctgcctggtattttaatccctaatttaaattttttcactcaaatcatatacgatttttaaaatagtttaatagtttgtagtaatttcttctcatttgtgatggaaagatataattttctattacaaaaattactttttatcttttatcctgtcaataagtgtactcttaacaaaaaaaaagattttgatgattttcttgctttatgattcacagaatatcgatctttgcaataagagctcatggaaaataatggagaaatgaatgcacagcctgaattatcaggcataagtaaagatttttttttatatatattttgtctgaacttattttatatattaaatatgaaacaaccatatattttgtttcgttttactagttgatataaccaagacttatatgtatgagaaattatggaacatatgtgctggacctttgtgtgttcttccgaaacctggagaaaaagtttattactttcctcaagggcacatcgagctcgtgagtctatatatatttcttttgttttgcttctcgatttggtttttgaaacattttgatggcacttttcagattgagaattctacaagagatgaattggatcatatcaggccaatttttgatcttccatctaagcttcgatgtcgtgttgtggctattgatcgtaaggtatgtctttaaatgttcaagagttaacacataagttacaatttattattttgcatgctttatttcactgtagaaagatctaattttgttgcttgctttatgtttattataggtagacaaaaatacagatgaagtctatgctcagatttcgttaatgcctgatacaacagtgagtgaccgcaacaatgctaacttcaaaattaattctaatgtttctcaattgtttcaaattttcttcaattttcacttaactaatttttttaaattgtaaatctttaggaagttatgacccataatactactatggatactcgaagaccaatagtttatttttttagtaaaattttaacggcgtctgacgtcagtttaagtggtggattaattattcccaaacaatatgccattgagtgttttcctccgctggtaattctgcttagtttatctattgaataaactcgaatttgagtttcagtattacattttctattcgatttgtttctctaggatatgtcccaaccaatatccacacaaaatcttgttgcaaaggatctctatggtcaagaatggagtttcaaacatgtctttagaggtatttaatatttttcttcacccgataatattgtaattagtaactatggatcttctttttgcatgtaggtacaccgcagagacatatgtttactagcggcggcggctggagcgtatttgcaacaacaaaaagattgattgttggggatatatttgtactccttaggtatgtttttgtctttttacatctcttctctttttttggatattagaatttaaactattttcttgttttttcagaggagagaatggggagttacgatttggtattaggcgagcaaagcatcaacaaggccacataccttcatcagtaatatcagcaaattgtatgcaacatggagtaatagcttcagtagtgaatgcttttaaaaccaaatgcatgttcaatgtggtttataagccaaggtgattcagaatagtacttaatttacattttacagtctgccaatatatcatgatattagcttcttcaaccaaatgtatgtttacattttgttttttcatataatattagttcaagtcaatttgttataagctatgacaaatttgttgatgcaatgaacaataattacattgttggttcgagatttaggatgcagtttgagggtaaggatttttctgaaaaaaggtaaaaaatttaatcaaaactttttttctctatttccaaaatttgttatttgcataacacattttgttttatttactaagatacgatgggacgattattggtgtaaatgacatgtctcctcattggaaggattcagaatggcgaagcctaaaagtaatataatcttcatactttcatgacatctttcaaaatacatttttgagtgtaataaataacatatgactaatcaactatgtttttgtaggtgcaatgggacgagctttcaccatttctaagacctaatcaggtttcaccttgggacatcgagcatctaattccttcgtcagatatctctcaatcaagtttgaaaaagaaaaaacattggcttcaattgaatgaaattggtaaaaggaaacatgcttataatcattggtttgataagtttatgcttcctcatgaaaatatctttctcattctagatattttcatatataggtgcaacattatcgaatctttggacatgccaagaaattggacaacggagcatgaattctcctataagtgttcctgagtttagttatcccaatgcaattgaagattcaaagtttctttctggtttgctactgaatcactcactcctagccatacctaatgaaaactataacagcgaccaaatgattcaaccaaggaaagaagatataacaactgaagcaaccactagttgcctcttgtttggagttgatctgaccaaagtatcaaagagcaaagattccatctgtccaattgaatcatgcaaaaaatcagaaatttcaaaactcaaaaatcaaaaagcaaccactagttgcctcaagataaaaagtttgaccaaacccaacctctgagatcaccaaaagaggtccaaagcacggaattcaattttactagaagtcgtattaaagtaagcataaaatcattatatctgtaacatatgactttttttttaaaatgtgaaactagtgcattcaagcaagcattcgccgaaaaaaatatattttaagaaattttgataagaaacatacatattaggtaacttagtatttttagatatcaaatatatatttgataagaaaatttcgtaaagctttcacatgattttgatgtggtatgttctaacaggttcatatgcaaggtgtagccataagtagagctgtggatttaactgctatgcatggatacaatcagctgatacaaaaactggaagaactctttgatctcaaagacgagttacgaactcgcaatcaatgggaaatagtttttacaaacaatgaaggagctgagatgcttgtcggggatgatccatggccgtatgttttctttctctttctatatattgaaacccatgttaaaatattgagaaaatgtcattttgaaaattgtgtgcatccagtgagttctgcaatatggcgaaaagaatattcatatgctcaaaagaggagataaagaaaatgaagttgaagaacaaattctttcaacctgaatcaaaagctttaacatcttcagacgtaccaccaaacgtcacagataactaacctttcttataaagataagagagctgaaaattggaagagagggttttgttttaaaatttcgtaagcaaaaaaaaaaacagttttttgttccgtgatgtagtaaagggtaagagaatgaacccatgtttttatgttgtttttgtcgacagtgatgttgtttgagtctgtaatatttatgtcttcatcgtttctaaatgaaaaattgtccttgttatcgtcgtattatctgcttatcgttgctactactaatgatttgagtatatacatcttactctaactattgtagtgtacttaaaaaaagagaaatctttgaaatacattttaaaattgccaccctcttaattttgtaacgttaccaaaaatctctgcaagagcaagaaccatctttgaacctatgaaaccgaactcgatccctaacaatgatctctctcttataaatcttagaaatatgtttgaaaacaacgtgacagtccccacaaattctcaggttgtttataactctcaccggactctcctcgtccgcaccatccatcatcatcagtccgtaggccaccgccaatttctcgctgtgatagcacaaagcgttctctttctcttcctctcctatgtcgtgcaacacaagtcctgtctgcgccacgtaaccatcctctcttatcttgaacctatcctcatcaaccaaaataacaagaaagcagtaaatcaaaagcattaaaattcaccaatctcagctcttagaacttgttctgtacctgatctcatcgatcttctcataaatctctctccactgttcatggctcttgtcactgttgtagaattcatgaatcgttcctttggcttctatgtagctaagacctggaattttcttcacttgtttgctttccatatcatctctcactcgtcctacatctttccaccgtccctgcgcagcataaacattcgatagcaacacaaaatcaccatcattgttaactcccatttcctttatttccctagaagcaatctcagccatttcaacatcactataaatctccgaagctccaagaaggctctgccacaaaacaggatccggaatcatcgacattgaacatatgatatcgtgagcttctctcaaccttcctgcacggcttaacagatcaaccacacaaccatagtgcttcatgttacgctcaacgcccttacaagccatattattgaatacagacaaaccatactccactaaccccgcatgtctacacgcagttaaagcagctaagtacgagacatcatcaggcttaataccattatcctccaacttgtcaaaaatctccaacgctctatgtgcttctccatgcactgcaaaccctgtaatcatagtgttccatgtaacaacactcttcttaccagtgaattgttcaaacacttgataagctttatcaacaaacccgcatttcgaatacatatcaatagccgcgttactaacaatcacattatcgttactgtatccatggaagatattttcaccttccttaacatcacccaaatgagaacaagctcctaaagcagcaacaacagttacttcacttcttctaattccttccgtttccattctcttatacaactccatcgcctcactcgctcgattaccagacactaaccccgcgatcaacgcgttccacgacgcaacatctctcacaggcatttcatcgaacaacttatacgcactaattaaatctccgtttttagagtaagcatcaagcaacgtagtacaaagaagcgaatcagcggataatccccgacggttaatctgacaatgaagttgatccatagcggaagaacaaagcgcacgtgcacaagctttaagagtaaaagaacaagtcaaagcatcgactctacatatagccgacgatgacgaagattgctgcaacatggaacgataccatgaaaacgcaagtgaaggatgagaacttccggcgaatccgcggatgattgcgttccaatcattggttaaaggtttagggatgtaccggaaaatttgtacggcgaaggaaaggtctccgaatggtgagattgcgcagcgttcgagaagacgagaacggagaaaggaagattggaaatggccggcggtgaggaagtgagattggagttgtttgatttgggagaagctgacgcatttttgtatcatcgtctccatgtaaacacgagccattccattgacggggctgcaccaaattaaaccgggctcacgaatcagttggtataagggattgcttgatcggttttgtttttttttaaaccgaaatcaaaccaaaaatgaatcagttttcatggccattcatgtttcttaacattcttgacaacacatatttaacgttaagggaaatttttcactggtcatataaatcacacctaatttacctttatagtttattatcaatttactagaacaaccataatggaagtgtgggcttagacgtaagttcccaacagtattgactattgatcaactgaccccaatggaatttttaaaaatagcttaactttttattaaaaatattaaattgacccatcccaaaaagataatcgacccatgtactatttttaagttacaagattacaagtgaaagtctaattaatatttatagtgttcttaatacttatacataatattttaaaatttattttaagtaagtataccataattaggtccattaatatgaatttaacctaatatatttacatttatttttagttagtctaacactgatttagcttctttctatgttccagattagtttatatcatgtacttatatattaatttttgaatataaaaatttattaactaatttgaatctaatattcacgagttgtatgatgatttagttttaactatgatggatagttattctggttccactactgtgtttcggtcgcaacaaattttaactgaagaaatatcatgagtgaactcattgaattttgtgtataagtcacgctcgtcaacactcgaataaagatctcctacatatagtgtaagcttttcaaattcgttctctgaagttcacatagttgaaaataggtcttcattctctaataacttttattcggtgagagcaaaataattctattgttgtactatatatatggtcttgaagtcatataaaaagttagttccttactaggattaggtttttatattttctactaggactatattaataatttccaaaatcaaacagaaaaagagttaaagataagctttaactattacgataagcataaagagataataaaggttatcttactatcacactcagtgccagtttaagtacaagggcggatagtgcaatcgttctatatttgagcacatttttttttgtatatataaagagagttcaaattttgaaaatcccttaaattaaaggtaataaaaaaatggtacttttgcaaatccccaaattaaaaggaaataaatcatgagttaaaaattttagattaataatcaatccttatatagtaaaacatctataaattaaaataatatatctataaattaataatgttaggacaattatattctattaatttataatgatattaatttttatatttattacttctctgttcatcatttgttgattttctattaaaaaaaaaagttgtttctaaaatattgattttctaggttttctatgcaatatttattagttattattgatgaattgtaaacttcaaaaaagaaaattgaatatcattggtttagaattataaaaaattgtaaatacatttataatcaatttttaatatatgtattttgctaaaaaaaatcaatcaatacggaacataggaagtattttatagcataaataaatattaattaatctataaagagatttgatttaattgttaaatttctagacaaatatgaaactgagataattttatctaattagtgttttagatattaatttgtttttagttttggatttacaatttagaaaagctctttccgcaataaattacaaagactctagatgcattaacttattcaaacgatatacacaaattcttattttaattattccaaaatgaaaaactcacataaaattttggttatttttataatcaaaagttatagagtatatcctacaacactcaagtttaaaagcaaaaaaaaaaatttgtttcatacaatataagttagagagaccagctctaacagaaatttaatttcttagagaaatattaaaaccatatattagtatattattactgtatatgtaatcaatgcaaacaatcaactgctacaaacaacagactcaaagcctctctattcttttgatggtcgccgagattgcccccttacactacacatgccaaagtttcttctttccttggtttcagtttcgcagttcgttcttcatacgacgctgcaagaaaaagaaaaaagcaagaggatcatgtatttgagatttcaatatttgcatatgtacattttacagtgagatttcgaagaagacttacgctcagttggtcgagataacaggggaacgtgttctgcccttttcttctttttttctacgccattgcatgagctttcctctgttgaaactgaaattttattttgagttgattctctctttcatagaagtcatcttactactatttagtatttacagtaaagggtaaaggaaatactgatgtatcgtaccattgttgcttagaggtaaacagtttcggagagcctcctgataaattacagactctaattggtatgtcaatgattcattcttgaaatgagaccgcagtgactctgcagcacctttaggcatgaaaaaggggtttgttattatcatatctactcaatctaaaaccacttccaagatatctgaatcagactttgttacctggagaacatatgaagtcaacattttcgaattcacatgtacggaggactaagggtatctctgaggccaataggtattgaggttttcttggcgttttctttgtgtccaacaatgtatctatcacctgggtaaatgccagttcatccctaaatcaacacttgatgaatatataaacctcccaagtaaggattggattgagcttggaaactggaacaaacatgaaggtttccaagtgacttacatcaactgattcaacgccctgcccaatcatgaatagcacggcgaccatacagcggatctggtgccacaggaaagcactgcctctcattgtaaatgtgcaaagctgatcaccctcatgacttcacaagaaggaaaaacaagaagatcagatgttttagaaccaaaagacaaaataataaaagataattgatcagaagaatgtgtgtatataaagtagtgactggtgtgagtttaacaatgggtgccattgtgctcaataggatgcgcaatttctattgttcctagaacatgattttgtctacccttaattttttacaattgtattagtcataaccctatattactagtggtctaccattagaacctgaacaatcctacggttttaagcaagaatcttagttgacctaagcctttataggatccaaaatcagttcaaagaatactaatgtagtcagcggtcatcaaaagaggatcagaagatcagcttaaatgtgccttttaccaaagccaacctattttgacaaggggagacttcaaagaaagtaacacgccgtgtatagcaatgtacatttgccacatccatcttgcagaagtttctgaaatcatgctccccaatgaacttcttcccggcaaagtccatggcctagaggaagatgcgaataaaaattaacttctatattgtttcaattgtggagtattttgactttattaacaagtgtaaagatcactgcaccgaaagattcaggttctgcctccagaaaaaatatttgtattctctagcatagcaactaaacctgtacccaaggaaacaaaaaaaaggtaagcatccagtatccaatactagttcacaacgtattctgcagtcagggcggaatagcacaaacaacaacgaaggattacaaaaaaaaacgggaaaacacaaaccttgcatgaaagtcgataggagcaggagaccatccaataactcggatgtcatcagggagagcacgatttagaactcttacataatcatattctggtcctaaaccagagaaatcagagagttacagcaacaacattaagagggtgaaaaccaccaaaatgaattacattcccagagtaaacttactttcacccgttctcccattcacttgggctttagagtctccaggaggtgacttcagtctggatcttaaaaacaaagcaatcacctgcatcaacaatcgaatagacataagagatcgcttcttccacgagcctaccttatagacatttgggaatgctcccattacagggttttggaaaaacatcagcacaatgagaaattggttcttaaactgatgagatcatatgagtagttatatcattggcacacaaccagtgagatcgaaagaaactattgcgagtaaaatgctagagatcaagagaggcccaagcaagccacctgccctgtggaggaaacacctttatctgttctcccacatctcgagtaacaagaatctttcttgtccccaactaaaagccgtgtcctttcaagtgctttaaaaacttctgactgcaggaaacacacaaattactcatcatgtaaatacaaattagttattactagttaacaaacaaaacaaagagaacaaaaacacacctcaatacttggttccatttgtgcttcagccgaaaatccataaaatctgtaacaacaaaaattcattcattcatacgattaggaacaatgacataacatgaagaagagaagcaatccaaaaaacatacctcttaccaaaatacatgattttgagtgcaacatatctctttgagataagatgactcggtatactattcttatctccttttctaactctccttctcctaactaagctactggaatctgacaatgaccgatcatgcttcacttccatctacaacaaaaacaccgagattcttgacaatttcaaacgaaacaatgtgaagtcaatcaaaagttaagtatatcttcacctgttggcattggcagcttgaaacctgagacaacaatttagcattttccacttctaactcctgatgagagatatagaacaaacaatgaaacaatcaacaacttcactatctaacgtttctacaggagaattaaccgaagattcaacatagtttcaaactcaacctttaagcaatgtgtaatcgaatcgttccactaacaaaatgcttaacaacgaagggcacaaacattgagcgaagagactacagagacgttgaagaagctaagaagatgacaagtcgtacggagatttttaccttgacgcgattacggagaaacactagttctgtttctttggcgatttcagagtctcggtcatcgccgccgggatcggattttgcgtcggagatagtcatgaatcagcctcgaattttaagatggatacacgaatgacggcgacgaaacgagattcgacgccggtgaaaagagccaacgagacggcgacgaaacgagattcgacgccggttgaaaagagttcaacgacggggacaaaacgcggcgtcgaagagaaactgtgttgggattagtcaagagtctacatatgtttctctatttacatattagtcactatagttattcatatttctctgaaaaccctcttatgttattgttttttttttcttaaagataataatgtttttgacgatctatttattaatttctgaattgaataaaatacaaaacaagtttacgattatactttgtagttaaaattaatgtttaaccaaataagttgacgatctacatatgtttcaaatttatatttatgatctaacggtacgaatctgttgccaagtgtgagcagtaccagctcatatatttcatgtgccctaagacaaattttgaaaagaaaatattttattctctttttgtatgtataattttttttgtgtgtctcttttatatatacaaaaagaaaacaatttgtgctctttttatacagaaaaaaaacaatttctcatatatagaatgatcgcattattcatcgttgtacttaaaccggcactcactgtgagaggaggttaacttttcttatttctttaagcttatcgaaatagttaaagcttatctttaatttttttatttgatattagaaattattaatattatcttagtagaaaaataaaaagctaatcctagtaaggaattgactttttttttttcttttttttaatatatatgactttagaaccagatatatacttaaaaaaaattatcagagaacaaagacgtgtttcaactataagaacctcagagaacaaatttgagaagcatacattatatataggagatcttgattcgagtgtcgaagagggtgacttatacaccaaattcagtgagttcactcatgatatttcttcagtgaaagtttgttgcgaccgaaacactggcttgtctcttggttatggatatgttaatttcaaccatagttctcaaggtaagtcgtaatattctatatgttcgtctatattaattgtttcatcatgttgcttgtttctagggtttagtcgttacgttgaggaaatagtttactttcaatgattgttccctaatctaaaacactttttagtttttttttgttagtattatttaggcacacgtgtatttgtttcgatttaaattatgtcgatttttctttaacgaatttgaatgttaattggtttgatttatttattttttcgtggggaaaaacagcgaagactgcaatggaggtgctgaattattgtaagttaaagggaaaacctatgaggataatgttttcagaacgtgatcctagcaacagaatgagtggacgaggtaacgtgtttgtcaagaatctagacgaatctatcgacaacaagcaactttgcgatatgttctctgcatttggcaaagttctctcttgcaaagtggctcgtgatgcttctggagtttccaaaggatatgggttcgtccagttttactcagacctttcagtctacaccgcatgcaattttcacaatggcacgctcatccgcaatcaacatattcatgtttgtccattcgttagccgtggtcaatgggataaatctcgggttttcactaatgtttatgttaaaaacttggtggagactgcgacggatgctgatttgaagaggctctttggggagtttggggagataactagcgcggtggtgatgaaagatggagaaggtaagtctagaaggttcgggtttgtgaacttcgagaaggctgaggccgcggttactgcgatagagaagatgaacggggtagtagttgatgaaaaggagttgcatgttggaagagctcagaggaaaactaatagaactgaggatttgaaagctaaatttgaactagaaaagataatacgggatatgaaaacacgtaaagggatgaatctttatgtgaagaatcttgatgattctgttgataacacaaagcttgaagaattattctcagagtttgggaccatcacttcttgcaagtacgcatgcaatagcaaaagattgatttgtgactacgacgaataataaatttaactaatgaattttgaaggtcatggtccattccaatggtattagcaaaggtgttgggtttgttgagttctcaacgagcgaagaagcttcgaaagcggtaagtttgtaaaccaagtaatggtcttttagtgttgccttcttaatcaaggaactcacactaattaattttttatccttacacagatgctcaagatgaatgggaaaatggtgggaaataaacctatctatgtttctttggcacaatgcaaagagcaacataagcttcatttacaaactcaatttaataacccaccaccaagtcctcaccaacaacctatcttcagtcaagtggtcgctccggcaacaatgttatctcaacaaactccattaagaggatacaacttccaaccatattctatgtgcggatcaagaatgccaaacagttgccctccaatctctatccctaatttcatggtgccacaaccatttcgtccaacactatatccacctgctccgcttgtcggcctctacggtagtttgccacagccactactgcaaccaaatctatggaacccataccgtagattttagtagcttttaggaattaacattatgcttccaaaagcgaactggttggattgatagtcttcttttattaagttaagtcatgttaggttttcatttacgatattctcgttggtttgaatacggtttatgtttcttgtgtctctacttttcaacattcatgtttactttgagcttgatcaaaccaagattaaattacagaacttgttttaaaagtagacgaaaaaaccaatgcaaataggtttcaacttaagtgatggaaaaactacaaaaaatgtctctgcatcaaaataaaaccatatccaagaaaatccgaaattgtggttcctcctcaaaactatcaactatctaaaaccattttggtaacattgaagcatcacaacctatttgtaggaggtttaactctgtaaatacgaactatccagttggatgttgtgtaagcttcttctaagtgttcaagtttgatatctttgttccctatctccactcctcttgctctatcatacctgccaataattccaccgctcaacttttttcatatgtaaagtaaaatgtgcttatgatgaattaaacgcaaataggtgttaaacgtacccgggtggcttgccgtattctgtggtcagctcaccgaacctgtaatagcataacttgtacctatacacgcaaacacaattaagatgaattgcatcgttctcaaatttacctttataaaagtatatccttgagtgtgaacttacatgagacagttcagcatcttcggtgatgcacctttgtctacacggaattcaccattcacaaggtaatcaggttctttgatcactgggaatactccacctccaatcctcaccatccacaagaacctaacccacattattgttaaagagatcagtaaatacacacaccaactgaatcaagaaagttttcttacgactcactaagaactggaagaccaataaaggtatttaacgtgccagttaaacagaattatatcttcgttggtatatagagatgtatgtagtaacaactaaacctcagtggacgactcaaaccaattgccacaagtcaacatgtagaatctacccataacagctagtttctaaattaccaaccactcccatatttggttaataaggatcaactcaatactagcccacgccattcatttgctcactactagtcaaaaattaatgagcacagacccacagttatttcagataagtcaaaatttcaaaaagaagcaaaacggcatttcgttagcaagccaccaattggttgactcgcaacaaaaaccagattttcagtagtaataaagaagatgagcatgcgtgagagaggtaaggagacttacttgttgatatcatctgaagaataaccagtaacaccaccaaagacgaccaatacatagttcacatcaagtgacctcatgatgtcatacgcatcatcttcataagaagacatggcacgtccaacggtagcaatgtgagtgttgttccaggtattgttatcgacgatgacagttctatttcccatggcagtgatttggtacccatagtcccaccacgacataatcttagcatcagtggcagtgttttgcctaagccagtagtatgcctcgcggtaatcatcaaagatgattctgttcccgtgggctcctcttgcagctaagacaattgagggagatgaatatgcctctgctgtcacccatgtgcagtgaatagcatatctactgagcaaataaaatacaccaacaagaagagcaatggcaccattcttctggaaaggctgagactgatcaagtgtaacctgctagggcatagaagacaaagattaaattttctccttctccagagaagcttgctacagttcaaagtaggtggcaagtaaacaaacgaatataaaaaaatggacactaaaagattcacctttgaagaagcttttgaactaccagctcctttcgtggaaccagtctgagaaaccttttgttttgtccttaacagagaagttaaattcttgatagtggcagagacagctatggcactgataagacaaactgctggagtagcgacgagaataagccgaaccataacaccagcaaagtacaagctagtgagaccatacatgacaataaatatcgtagcatccgtcaaacgcttgaaacagaagtaaagacccgcagggaaaagaaagagcagaatatggtagtcaaacatgaatgacgaccaggcagtaggctgatgctcagaaacagatgcaataataggaatatgatcctttgcgtaagtcgggtcaagcaacgagtaaaatcgaccagtccatggagatatatagccagacgctgttccaacacccacagcaacaccaccaacaagaatagccgatgtcacagttattctcaaaaacgtttggaacaacttggtgtcattgagctggtacttaacccagtccaagaagtaaaacacctgcattaataagaagacacccatggcacccatatgttcaccagattgaacatgttgaaaaccaacaaagcgaatttgcatcgcgagcaacatccccaagatatacatacagttataagcaatgtaaagcctcatcgaataccttccggtgatcaacaacaccaacacgtaaagaggaaccaagttgataataaacacatatcctccccaagctgaaaccatataaaagtaaccaaacgcagaggcaagagcccaagctaatgaaccagtgttcaccgctttaacaaagagataaaacgtcagcaacagagcgaaaatcgcaacagcttcgttatcatacgaaccagctacagaacgagaaatgtatccaggacaaatagcgataagaacagcagcaacaagaccagctcctgtatcccaaagctctttaccaaagaaatacgcaacgagagtcgtattcgacgcgaaaaacggtgcggttaacacacaaacctcacggatatgaacgaagaatcggagaaatcgcaatgtccagtagattaacgcagctgtgaccataagaccgggataaagagtaccgccgatgattcgacctagaggataccaactctcggaatcgaaccagttccaaaactcgtagaagcctttctctgtgaggaaaagagtcgtacggtagttgaaatacggatcgaattcgtggatcattgattcgtagcggagaacactgaagagacgagctatgaaagctaagatgtagacgagaccaaggatcgagatacggagtaagagctcttgttgtttcgtcttcaattttagggatttgaatgagaagaaactagtgttgagtagatctggcttcgtcgccatggattccgatttcgctggctctgattttcctcccattgctaagtaccgatctcctcagggatgatcttaaagtcaagtcgtcggagtttgagagtgtggagagttctaagctctgtgatttttcatgggatttgtgatatttttttattttgggggaaaatggaaaatgagacaggaaaaaaaaatcagtgatcaaagtcagtgggaactgggaagtgaagtgagtggcaggttgtttgggctttattgagcccattattggagtataacaaagcccattaattaacttttatgtaagtctgagctaattcttatatttgtgcatacactaacactatagtttacatctcaactcaattgccaatgtttatatcatcaaagatacggtctttgttttcagtcagtatttctatctacaatatttctgtgtacgtgaacactattatacatgaagggcatacaaatcgttaaattactatacacaaatgggatctgacggaagtggttgtttaggcgtcaaggccttgaatctcagcatatgtaagtgtaagcgcatgttgaagtttccgtggagacaaaacctcaacctcggccaagaacgtggctgtgacaggccggtgatccgatagtttaatctcgtttcttctgtaattgaagagcttcattccctttccgttccaaatgatgcggtcacacctgatcaatcatagtcactccaaactcatcgtttttgcctttttatcatatcaagtaaaaatgttgtatcacagtgtatgaagacaataccaggccggtctacgtttcccggattccgggtcatctccgatgtaattttctgaatcgatttcgtatttatatgttggtgcaaaatctaaagttccctctgaccatccctcgaataggttcccttttgtcatttctcttgaaagctatcagagaataaacatctaatttcaatcttgatagattcatatgtaacttaaaaaacataaacattagaacttcacaatttagtattaaaccaaaacaatgctgcagtaaaggtacctggtcgtactctaccaacctttgccattcctttcttgcaataagttcatgtgtcttctcatacgacaagttaatccgatagttcagatctcccagccagattattcttctacacaaggttatcttgttatgttaaaaaaattaagagatgtagttgaatggatcaactgagaaataaaacgtactcatgattacagatgcttcttggaagctcattggcatttaaagaatgaggaagaaactgcgttcttctgtggatttcacgtacatcatcgtttcttttctcttgatctgtatccttttctccagatgacagatgcgtgcacaagaaacaaaatggtgtttgatagattgacatgctcacagatacagacccctgtaagaccgcaagaaaccgtaagttataagctaggctacaaataactatttaaagcaactagtaagagaaatcaagaccttgttaccaatgtagcccataataccaacaccaacagtagacacacaaaggttgcttatgtgcttgcgcaagttcctccgaacccaaatggtgagaaacactccaaccatctgtttgctcacaatccgaacatacgatggttttctcagattcgtgatagtcagattcactgacttgaaggaaccacgtctttcggaaacatattgatttaggagccttaatggaggctctggccagctcaaacctaccctttcagtgtaactaaatctttcttcccttttggaatcactattaatctgcatcgacagagagcggtctggcgtatttggtgttgaaaattgtctctgtagatattcttgtattggtaagcaagacgcattgtcattggtagaacccaaaacgtctatattagtaagtgaatcttcgcttacgattggtacgtccgtgctttcaacagagttgagtttgttatccattgaactaattccatcgcaagcatcatgactggtttcaacaaacatatcttctacactataaggaacctcttcgggttgcttaaactttgatggagaagggggatcactgtgacttttaatcttcagctttctaggttgaactcggtttaaggcatcacgtatcaagttctcccattccaaagcaggctggtcatcctccataccaaaaatgtttccagcatttaagggaacgatttcctgaagactgaaacgaaatgaatcataaacactgaatacagaactcattcaccaaggtagttacaaaagattcagaagaaaaaaaaacatacccaagaacataaatgtcagcaggttcaagagtgtctagccaaccatcaatatccaagtcagatgaaggaactctccctccaacattccatgtcccagcacagattctagctacatcaaaaccacataccagggactcactaagggtatggacttaacttaagcaacaagagaatctgtctacaaattaaacagagaccagcaaactcacaatatagaagtaacattaacaatcagaaagacaacaatgatgatgcaaagataagcagagaaatcaaaagacctgattgctttggtatctatatactgcatcctgaaagtttcagaatttcgtcttctaagcttaggcctatctgaaattaagaaaaatggatctgaatgagcaataatgttcttctaatgaaaacatcatcaccgaaaattagcaacaatgaatgattctagaaataaaaattgaaatctgagagttacatatcacattaccgtcagtatcaacacgaggattggtaactccagagctaattggatcaaattctgctacaccaaattcagattcagtcacagtagaatacaaaacctaattatttccggagaatcagagtttaagctgaccttgtgatctatcttcgtagtcatcgtcactatcagcactataatctgattcagaagcagaaacattgaaccatttacggagaacaatacgtgcccagtagagctggagacacgagaaagctgagcagcatattgtagcccaattgctctgcaacatttcacatgatcgttatccccaaaattcggaaaacctaatttaaccaaactatacgagcagaagaagcaaaggagaagatatagatctggatacctccgttctccgtgatcgtgatcgtacttccgccatatactccggtcaaatcaaactgagagagggaagaagaggttgcaggaggaagaagaaaagacttaacgaccattggtaggagacagattgaaaatattgattgttttttcgaaccggcggttaaaagcttgattatactccggtttaaaattggttaagaatatgtcaactaaattggggagaaaataagtcagattattaatagattaaatgcggggggattgacacaaatgacactaaaaaactttattattttaaaaatgataatttttgaaactttcaaaaatatcatataaaatttttaatcctttataaattaattaaataataaagtttttttattaccatttgtatcaatccccaaataaaaatgagggcaaacacaaatctaatattaaattgaattaaaaaaattttaaatagtggaaatatataccctaaattggaaataaaaaaacccaaatataatactacaaactaattttaaaatgaaaaatatcttttaaatggtgaaaatatataccctaaattggaaataggaaacccaaatataataccataaactaatattaaaatgaatcaaaatttcttttaaatagtcgaaatatataccttaaattagaaatagagaacccaaatataatattttaaatttatttctaatttattttggttgaataaattttatgtaaaattgtggtattattattgtccataaaacttgttttactgttacttttaggaatttctcaaataattatttgaatgctatttatgtctaaattttttttaatactatttttgtccaaaaaacttaaaagtgtgctatttgtgggaatttctcttaaaaggtgtggtaaacaaataaatttgtagttatcaaaaaataaaattttagcaaacaagtttttcattctaatgttatttaactaggtattttataaagtctttaaaattctagtgtgattcgatttctgaatttttatgttttttaaaatacaagtgttattcaaaattatatacttttgtatgaaaaagtgatttgacaataatttaatagaaatcctagtgtaaaatgtaaagaataaataaataaaattatttaatatcagaagctttagtcggttaattgaatgattcagatagaaactattctaaactaattggtatggattggaagaagtgactaaaccatctgatatgcgcaatctagttgtactccaaacttaagatattgacttccacttcgattattggtttcaatgatgttcgctttctcgtcgacgccaccacttttcctcctcagaggtttgctcttactctttgccctacaattcttctaagattgtaagggtttggatgttgatagcttgtgggtctagttttctggaatttggttttgcggaattctaatgaagctcattttgtttctatgggtttggatattcttgtgtctacacttgtgctctcttgtagcatctttatcgctttgtgatcatttactgcaaattctatctcgatttggctatattaaaagttgtctcgtcgcagtttggacaaaatgctttgagtttagacaacccacaagttttctagttcattggagcttttatattcatcatctctttattatggagctttttatcctctcaaatatttcacttgtgtttagtaatagtgttacaaggaacattgtgtgcaagactattctgcttgaagtagaactgaagattgttgtttaatactattctcttttagcttttaccaaccttttgatgttagtgtttttggaagttttgtttccttctcatcatagtttcgacaaggtcttccaaactaaagatgtttgtttttttggatgttcttggtcagcgccggccttggccacaacaagatgaaacatcttgctgtgccccccacatttttctcatatttttcaccaaaatttgtttgcaaaacagccctcattttttttattttttaataattggcccctaattttcaaatcttataaaataatcttaaaattttcttttttgctctgctcttgttatactcagggtcggccctgttctttgttagttgctcctttggtagaaacctccgagttcacccttatccccatgttttaagtattgttgtttcggttagcttctgctaatgttcgacctatatgttgccatgttaccatatcgtatacaaaaaagacctaattgaattaacttgtgtggtctactcttacattttgaatttttatatgctaatcaactttatcaatcttgcatcactttgaaacaaacatttattcgatatttaccgtagaaaagattaatggtttatatatagtagtaaaaagtaggtatccaacataggaaaacaaaaaaagttctccaaaaatattgtttacaagtaggttagctcgaacaaccataaattagcggccgcgttaaagcatttgcttttggagcgtgcatggagacaaattagccacatttaattaaacaccacatagtaagttcaatgaaacatgagttaactagtgacatgtgatattagtattgtaataattttacaattactgaaatagatgatactattaagcaacgctaaagtacatcttatcagcttatcgagtacaaactttaaatgggtgtatagtaaaaagaggtcaaagtctaaaatactttttttatacacttatagctctctccttcatgtgagtgtttttttcttctataaacaaatctttgatgctgctcacctcccaaaacgcatccacctcccctgtcttggtaatgtaattttgatttttacgtatcgttttaatttttttagttaactatagtttcttttaggtttacgatgatttctttaatcaactaaactcattttacgacatttatataaaaaaataagccatcttattagtttagattaatcaaagaagaaattcacgacacgaacaaaagagggtgcttccctccaaaattacttttaagtttttaactttcaccgtctcctaggccatgctgcctctaatcacttgtgtgtgttctttattcatactcttaatttattaataaccaagataattgggatcttttgttatcatttcgtcgtgctaaataatggagactaggttttgtagtactctacccttcaaaattaaaatagagttcatgaacgattactcaaccaatgtagaaaaaaaaaacctagttcatataaacgttaatagaaaaaaaatacaataatggatcaccaagtgaacataaactacaaattgcgaacgttaatgttttatttccagctttgttacaatagaaaaaataccattacaccataatttacaagtacacacacacacacacacacatatatatatatatatatatatatatatatagtaatgcatcacaagaagtcatgtttggcatattgttagataaactatattctaagttaacgaaaaaaaaaactatgatgttttttataagtattcaaaaccatttaattatatttttgaatatcgcagctctagttaacctcatttgtgactttgagagatcactctcattccatggatatatcgttattagctatctgaagttagaaagatttacagtaagattaaatatcattagactgaattttatgcatatgaaagattttattaaatgttgttgattccaataaaatggaggtagtacgtatacatataggaacactaaattttataatgaaatatgctaaaatatatggtatcttacatctagagatgagatatttgtggagcaatatataaaatacataggtttctttatttattgtcaattggttttgagttgaaagtccttatatactaagaaaaaataaatttgtattgagtattaaaatagtcatagttctatattactcttaatcaaatatccatattacaggttgacaaaaaaaaaaaaactaaataatttattgaaaattaatatttttgattttatatatgttactttatatttatttaattaatataaccatatggaaaatgaaaatattatttttgtcacaagagatttttgaaaagtagaataatttatatatatatatataattacttataagttgatggtgtctatgtaaaaatagatcagtttgccatatatatcattagagacaaccccactatggtgcaaccaattagtgtatcatcagtcttgattatcttgaacgttgtcgtattgtttgggttcatctaatgtataaagagtaaaaagagagaccaaacaagaagatccaagggttgggagtggccgacaaaaggagaagaaaatgggagaagaagacaaagagcaataacatgtattgttagtttgctagctacattgcttcgtggtttgattttatcacaccctaaaccactaaaatatgtgtgggtgtaacattatgtatacaatataataacttttgcttatacgttacacctgagattctttaacaactatgactcgatgtcctctcttccatttttttgggagatcaaccgattacgaatcttaataagagacgttaagtttaaactttaaacctaaaaagtttaaaacgagattgagcaataatggagatgtgttcttcactattcaatattatacacatgtacccatttttcttgattaatcttataaatagacgttaagtaggaaattgaacatttgagtgatatggttattaactttaagactctgcgaagtgatgaagctgcttgctttaatattaaaaaagatatattccaatccttttaatggttattgaaactaatgtcaagacacaatattttgatacaaattaactaaaatttcttcaaaaaatcattggtccgtgaataacttcataagaagcaaagcataaaactaaccttgatttttggaaggaagacttagttaaaataccttgggttttgagagaaaatacagttttgtctattgtcgaaatgttaaaagtttgaatattttcataagtaagaattactaatttataataatagcacacacatccacgaaaaaacggaagaaaatccggtggcgcccaaatcactgcagtatataataatccgaaacaaaacttataatcatataaaataagcaaagtaatttcaatcttattattagtcttcccaagaaggcaacaacaccaaacgagaagaaagagacagagagagataaagcaaaacccaaagtccaaggtcaccttcttcaacctctaacgctccggccaccgtcaccaccaccggataaagtttcttccagccagcgagtttctccacggaagagaatgtaaagacctcactcttagcttcacatggttatctacagttatcgctcttgatgttcttgttctgcaatggtttagtgtaaaccttaagcaatcacagagtccttacacatgcttcttgtctcctcaaggttcaacaaaaaaagataagactacactttgcttctcttcttcctcatcctccattacccaccacccaccaatcatttcaacaacattttcataaacctatcaccttcgtcttcttcacagagattccatggagagagaacgaagtaattttttcttcttgttcttgttttgttcatgggtctccatggcccaacccactctttctctttcatcagatggccaagctcttctctctctcaagagaccatcaccatcactcttctcttcttgggacccacaagaccagacaccatgttcatggtatggcattacatgttctgcagacaacagagtcatctctgtctctatccccgacactttccttaacctgtcttcaatccctgacctctcttctctctcctctctacagttcctaaacctctcctccaccaacctctctggcccaatccctccttcatttggaaaacttacccacctaaggcttctcgacctttcttcaaactctctctctggtccaatcccatcagagcttggtcgcctctctactctccagttccttatattgaacgccaacaagctctcaggttcaatcccttcacagatttcgaatctatttgccttgcaagtgctttgtcttcaagacaatctgttgaatggttcgattccttcaagttttggctctttggtctctcttcagcagttcagacttggtggtaacactaatctcggaggtcctatccctgctcagctagggtttctgaaaaatttgacaactctagggtttgcagcaagtggtttgtcaggttcaatcccttccacatttgggaatttggtaaatttgcaaactttggctctgtatgacactgagatctctggtaccattcctcctcaactgggtttgtgctcagagctcaggaacttgtatttgcacatgaacaagctcactggatcaatcccaaaggaactgggtaagctccagaagatcactagcttgcttctatgggggaattctttatctggggtcatcccaccagagatttccaactgttcttccctcgtggtgtttgatgtttcagctaacgatctaactggcgatattcctggagatttggggaagcttgtttggttggagcagcttcagttgtctgataatatgtttaccggtcagattccttgggagttaagcaactgttccagcctcattgctcttcagctggacaagaacaagttatcaggctccataccctcacaaattggaaacctcaagtctctgcagagctttttcttgtgggagaactcaatttcaggaacaattccgtcttcttttggcaactgcacagacctagtggccctggacctctctaggaacaagctaacaggaagaataccagaagagctcttcagtttaaagaggctcagcaaacttctccttctagggaactccttatccggtggattaccaaagagcgtagcaaaatgccagtcgcttgtgaggctaagagtcggagagaaccaactctcaggtcaaatccctaaagagataggcgagttacagaacctggtgtttcttgatctctacatgaaccatttctccggtgggcttccttacgagatctctaacatcactgtccttgagctcttagatgtccacaacaactacatcaccggagatattcctgctcagttggggaaccttgtgaatctagagcagcttgatttgagcagaaacagcttcacaggaaacataccgctgagttttgggaacctaagctacttaaacaagctgatcctcaacaacaatctcctcactggtcaaatcccaaaatctatcaagaatctacaaaagcttacacttcttgatcttagctacaacagcttatccggtgaaatcccacaagaactcggtcaagtcacaagcttaactataaacctcgacttaagctacaacaccttcactggaaacatcccggaaaccttctccgacctcacacagctacaatcactcgacctctcaagcaactcgctacacggcgacatcaaagtcctcggttcactcacaagcctagcttcactaaacatctcctgcaacaacttctcaggtccaatcccatcaacaccattcttcaaaacaatctccacaacatcatacctccaaaacacaaacctctgccattcactagacggcatcacttgctcatcacacaccggacaaaacaacggagtaaaatccccaaagatcgtagctttaaccgcagtaatcctcgcatcaatcacaatcgcaatcctcgcagcctggcttctcatcttacgaaacaaccacctctacaaaacatctcaaaactcctcttcctctccatcaacagcagaagatttctcatacccgtggacattcataccattccaaaaactcggtatcaccgtcaacaacatcgtcacttccttaaccgacgaaaacgtaatcggaaaaggatgttcaggaatcgtatacaaagccgaaatccccaacggagacatcgtagcagtgaagaaactctggaaaactaaagacaacaacgaagaaggagaatcaacaatagattcattcgctgcagagattcagattctcggtaacatcagacacagaaacatagtgaagctattaggttactgttcgaacaaatcagtgaagctgcttctatacaattacttccctaacgggaatctacaacagttgttgcaaggaaatcgaaacttggattgggaaacacgttacaagattgcgattggagctgctcagggtttggcttatcttcatcatgattgtgttccggcgattttgcatagagatgtcaagtgtaataatattcttctggattcgaaatatgaagcgattcttgctgattttggacttgcgaagctgatgatgaattcgccgaattatcataacgccatgtctcgtgttgctggttcttatggatacatcgcaccaggcaagtttctctcttttttaacgggagggcctttttgataaatttgataaagctcaaggtttcatttgcattattataagagatagggggttttagtgtatttattaaaattcagagcttcatatccattattacaagagattgagagaaattttgaatgaatttgttaaaaaaacaaaagggtttcttgtgcatcattacaaaatattaggatttttttttaataatgaatttgttaaaatttgaggtttcatttgcattattggcaaaagattgtttttttttttatatatagtgaatttgttaaaatcagagcttgattttcattactacaagaaattgggggaaatttggaatgaatttgttttaaaaagtgttacttgtgcattattataaaatagtagttgtttttatttgaaatttaaggtttcacttgcattattacaaaagattgtgtgtttttttggtagtgaattaataaatttgttaaaagcagggttttattcatctttacaaaatatagttttttttttaatactttgttaatatcagggttttatttgcattattacaaaaacaattgtgaggtttgttaatgtgtttgttcaaaatcatggtttaatacataaaaacaaaatactggggcttgctttctgataacgtaattaataagaggttttttgtgtaattattgcagaatacggatacacgatgaatataacagagaagagtgacgtgtacagctacggcgtcgttttattagagattctaagtggccggagcgccgtggagccacaaatcggcgacgggcttcacatagtggaatgggtgaagaagaagatgggaacctttgaaccagctttatcagtacttgacgtgaagcttcagggattaccagatcagatagttcaagagatgcttcagacattaggaatcgccatgttctgtgtgaatccgtcgcctgtggagagaccaacgatgaaggaagttgtgacgttgttaatggaggttaagtgtagtcctgaagaatggggtaaaacatctcagcctcttatcaagccttcttcttcataacctatggtgcttgtgtttcttgttcttgttttttttttttaggtcaaatttggttgagtggttttgatttcttgtacataaagtatcattgttagttgaacttggaaacatttgagctctttggaatcaattagaattggttacaactttgcattacatcatttggtgtttgaaatatacatttgggagaagagtaagagctcgggttttcgaagccagtattgtttgaatctctgtcttgagtactcggcgtaatcgaagtcgatcttgtttacatatccctgcagactcacaattcaagtttcagatactttcttgatgagattatgtttggattggagaaaggaagagtcttacagagatgattccccataagccccaaaacagatggcttgctaatgtgtacttctcagcatccttcaagagctgttttatgtcatcttcttttggttcttcgcctaacaaaagaaggcgtatattagtccatgagacgttgttacggctagaagaagaaggaactatgtttctttgagaaactgacctgaagagctgaggtagttatggatgaacctccttcgttcctcttctcctgcaactctcaaaccaatcagtcagaaccactcaaatacgaatgtatttgtcacttttctacttgtaatttgctgccatttcgcagaagtgatttgcaatgtcgtatgcaactgggttataactagcgtactcgtagtcctgtttttagagaatctcatattggtctatgtgtgatgatatgttaatcttaagggtaatgggaaacttacaatgatagtaatggcattggtatcttcatcaatcataatgttaccatattgcaaatcattgtgacaaaaccctatctcctgctgcttacacttatcctgcagctcatgttccagcaagtatatctcatcttcaatcttgtctagaccaaactctgctaaatcttcaggtgtacacagacttttggcttgtctaagccaattcctgttcacatgttttcaagattctgttgttgttgattaaaccacttcttgcttcacaataacagagaaagattactcacctcatcctatcccaaatgagcacatttctatcaccagggatgttgataccatgaaactctcttagcttagccgcaacacgagtaggtacttccgcgtcacgtagatttgctgctgataacgtctgatcaaaagtcataaaatgcacttgattaatgatgatgaataaagtgaaaacattgtccatcaagattcaagaattactcaatcggtttacagctaaaccgggcatacctcttttggtatttcccggataccaaaaccaaaaactcctaaacaaaccacattcaaaggtccttataggtagacacacccaagtcatggtaatgaagtccaacaaaagcatctaaacgtttcttgttactcaattgatacacaacaaaaccggtaatcactcaattggtaattcccggttcaacatcaatcacaaaaacaaatcaaaggttgttgaagtatcttctcagttctcatagtcaaatttagacccaacactatcatttcgtagtcacaacataatgaatctaatcaaatgggtatggttaattaataattttattattacacaagaaaccaaaccaaacatacccgggcattaataaactcctcgattcgaccgccagaaaaccggccaagaagcttaggaccgtgaccataacgagagacaacctcgaacgtacgaatctcatcttttctgttgaacaacaaatcacctgtaagattgtgaaaatctcccttgaggagtagctttgcattcgattcaatatatacacatttcagttacaacaattgagagatctcctatattctagatacaatcgcataatatctaaacatatctcctaataccttcccgcagtcttttcgtcggtcgttgaatgacgccaagactggacttgaatcgattgaacagtgaagtagtaagaccctttgtgaaaatgtcagcatattgatgagaagcagggatatgaatgactcgaacttcgcatgttgctaccttctctcggacaaagtgaatgtcaatctcgacatgtttagtacgttaatatttgaccggattagtggagagataaactgcactgacattgttgcaaaaaaccaacgttgcttgagtgatcagacaatgttactccaaaaacagatttcttaaccaacacgtttctaccactgcatttgctacggctttgtactcagcctctgcgcttgaacgtgacactgaaccttgtcgcttagacgaccatgagatgagtgtatccctaagaaaaacacaataccccgaagtcgatcttctagtattcggacacccaacccagtctgcgtccgagtcggcaactagtttggttgatggggactttgtaatactgagaccctgtgatgtcaaccctttcagatagcgaatgatatgacagagagcatgtaagtagtgactctctcatgggtcatgcataaacaagcacacttgttgaactgcataagatatgttcggtctcgttattgttaagtactgaagtgccccaaccaaacttcgatataacgtcaggtcttgtatttttggaccaacactttcttcaagcttacacgcaagatcaaccgatgtgagactaggcttccagttttgcatctcaactatgttaataatattcttcgcatatttttcttgactcaagaacacaccattatgatcaaacgttgctgagagataccaagaaagaagcttaatttacccatgtctaacatcggaaattttttgagttttgtcacgatagagtcgagaaccttggggaagaagcagttagcataatgtcatcaacgtagagcagcaagtaagccatgtcattcccttgcttgtatacgaaaagtgaagcatcacacttactctgtttgaaacccatcattttgacatagcttgcaaatcgagcattccaagcacgtggtgcttgtttaaaaccatacaacgccttattcagcttgcaaacatatcctggattcttgttatcgacaaatccaggtggctcatacatgtaaacagtttcttctagcttgccatgaagaaacgcgttttgaacatctaattgatgtaccgacgagtcgcgttccaccgcaaagtttagaaccgcacggattgttgcaggctttacaaccggactgaacgtctcataaaaatctactccgtgttcttgtgattttccattagcaacgagtctcgatttgtatcttgacaaagaaccatcagcattgtacttgtgtttataaagccaaatcgaattgataatgtttgtacctgcaggtttaggcactaaactccaagtcttagtcttaatcaaagcatcatactcttctgtcattgaaggattctaatttggatccattaacgcttgcttataactttttggaagttgggaaagtgtttaagcattaagtgaaagaatttgctttggtttatgtatgccttgttgtgatctaattaccatctgttgtggaggttgtagtatcgaagcaggtgctgcaggttgaacaggaggcgttgccgtcactgttggaattgatggagtgagaaggagacatttttgaatttgtgtaagctgtgtttctgcttcgagaaattcataagcagaatcgattttagtgtgagttgcttgtaaaggcaagatatcctcttgaaatgtgacatgtcttgaaatcataatttttcgtgttttcatatcaaaacacctatagccagggtgaagaagaggatagcctaagaaagctgatggtgcagacctcggctctaacttattttgggtgtttgtgtgaggataacatagtgagccaaagacacgaagatgattatatgatggtgttttgttgaacaagactgagaacggaatccgattgttgattaaggtggatggatgaagattgaggatgtggacaacattatttagagcttctacccaaaatgtgtttggaagatgagcttgaaggagcatagtgcgaaccgcattgtttatggttcgtatcatgcgttctgatctgccattttgctgagaagtgtatgggcaagaaaaacaaaaacgaatcccgtgtttagcaaagaagtcatgaaactgagagttgttatactctacaacattatcacattgcagtgattgaatgtgtttcccgaattgtgtatttacataagtatgacattgaagaaattttgagaacacatcaattttattgcgcagaggataaacccataagaaatgagaaaactgatcaaggaatagaacataatatcgtattccagataaacttgagacaggagaagtccacaaatcagaatgtattatttcaaaaggagaattgactttggaagtggaagaataaaacagatgtttaacatgttttccaatttgacaagcattacaagaaacatggagattcttttaattcgaatttaaatatgaaagtgaaagaagcgtcttcaagacatcgttgctagggttgttggtcggtaattgagttttcagataacggttgcaagtttgtgctgtttcacttaagagacacaagtagaaagagacagaagtatgaagagacacaactaattgggttgttgtgtctatttgttttctatataaaccccttgtatcgtcatgtaaatatcaacaagtttcagttcaataaagagttctttttgttcttgtcttctttacaagagaagagacaaatgtctcttactctgtttttcttctttctctcgataatccaacatggtatcagagccaatggttgtctttggttgtctctacaaaaataagatgagttccgctgcgaaaagaaaaagagagatttagacaacaaatctatggtgagaagaagaggaagaagaagaagaactaagaggtggtgacaagagagagtaccatcaactttcacaaacatattcacaagaagaaggctccaacaacgatgaagaagataggaaatcttctctagaggcaatggagaaaacggatgtggatttggagctgtggaaggagaattctgaaactttgttcaacaacgtcttggtgaagcgtaagacgggaaagcggcctgttgtaacaaacagagcaaggcttattatcaaaacgttgagttgagttgtgaagaagactacaacacaaaggcgtggagaaaagtttgtttcaaaaggaagaaacaaagggggcaacaaaagtcaaaagaaggccgagaaatggtgtgacttttgtacgtgtgacgattactttgagagtgattgttggaaaaagcaacacagggatgttagcttgcctacgggtgtaaggtgctttgtgcgtaacaagccatggcacgtggtgaagaactacaaggttaggaaggccgagagagcgaacctaagcctagaagaaacaaacgaagagagtgacaatgaaggtcacgttgaagaaagatcatcatcaaacgtgaatgatgagactgttagagtttaattgagtttggtcgttgttttatacaattaactatatgtgtttagtttatacattaagagatgtgtcttgccttaaaggtagttatgttgataggcataagtgaagagttacaacacttatagatgtgtcatttcagtcaaggtctatctcacgtctataaaaggacgatgtctttgtttgtaacacacaattcagattttcaataataacaagtttcagttccattaaacgttttctgttttgttcttgtcttctttataagagaagagacaaatgtctcttactctgtttttcttctttctcttgataatccaacatggtatcagagcttatttggttttggagcctatccaagcaaaacaaaaataagaagaagtccgctgcaagaaaaagagagatggcgacaacaaatatatggagagaagaagagaaagaagaacaagacatagaaaaggaagaaaagagatggtgacaagagagagcatcatcaaccttcacaaacattcataaacagaatcttcaagatgaagacttcaaagggatgaaggagataggaaatcttctcaaaaagcaatatggagacaatggatgtggagaaggagttgtggaaggaaaattctgaaactttgttcaacaaggtcttggtaaaacaagacgaagaaagccgcctgttgtaagaaacatggcaaggcttagtatcaaaagtgttgttgagttatgaagaacactgaaacaccgagtaagcttctgttgggagaacaatgcaaggctactcagcaaaaaggttcaagggaactgatgagacgtcatcgagacgtgatggtgatcaaaagagtacaccataagaggctgcttacctcggagaaaaatggagcacaagaggatgcttacctcggagaaaaatggtgcgtaaaacggttgaagagtaaaccgaagacgacgtgaagaagattcacgcacaagacgtcatggagacgttatggtgatcaaaagaagacaccgaagaagacgtggaggagttcacgcacagatttggtgatcaagagtacaccaaaaggaaatcagaagaaatctcatttaaaagaaagtgagtggaaaaaaggttgtgagaacaaccggagatgacgtgacaaagctcacgtgaataaaaaaattgaaggtgacaaaggagaagcgttgtgggaaagagaaatctcaaaagtgtgcaacgtcaaatacaagtagcaacaagaaggtgctttgtgtgtaacaagccaaggcacgtggtgaagaactgcaagttgaagaaatatcatcatcatgaatgacgagacatggaaaagttaaatatccaagtgatgacaagccaaggagagaagatcatcaaagaggtgtttctagtgttgggtttagcgaaaaatatattgagtgtttctcaaatgatatccaatggatactgagtcttatttgaagacaatagatgtttcatcaactatcctcaagaaagaaggatattggatattaagatcaagcataagagttattccattgagatggagaaaacaaaagtgctttacttgcaagggaagaagaagtaaacaaggtcaagttgtgacaaactgagaaggaagctaagtgcaagaccgaaactcaattaagggggagtgttggtcggtaattgagttttcagataacggttgcaagtttgtgttgtttcgttcaagaggcacaagtagaaagagacacaagtatgaagagacacaactaattgggttgttgtgtctatttttttctatataaaccccttgtatctgaaagtaaacacagtgtctagtgtttggagaataagataagcattgcttcttttatatctttctctcttagagtttctaatacaacttaaagcttatttatacactttagaattaggtcatcacgcttccacctcaatgtctaatactgcaaatctgtttgtcgttttgatttgttgaacatgacagctggtctttgtctttagctcctgaggtgaaacttcctcctgcttatctttatctttattgtcttcttctgcaggtagccattgtgtgataggaaactgattagtacaagtattgttgggcttggagatgggctttggtctgtacacagtcttgacaatcttcttgggccaaacattctttgagcctgtttgcaagacagtttcgttttgacctgctgatgtttgcgtcttcaatatcgctttgacttcacttttctcagatctagattgtacttgctcaacttctgtctgcttcttctcattctcttcttttgtaaccacataactttgcagtggtctgtttcactaatagtccccctcaaactcggagtgggtggacaacaaacgtcgagtttgaagcgtagagttgtgaaggctccgactggtaaggatttagtaaatatatcggccagctggacgtgactcgggatatgtttcacagtcaaagacccaagagccactctctccctgacgtagtgatagtgagtctcgaagtgtttgcttctcttgtggaaagacggattagcagtcaagtagatggaggagagattatcagcgtatagttctggagctgtatgaagagggatctgaagttcctttaggactttacacaaccaagtgatctcggcagctgcatctgacagagctctatactcggcctcagtggagcttcttgccactgtttcttgcttctgggagcaccaagagattatatttgagccaaagaaggtacaaaaccctgctgtcgagcgtcttgttctcttgcagccaccataatcactatcactgtaagctctaactgtgcaatccgtatcttttgcaaatgaaatccccattgttgtagttcctttaacatatctgagaattcgcttcaacaggtgataatcggagactgttggggagtgcatcttctgacacacataattgactgcaaattggatatctggacgggtaagggttaggtattgaagcttaccagccaaacttctaaaatatctctgatctgagaactgttcatcttggttaggtaccttgtttagctgcagagggagtggagtcggcattggtgcacaatcagccattgaagcagtaataagtaagtcttcaacatacttctgttgtgacaagaacagtccccctgaatgatagtgcgcttgtatgccaagaaaatagtgtagctttcccatatccttcattctgaattgtttgttgagctcatctaataggttagacaatgctgtggagctgtttcctgtgatggccatgtcgtcaacatacaagagaagcaagatgatgtccttattcttgatgtagacaaataacgaaggatcagattgactgcaaaagaaaccaaactcaagtagaaaattgctgaacttatcaaaccaggcccttggagattgttagaggccatagagaaatttatggagatggcacacataatctggtcttgcagagtctacaaagccggtaggttgtttcatatacacagtctctgtcaaatctccatgcaagaatgcatttttaacatccatctgtttaacttcccaattcattatagtagcgacatgtaaaactgacctcactgtggctgttctgaccactgagctgtaggtttccaaataatcaatgccttcctcttgatcgtagccttttgcaactatcctggcttttagcttgtcaagggatccatcagcattaagctttgttctaaagacccacttgcagccaagaacatgcatgtctggtgtataaggtatgagcgaccaagtctgagcttctttatagttatccatttcttcatgcattgcattattccatccctcatctttcatggctgcagtgactgtttttggttcaggatatgacactttatgaagcataagtgcatatcttggattcggtttatggatgccagcttttgatctggttaccattgtatgtgtaggctgtttttccacgggagcttctatacaaggagctgtacttttcggagaagcttcttgtatttgaacaacatcagtagtgcttttattgctcgccactgatgattgttgagatgtagaagcagaggatgtagctgcatgcattgtaggaatactgcttgcagatggtgatggttgtgttatgacaggtgaggacatcggtgtctcagtactttcagttgatgacctttgtggtgttgttggtgtagatggtattgatgttggagttttactcttttcagatgatgttgatgaagcttgtgtagctgtaggagtccctggtggtgaagaggtagagttgttgccaatagaagcaggatcaaagcctgtcgtacactcagaactctgctctccactctcaggaatcactacagcacgactgctgacaggtaatggtggaaaatcatctggagtaaatagcgtagtagataccttttctgtatttgagtcatagtcttgatctctttgcagtggtctggttccctttgttggcagatcaagactttgtagccaaattttcatcagtggtgtgggatttcatgaaagtaaacacagtgtctagtgtttggagaataagataagcattgcttcttttatatctttctctcttagagtttctgatacaacttaaggcttatttatgcactttagaattaggtcatcacgcttccacctcaatgtctaatactgcaaatctgtttgtcgttttgatttgttgaacatgacagctggtctttgtctttagttcctgaggtgaaacttcctcctgcttatctttatctttattgtctttttctgcaggtagccgttgtgtgacaggaagctgattagtacaagtattgttgggcttggagatgggctttggtctgtacacagtcttgacaatcttcttgggccgaacattctttgagcctattagcaagacagtttcgttttgacctgctgatgtttgcgtcttcaatatcgctttgacttctcttttcccagatctagattgtacttgctcaacttctgtctgcttcttctcattctcttcttttgtaaccacagaactttgcagtggtctggtttcactaatagtatcgtcatgtaaatatcaacaagtttcagttcaataaagagttctttttgttcttgtcttctttacaagagaagagacaaatgtctcttgctctgtttttcttctttctctcaatattcaacaagggtgagctagtctccgatgccatatgtcagacaattgaggtagaaaagcagaagcttgagcagaagttttattgaaagctggaaaaattggatagagatctccactgttatcactgcggagaagagtcctcttggtgtgaagatccttaatagcaaaaccaaaagggtcaaattcgatagagcatttgttatcttttgtaaagcgacgaatcgaaacaagattattgataatgtcaggtgtgacaagaacattattaagagtaagaggacgagggttatgaacaagagatatagatccagtagcagcaacaagaatgcaactaccattaccaacaatgacatattgacatacggagatttgtacttgcacaagaggttaagtgagtcgttgcaccggtgtccactatgggatccgggagagaggaggtgctgaaagcttcagcaaaatcagccgtgctctctggttttggagctctgaaacggttgttgaattgttgaggttagtaggcaggtcgcggtccgagaagtcccaatccattaccaccattggtattgacatacggaggataactccaaggatgattccacatctgatacgggttttgatagaacgggggtctgttccatgagttgaaagtcggcctgttgtagtatgagaaacgacctcatcaggccaccacctcggcccccaaagtggaaaagattattgaagcaacaaggagaacaccgttcactctgagaatctcgaaacttcgtattcgagagtttcaagatttcaagcttcctggttacaatggtaagggagatcccaaagaatatctgacttctttccaggtcatcgcaggacgggtccctctcgagccacttgaagaagatgcagggctttgcaagttattctcggaaaatttgtcaggtctcgctcttatctggttcacctagttggaggagggttcaatcgacaatttcaaacaactctccactgccttcatcaagcaatacgagtacttcatcaaaagcgacgtcactgaggcccagctttggaatctctctcaagcagcagatgagccacttcggacttataatactgccttcaaagagatcatggttcaagtacccggcttatctgattcagcagctcaatccgccctcaagaatggtttgtggcatgagtcgcgtttccgtgaatctctaacagtaaaccgacctgaatcgattcaagacgctcttcatggagtaacgaactggagcgagcttttttggccaaaaagtttaatgttgcaccaaaagcttctccgccagccacttcgaaaaaacctgccgagctccaaaaaacgagcagaaggaactttctaagtagagaaggagctgcccaaaacttccccaaaagcatctccgtcaaaacctcccttctccccaaaaggcaagaatggagctttctcgagcaacaagtgggtccgagatccagacgcgtattgtgaaattcataaaatgaacggtcatgccactaaggattgcaaggctttggggaggctgttagctgcaaagtatgtctcgggagagattccttacattgacgtcacaacaatcgagctggcccagacagcgtacgacgtgttagattccgagaaaaattcacctcccaacaagaagcaaaaaagcgacccagctcttgtagctccaaagggaccgaagaagatggtcaaagtgattatgggaggatccaaactctttcaagattctatcagcgtcatcaagcaccacgaagggaaagtagtcactccggtggcaaaaaagcctaaaaccaatcaagctgaatggcccgagatttccttttctgaggaagagacctgccactaggataaacctgacgatgacgctctcgtaatttctctcgatgtggggaactgcgaagtgcaaagaatcctcattgatacaggaagttcagtcgacctaatttttcttgatactctcgtacgtatggggatttctaagaaagatatcaaaggagctccgagtcctcttgtctccttcaccatcgagacttcaatgtcacttggtacaattacgcttcccgtcactgctcaaggagtcgtgaaaatgatcgagttcaccgtctttgatcgacctgctgcgtacaatatcatactcggaacaccttggctctacgagatgaaagcagtcccgtcaacttatcatcaatgcgtcaagtttccacttcctaccagagtgaaacaaattttagggagtcagcgtacatcagaatgtgctatatgaccagacacaagctcaaaattaaatagcaaccacatctcgaggccgctccgaatccattcaaaaaagtaggaaatgacctcgtagaaagagtggtgataaatgaagagcacccggatcagcttgttggcatcggggctaatcttggtgaaagtttctgaaataaactcattcactttctcaaggaaaacaaggaaaccttcgcctggaccgttggagaaatgactgggatcagtacggaagtcatttcgcacgatttaaatgttgacccaaccctcaaaccggtcaagcaaaagcgtcgaaaactcggtccggatcgtgcagaagcagtaaatgccgaagtcgttagactcctcaaagcaggtctaatccgcgaagtaaagtacccagagtggcttgcaaatcctgtggtggttaagaaaaagaatggcaagtggcgtgtctgtgtggacttcaccgacctcaacaaggcatgtccaaaagatttttttccacttccccacatcgatcgacttgtggaatccagtacggggcacgaaatgttatctttcatggacgcattctctggatacaatcaaatcttgatgaatctggaagatcaggaaaagacttctttcattacggaacgaggaacatactgttacaaggtcatgcccttcggactaaaaaatggggtgcaacctatcagcgcctagtaaacagaatgttcaaggatttcctcggtaaaaccatggaagtatacatcgatgatatgttccatgcacgaacaagcttaaagtctcaagttctcgcggattttctaatcaaactccctcttgctactaccgagtccgatgtcccaagtcaaccctgaatacttcatgttgatagtgcttcgtcaaaataaggttccagagccggagttcgcctcaagtcacctacaggcaaaatcctcaaataatctttccggctcgctttcaacgcctccaacaacgaagcggaatatgagtcgctgttagcaggacttcgccttgccattggagtggggtgcgggaccttcaggctcactgcgattcacagctagttgcgagccgagaagtcccagtccactttgggggccgaggttagtaggcaggtcgcggtccgagaagtcccagtccattaccaccattggtattgacatacggaggataaccccaaggatgattccacatctgatacgagttttgatagaacgggggtctgttccatgagttgaaagtcggcatgttgtagtatgagaaacgacctcctctgcctcgaaatatgttgttgcctcttccacgacctctgtaacccatctgattaccgcctgatctttggaagttagtgacaggaggcgcctctgagcaagcaagaacggtggatgaagaagaatgatccacatgagtcgggtttggtttgatcgccctcttcagacgatcctcctcttcctgcaacattgtagccgcatcatcaaagcttggaaacggctgacggtgtttgatgacatttatgatgttgtcaaactttgggtttaacccgttcaaaacgtacatcacaagatttcgatctgtgacaggaacatcgacatttctgagagagtcagcaagtttcttcatcttacgataatagtcagctaccctcatgtcaccgatgtccttggttcgaagctcactgtcaagacgcaacgccctagcatctttgttgtttcggaattgattcttgatccggagccagatgtctcgagatgttgagctagtgacgaaggaaccttgaaactgtttgggggttaaggttccgtaaagcgaaagcttcacgatcccgtcacgtttttgccaattgacatcgttggcattagtaggaaggagcgtgccatcaatatgtcccataacatcaaaggataggcaatgggtgagaaagagttctctccacgcatcatagttgctttcttcaatgtcaagcatcaccggaatgtgagacttgatgttagagacaccatagatctgttctgggttcatgacaacaaccatttttgagagaaaaagaaagaagaaaaagaagagagaagcgattaaagagagctatgctctgatatcatgttagattgtgaaaatctcccttgaggagtagctttgcattcgattcaatatatacacatttcagttacaatagttgagagatctcctatattctagatacaatcgcataatatctaaacttataacaagaagaatattgagaagaatataagaatattctatctcctaatatcaccaactcctttgccataaacacgaacaagaagcttcttgtgatcaaaattgttatccttttcttttataaaaaaaaaaattgttatcctttataggccaagtaaccataaaaactttgttagtcattgcacctttcaacacttgaagacactcaagatcttcaactacatctcccatttaccggacagagtttgaaatactgtctttagactgtctggtgatgaaatagggatcaaacccaacagttgttttctctgtctatgcaattgttgtgatttctgtaggaaggtatgacagaagctctctgctttcctaaacattctgaattcttaagaaatgaacagttgaacggaggcaattttgattcagtgtctggatgaattttgaattaaactcgtatctatgaactaagtgttattaatctcagccaaaattttaggtgcatgtcttattatagcttaaaccctaaatcgaaaggatacataagtaattacgacaattacaaacactaattggaatatagaatccattatgtatctgataccattttttttatctgattttcttgtagttttgacaaaattatccatactcagatttagaaaatcaattactgattataccaatttttagaattgcgattgttgattttgttttgccattttttcgaatagtttatggatattatctattttcaagttttactcgttatatttgaagtttagtcagtttatatttgttttcaaggtatttctatttttttttgggttgaggttgtgtttttctgagttagattattcgggtaaaaatattcctacccaaatttccaattcactaggttcgtaagttggattggtttagatcaactacaatctatttttacaattctaatcgtaaccaattcccggtttgtattaatttattttaatattcatccaaaccgggaattggtgatttcggttcggtttgaatagtaatatttttgccttttagagaagggtttatgacgaaagctctctctggcttctgttgctctctcagtctctctaccttggttagatcttcgtcttctcacgtatggttctttattatctgctcctgaataaatcttcttcttcagcttaattttaaccttttgtttcttaaatggttttagatggatagtgacattgtttccagtagcatagatcgatctcagacagcaatgcctggtaacaaatttcccacctctaaaattgaatttagtagcgtttagtgttagaaaggtttgattttttatgccttttgttcttccattagagaaagattgaaaaattgactaaatgtacgtttttgtgtggattggttatgtgtatgttacttgtagatgctttagcattcaagagtatcaatgatcctatcaagaaccagatcaatagttgtgctgcaatctgtgttaagcaagatgatccatgccatttcttgcgtgtcctttatggtatggttgcaaacagattttcatgtgcttttgttattgaaagatccgatctttgtttttaaagttcattagatgttgttttgcagagtctctgataacaggagggttagctggtgttgtggtggaagctgctttgtatccaattgatacaatcaaaactcgaatacaggtagtttctcctcaaaccaatttgtgtgttatcatccaacataagctcttttttattattattgtaatgagagtcagactatgaccaatgcttgacttacaatggctaactatagtggtttgacatggttaggtagctcgggatggtggaaagataatatggaaggattatactctggtcttggtggaaatcttgtcggtgtcttaccgtaagtatgtagtcagaatgaaagaaggaaaaatatatgcaatcaacttgaaaacctgtgactctttgcttcaaatgaacaatgtttttcttcatgtgtagtgcttcggctctattttttggtgtatatgaaccaaccaaacagaagctgctaaaggttttaccagataatcttagtgcggttgcacatttggtatgtattatcttaaaactatcctgaatctaatttaagtgttagtttatctgctggagaaagatgaatgtcttcttgacctgcttgacctgtatatattagtcttgctaccattttgttttaagacttactcatttgagacagaggcccttagaatctagttatgctctgttagaaagtatatatgtcttagcgagttatataagctcaattaggctgcaggtgcgttaggaggtgctgtttcatctattgttcgggtaccaacagaagtaagtctcttccttcttgtttctttgtttattcttgtgtgttggctataaacttgtgtaggctaatggaaacttcaacaggttgtgaaacagcggatgcagactggtcaatttgtttcggcccctgacgctgttcgccttattatagccaaggagggctttggaggcatgtatgcggtatacctgttacttcttgatttatggttttagtgttttactattttatttgtagcaggcacaccttgaggttaagatgaacagacaacaaaagctccatgtaatgtaatatgttcctaaacatgcagggttatggatccttcttattgcgagatttgccttttgacgcgctccagttttgtgtttatgagcaattacgaattggatacaagttggctgtaagtttttgttgctacaatgataagtaacagaacatccgattttgcaggcaaatgacagtgtgatatccatttgtttagaacaggcaagaagagatctaaatgatccagagaatgcgatgattggtgcttttgctggtgctgtcactggagttttgaccactcctcttgatgttatcaaaaccagattaatggttcaggtatgtcaaaacgataaatacacaaaatactgaaagagaattgttattcttggattcatttcataggagaatagaagctccagtaatatattaccgacttttcattttgaaatttggcagggctcaggaactcagtataaaggagtttcggattgcattaagacgataataagagaagaaggttcatcagctttgtggaaggtgaaccaaatttctgctcttacaattctcttttaggaatacacagtttctcatgtttgtgcaaagttgttgacaaacttgagacactgtattacagggaatgggtccaagggtattgtggataggtattggaggttcaattttctttggtgttttggaaaagacaaagcagattctttcagagagaagccaaaagagtcacaatgcttaaacagttagattctatcttaaacagttagattctatctgtgttgtctacatcattcttgtctcttgatgttttgttgaagatgaagtatttagattctttacgtatcttttgcttgattctctttctttttctcctagaaaaaatgtcattctcttttgttaatcaacttctacatttaaattgttttttaagttgaatctatcactggatagttactgaaacttaaactttatgtggacgttataaggttgcgtaataaactatgtcatcgtcactatcaaagtcttaatctctcaatttcttgaatatatatatttgaatcatttaacaattgttttgattcctttgtaattgatccccaccttttatacaaacaaaaagttgaagctgaattttttttgcaggttttaagtaaagatgatgcagaagaagctacttcttatagtatcaatcatcttgaatctcgtattcaccattcatattctttattatagttcaaccacatggaatccaacgtggaccaacagagctgcagcggaagcagaaactgtagcctctttttcatgctcaggccacggcagagcttttgtggatggtcttggtgtccttgacggccagaaacctccttgtgagtgcaacaattgctacataggaaaagattgctccgttcttctcaaagattgtcctgtcgatgctaactcgtatgcaacaacttttcatcttgatcattatgaccaaaccaatctgtaaactttgaataaaactgttatttttttgcttttgtggattctgaagaggagaccctttgttcttggagcctttctggatgcgacaagcagagagaagcgcgattttggtctcgggatggcacaggatgagttatatatacgaagatgggacatatgtgtctcgagagctcgagaaggtcattagaaaacttcatagtgtagtgggaaatgcagttacagataacagattcgtaatctttggatctggtaccacacaattgcttgcagcagctgttcatgccttgtctttgacaaactcatcagtatcatcacctgcaagacttctgacttctattccatactatgctgtaagtaagccggccatcacctctgctgattagtaaaaaattatcgaatgtttgagtctgatcagtctgtatgcgcagatgtacaaggaccaagcagagttttttgattcagcacatctcaagtttgaaggaaatgcgtctgcgtggaagcagagcggacgcaatgataatatcacacaagttatagaggtggtgacatctccgaataatccagatgggaaattgaaaagagcggttcttgatggtcctaatgtgaaaacacttcatgattatgcttattactggcctcatttctcacctattacacatccagttgatgaagatttgagcctgtttagtctctccaagactacaggtcatgctggttcaagattcgggtgactgatttacttttaccctcctagtactctaaaaacaatgttctggtttggtcacaacagctcacaagtttttcttgatgcaggtggggattggtaaaggacaaagctatttatgaaaaaatggatagatttatacgtttaactagtatgggagtttctaaagaaacacagcttcatgttcttcagttgctcaaagtagtagttggtgatggaggcaatgagatattcagttttggttatggaactgtgaagaaaagatgggagacactgaacaagatcttctccatgtccacgcgtttctcgctccagacaatcaaacctgagtactgcaactatttcaagaaagttagagagtttactccttgtaagtttctcttctaactaatgcaagaaagtgagacttttgttttggtttggtacttataagtatgtgtgttggttttcatttgaaagcttatgcatgggtgaagtgtgagagaccagaagacacaaactgctatgagattttcagagcggcgaagataacaggacgcaatggcaatgtgtttggatcagaagaaaggtttgtgcgattgagtctcatcagatcacaagatgactttgatcagcttattgctatgttgaagaagttagtttaccatgaggaagatgttccttctgaaaactttatgtatatttaggcctctttgttaaagcctagcgcttagtccaattctataaaacctcaatacgtatttctgattttgtaaagctttttgtaaatttcgtgggcttgtaattatttcaatttctatcagaatctttcatttcggttcggtttagcaaaagttctaattttgaccaggatttatattttcttaattattctgaattataattatcttgctgtgtttttttctctctctctcttaaatatagaaaaataaagagctaacgagcgggaaagagagaaaagttgtaatttccgattgttttatcttaataaaacagcaattaaaagtggacataactttcatgtattttcagagtaaaccaataaaccatgtgtgcattcttgctttaaatttcgtattcttaaagttagatttgagataacaagaatgatatatacaagcaaagttgtgggaaaattaaaaagcggtgtgcacttaattacaaactgcaagcaagaaactgaaaaaagatccaagtatttcttagatatgtaggtataacatatgtttaaaacactttgtcagtagaagtaatagccgtcacttccagcggctagccagtcaacacctatggatatagaagtaaacgctgacataataatcatcattgggttaaatgtcatcttcttcaaccagtgtctgatgactttataggtcataaacgcaaacagacctccgagcatcaaggtagagatagaaagaacagttgtgaacaaccatctttttccttcgacatgcggtatgattatggaagctgcggaaacataagcgagtgccatggatgccacagccacccaaagtatcctatgtgttagttttaagaagttcttgagtggtctcgtcctgtaaggtataatgctgacaagaaggattacaatgcaaagggatgtgaacaatgcgatgttgttgcttatagaaaacacttggaaggccaacgttcttcccgcagttgattttcctttgtagggtccttcttgatagacaccaccaggaggatttataccgcaggtgaaggcaaccgaggcaatcaaaactgcaactattgtgattgtgttccttgcgttcagcaatgcttctgcatgcattttactttccctctttgaaggcgtttcaaatatctgcatcttcttatactcagataatactcccatgtttttgttcccttgttgatgattaggatcactaaggcttcgaatttgttttgcatcaaacctgagccaccgggatattttactataatcttcatcatcgacgttgataagatcaaccgctttcaaacctctattatttttggcagagagatctattgttgtttcataagtgatgctgactatcacctgtgaattattacatttcaattaggaaaatactaattaatattaggaaaaatatgaatgattaattatatctgctttgaatgattaaaacaaggtggctatgacgtcccatgtatgatgtatcatttaccctgctttgaatgataagatcatatggaacggagcggattagtccactcccctcaatacatttgaaaagcataaatgttttttaagcttctatacgaaaattaagagtgcaagaaaaaactcacggaatagcagctggacatgaccgcagtgtgtagtacagtgttgccatatctatctacctggtggagaagattgtttctatcgggactctctgccatgaaatagaacgctagtatatttttgtgttccgcagctagatggaagacggtttcttttgctggtgttagtatgtcgaaatatcttggagccttatccgaaaactccttcagaattggaattgagcatttcatggccgccaaatgcaaaggtgtgaaaccatctttgttgaccctctctgcaaggctttcatcaatctctagcaacatttttgttatctcgaggttgttggcgttgcacgcatgatgcaatggggttgacaattctccatcggcattccaagctagttttgggaacctctctagcattctccttgcgatatctgatcatatgaacacatgtcagtacagtgatcgacatgtttccatgaacacatgctgagttcatatttattagttcttttttctttttttgaattactaagaggtttagacctacgcccgtacatctcctcaggccagagaccagaattttttattagtcccctcccaagtgttcaaatacgcgacctctagattttgcatgaaagtctttaacacttaactatttacactttgttcaagagaattaataaaagttcaattatttttctctttttcatgtacgaatttaaattttgtattagtgaaaatttgctttgtctttgtgaaaaatctagtgaactaaatttgacttacaatcaaagcttatccaccagacaagatttgagttacgcgttccgtatactatcaagtcataattagctctaatactaacttgatagaaaacattcttttgtaacactacaagttgtcaagttgcatgaccttggttgcttattatgtatagttttataagtaaataaataaacacactaacccgtatattctccaagaacaaacgttgcataaaattccccgattgtgatagaacttgtttcttccaatataagactagcgacatcggggttagtgtagcggcaagcaacaacgaaggcagtttctcctcgtccgttgaccggggtgaactcagcatatccagacgctaatatctgagccacaatggtcgcatgtccccagcgtgcagcaaaatgaagaggagtgtcgccatcaaggttggtaacaccgactagagaaggacaaagcttaattatcgcctcgacaatttccttatgcccaagttcagtcgctagatgcaaaaccgtcccaccgagagaatcccagtggtatctctccctcaataccgatagattcccctctgcgagagcgagtaaagtggacacgtcgtttgcgaggatggcatcgataattggtgcaaccatcttcttcttctccagtgatttaaggtgacttttttcttgcatcatcatctttctagctagaaattgtgctgatatttggtatgaattaatctgttgatgggttgctttaaatacttgtttgatgtcatcttttaaaattaacaatgccggttgaaactatatattcgtattataagtttgttacttccccttccaagaagcatccgttaaaagtcaacccgttgagacgtgaaaagaaaatgagaaaaaaattgaaactgcacccattgcttgttatcttccatcaaagtaaaataattcgattatatgatgcagcacatcttctagtaattaactagttgggtttttgatcgaacacgtttatggacttgaacttgtgcgacaagttttggttttcattaattataaatcttttgttttgcagtaaggattaggatcgattatgacgtaatgcgtttagtataattacaaatcagtattcaagaaagcgtgtagaacactttaattagaccctcaaaccatagtaggcttttattaaataaatgaaaaatatatataaagtaaagttgattattattgttataacaaggtcattacctaaaaaattgcaatattatatgaatcaatatagcttaatctcacaactgtgctaagtatgaaattgatttttatttgtcatcataaactttattttaaaaaccgatgaatctacatacgccaacggaaagaaagaaacatcgtaggaaagtagctaagcaaacaaaaaatgttaaaatctccggagacataactctaaaatttgagacacattgtgaaaaatactaaatatatatattaaaactgctaaaccaaaatttttaccaatgaaattttaaacctatcaactgttttttttttccaagggcataaattgttttgatgttgacgaaaattcaaacctcaccaaaaatttatgatcttcatatacttgttctttgcttagtagacttctgaagttgaaacatatgcttacttactcggccttgatgagtctgtctcttgagatttcgtaaccatctagatagtgataattttaaggtatactcaagtaaagttagattgaggaaaaacaagaattaaacatatctcgagcagttctggtcttgaattcgagtggaaaaaaaaactgaaaatgtggtccaaccgcttcaccttccaaagtagatgtgaaaaattctagattaaccgattgaaagcgaataaaaaaccgcaatggtaggaaaaggaaacataaaaaagaacttgactcaaaacagctggccaccaccacacaatcttagaaacaaaacatatcaactctattccaatcaacgacagagttgggaatcttataaccgacgatggttgaaaaacgactatcttctctattttttctctctttataatttacaattaaagttgttatgagtgttttttatagacaaaactacaaaaatcataaaggcgctaactctattggactttttcgaaagctcatctagagagtaattcacttacgttccaaactattttatagtactttgggcgtcaaaaggactttaaggttaagtttaacgcataacaaacaaaccatagatttagcaatgagtaatcagagatttctctaattttaatttgcatattagtttttctatcaaatttacaaaattatggtaccgaaacatcatgatctagtaggtataataaatctgtttagtttgccaatgagtgggggtttgagttgtaatggacattttctatagtgctaattcgcctcttctatgctttctttatgattttcatcaaaccaaataacttcagaactattactaggtttccaactcaaaactaattggcaatgagtggagaaacccatatatattatatatcttattcaacttttaatgtgggacattgttctccctaatatatgttctcgagatgataactcttctatctattgatgtcggtatgttcgggcatggatcggtgcaccaactattaggccggatcgcgatgtggattaggttgggtatatgtagattgggatctgataccatattagactataagcttccaactcaaaaccaattgacaataaataaagacacccatatcttagatatttcacttaaattcttactcaacttcaaatataagacattgttatctctaataaaaacatcatgacatgcatacgaagatgttcaaacaaattgagatagtgtcgacatgatggctgcaatgtttgtaaaaccctaaagtttttaattgaattaataaagcaaaagcttaactatcaaaattaaaaatgtcgaagattcgtgtttactctagcaatgacaaccacattatcaatttcagacaatagttatttagaactaaaaaataaaaaaaatggacataaaatgacttacaacgaccttcctatggattaaatagttaaacaagtctatgataataaaaaagaaataccttcggaaaataaaatgttatataaaaaggagccaatgcacaattgtggcgacattatgaagaagataggctaaacaattataacaaactacagagtttcgactataaatagatcataacacatatgcatttctatcactcaagtcaaagtttatataacagaaaaagaagaatattaagttttgaaaaagaaaagcgaaaacaaaagaaatggcaaagaacctcaacactgtcagctttaccgttctcttgcttgtcctcttgatggcttccactggtattaattacacgaagctatctattatccactcgagtctaatttgtttaattatgttgtgaagatgaacttgatgaatatgtcaacatgtatgtaggaatcctagagaccgaggctgcatgcttcaagttcttaggcgagtgtggggcggtcccgttcccaggtacaaatgctgattgcacaagctgttgcgtggggaatttcgggtctgcagtgtgtctggacgtgttgaagtcgagggaggcgtgaaacactgccattgctacggaacgtcttgataacatcaacaagtctaacctttgcttccattccgtgtgaggacattatgtgtgtgtatgttaatgttcaagtttcttttgcttccaaataaaacatcaagggcaaagcttaactatgcttgctccaaagtctaagctcatgttgtgtgcactttcgtttctttcttaatcgtaaacttgttttgtgtgtttgggtttgtgttcattcattccattcaccgctagtgacagttttgcaagtttatttttaacttacaaaatatgcaggccaaatccaagagatttatactctttaagtttaaagcaatatttagatcctcgtcgtgaggaatttgcatttgatatgtaaataataatttagtaatagttaagaaacttgatgatattggaccagtattactggtgaccatttatactactagtaaaaaaaaaatttggttggagagaggtctccttcaatttattccatgaaaataaaggaactacatgagaatgggacgaaaaaaatccgtcccattagcatcctctaacataatcggtttaactacataggacagtaattaaataaaagaatatacctaactgtaatgaaaacacatagtttgctaatccgtttgtgagacggttagcctccttatacgcgtgagtaacccaaattaaacagttttttgaaaaaaaagtcatgacacatacgtatcaggaatgctagaagataaacgtcgtttacccttgtccgtataagaccaactaccaactcagaatccacctccaacggctaaaccaagattttaaagatctaaaaatgtcaacaatactctcaaaacctaagatgatcaaagtcaatcactaaacgaaactagagaaacctcctataacaaatcaatactacctcccaaagatagaaaacctaaacttctactctgacaaagttggaatccataatacgagcgacttgccggtcagtggctacacttacgaacaagcttaaaaaaaaaagataatacattgatattaaagttactttccttgcttggaggtgcttcataggtttcaaacatttgcattttatattcaggtatattcccaatgttatggtttccttgttgaggacaaataggatttcgcatttgttttgcatcaaatctaagccagccggatatcttaccataatcttcatggtcgacattgataagatcaaccgcttccagtcctcgagtgtttttgacgtagagatctattgttgtatcatagtgatgtagagtatcacctacgctttaatcaaaaattactaattaatattataaaaatagaatgattaattatatctgctttgaatgattataaaaagtggctatggtcccatgtatcatttactcttctttgaatgataagaataagatcatatggaactgagcaaacgaatcttaccaaaaaagtacgaagtgccaaaatgcactctcgtttttggtaagtttagtcaactccgctcaatttatttaataaacctaaatgtcttttaagcttccatacagaaattaagagagcaagaaaaaaactcacggaatagcagctggacatgaccgcaatgtgtagtacggtgttgtcatatctatctacctggtggagaagattgtttctatcgggactctctgccacgatatagaacgttggtatatttttgtgttccacagctagatggaagacggtttcttttcctagtgttagaatgtcgaaatatcttggagccttatccgaaaaatcattgagaattggaattgagcatttcatgcatggccgccaaatgcaaaggtgtgaaaccatctttattgaccctctctacgaggctttcatcaatctctagcagcatttttgttatctcgaggttgttggcattgcacgcatgatgcaatggtgttgacaattctccatcagcattccaagctagttttgggaacttctctagcattctccttgcaaaatctgatcatcggtccacccacaccctcgagtcatatgagcacatcatgttgaatttttatttattagctactaatatataggttcagtaatcaagtttgaaaccctttattatagtcagacaagtttctatgattaattaaatattcaattatttttctccttttcatgttcgaatatatattttatagtatacgacggttaaaatttgttttgccttcggaaaaccagtgaatttgacttccaatcaaactttataaaccaaaagaccaaccaaatttgagttacgtctaattctgacttgacatctataaatcattttttataacacaagttgcctattcttgaccaagttgcttattaattattatgtatagttttataccactttacctgtaaaaaaaaactaaaaatgaataattcagcattttcccgctaaataagaattttatagttttggcagaaaatatgattttacggttttggcgaaaaatgcaattatgcaattttctcgctaaattgtgattttatagttttggaagaaaactatgattctatggttttgtcgggaaaacataattatgctaaaatcgtgtttttatagtttttacaagaaaatgtaatttgcctaccaaaatcgtaattgtcggttttattgaaagttgatatttgtgattttacaatttttagagatgttaaaatataaaatgagaaaactataaaagtattaacattatttaatttattaaataattctttaatttaataggggtattttagtaatttagaattttaaaatataaaatgagaaaactataaaagcattcagatgcatcacataaactcatttgaatgcatcttataaaataggcttttttggatgagtttgtcaaacgcatctccatccaacttatctgcaaaactatacttagacgaacatcactttgcatctacagctagatgcatcagtgagatgaggaaacaaacatgacctatgagtggaaatcggacaaatgtttaaaattgaaattgtgatatagatgcacgcctactaaccaaaaatggttttgaaatcaaaatttacaactataagtgactgaggtgttctagtttttctcttctatcgacgaggatgacagtgctaaaccagggtcgaccatacaagaacgatagactagtagccgacatagactgcgacatttacaatatagcaatcttcatttgtatcacccattttttcaactagaacgccacttgaacaaatcaatcctccatccaccacctctacattaacaatcttcccacctcaaacaaaaaaggaagtaatgattgtgataacatggtagataaagctgactccaagactaagtaattagatgtattcccacaacactatacatgatcaaataaggcaatgctaatcattcttaatccaacttcaaagtaagttatatctagtacaagccaaaatttcaactccaattttccacaacaatacttgaaacaaagaactcaagtttcttttggaaagacaacaactttgtttagaaactctatgatagaagaggttacttgtggaacttcctatgggaagatattcttaccttctccaaatccagctgttgatgaagagaatgaggcactccaagcttaatctgcaacttcattactccaaatgaaactcaaggaatcgaaccttcgacatattcaacgccaccaagtcaagttaaaagtcaacagtttccaaagaaaccatttggattatgttcaaaattcctttcatagttgagcaaagagactgtttcagaacaatcttacaaggcggagagttttggtacctcttctaaaagcaggaatcgaattcgaagaaattgcattcttacaagccttcatagccgtagatgtcaagtcttgccagtttcgagttttttaaacattttcaagattcagtctcacgactctcacatcagtgtatgatcgattcaagacgcaaaattttgagagtagatttgatcgtactcgtgcagatcgtaaacccacacccatctcaacgaacaatagcttcatcgtattgttgggaacaccgctggaaattgtctccgccgtcgtcatcatggcgtttcttgcagtgactttgatcgtacgtgagatatgagtaaactggtggagagagagttgcttattacaggaaaagagggaaagtggctgcgaagaagaggttctcaaatacaacggagattgacagatacgatgctcggagcagataacaatcgaaccagaagtcaaggaaatagacattgaactagttgcctgattaatttctctatgctaaatatctgggacaaatttgaaagaaatgaaaaatagaggtgttgttttcaaaactcaaatttgagacgaaacaacttcgttttggaaaaagatatagtattttttatttgaaattgcggtttacaaaaacaaaccgaaaccacgctaaacaacacggtattgataaatcatgtattagcacatgtgattcgaaatgtacgtttgaattttgtgtagagttttaagttttaacggacaaaaatatcttgattagggggggaaaatctcattttcaattttgaatccaaatggtttaacggaataaacaagggcattttccgtagttacatattaattggcttaaccactacaaacaaatacaaagctttttctttttctctttgcaaaatattcatttcattcacttcaaaattctcttccgattattccagaacagaagcgtgtgattaaatctgggtctgttgcttcgatcgttgaacacaaacgcacaaatctctcaggtataaaccctattcttagcgatctagaagaatcagtgtgatgatgatcttcgtatcatctctgttaatcttgtttattgctagtttttgaaagattaaatagatatatgatcaacgttttatggttttgaataacatcagttacatgtgttttgatttgatcgttgtttctttgattatgaaaatcacaactatttgtgatgatttgtctctgtttgtcatcatgcgccacagccgatgcaattgtaaacgtttcgtgattcagttttgtctctcaatctcataatcacttttgctaattcaaaactttgaaagctgttttgtggctcaatttcgtgtatacttgaataagaattgtgtagaaaagacaaagttattactgactattttccaataatatttgtaaacttgcaggaaaacataataaagctcgctgatcagcctatcgcagtagagaagatagggatacttgttcaaaaaagcttccaaggtaaggtctagaagctatagttcttagacttgataataccaaaacttggccaatgcttactcataagatgttttagtgtccataagatgttacctgattctctaattgatgtttttcatatctccatttcaattgttagcaacacttaattatttgaaagagtcggattagaaattttaaactatattcttggagtatctcgtgaacatagttagatagccaggatattccataaagaaggttctgttattttttgttggtctagttagttttataatctctgtgtttgttgccgactttattgatcaggtacttcacgttcaaaagaaatatctttaagctgcaaagaccaaaagtttcagcatacaagggttgaggtaagtatctctctctcttaccacaaactggccatagactagtcctctggcctgtggcatgttcatcatgtattttttccatgttgttttatcccagaaatagatcaaagatggcaaaaacacaaattcacgctcaatcacaacaaaattctaaaacacaaattcacgctcaaacgaaatttaaacacacgaaaacataacacaaacacacttccaaacgcatgcatattcaaaagaaaaaagaaaacacaattcacgctcaatcacagaaaaaatctaactcaaacagtaaaactaaacaataggaacaaaaaacttcacattccacgaattgatgtgtaacttgcagggaagagtcctcttctgattcccaggtacttgtttattctggttatctccataatgttaaaggcttgatgacctctgaatcgggtttgattattaaatggttatagtttatggaggaaccatggacggtagattggatgacatggtcttgtgatgctcgaaactcgattattctcgaaccagtgagtaagattaaacattgacatttgtggtttctttcttgattgttctcagctcttcggttccttttcttttgattagtgattacatattaactctgctcttatgtttataatgcaatgtcttccatggtagatcattctaccgagcttttcttcttacaagtcaaatcagaccaattctgcaaaaagcttaacctctgtcaagaagtgacggcccttgcttcagactgtcaccaaactcaaggatcctgagacaaaggtttgcaccttcctccactatcacaaactttaattttgaattctcaattgagatattgctgctaaaaataagattttatttatgccttgcagctgaaactccgcatatctctcaaggtatccagtcgctaaacaattaccaggaaaaggtagctaactatagaatgcccgcaaagctcaaagtgcctcaaacatattaatgattttcttagctgcttcgataacccatttctgccatctcctgtggtacttttgtggatcagattatgatgtgtttgtttatgatggtgccatcttttgtggtactttttatggatcagattattgatgtgtttgtttgtgatggtgaatagtgcttgaaggtggtgtttgagtacggcctctgatgcttgcggaagtttccccaggtacttatttttatatcgcattctggttatctcaataatgtttaaggctttttaagagttatggtttctgtctttttgacagacattgtattttcggttctattgggtaattaattactttctgatcaggggaatcaacataatacacacagaaaaaggctctggttgtggatgacagtaacagaatcccctaatcttgagcctcagtgataagatggccaaaatctcgtgaatatgggagaccaagcattcttttagtgcatcctgttaaggtaatttgatttgacggtaacatgtttcttcctgttaaatattcgttttatttttaacaagggttctttggtgaccaaagaactcttgataaagggtttcaagatgaaggagtgtttagctgcaaagaagatctgaagaccattcaaaggtatggtgattgatgaagtagctcactctctctctctctctcaatctttctctctctcacttatcacatctcttgcactgtctcaaaaacagaacataaattcacgaaaacacacgctcaaatgcacacaaaaaaatgaaacacaaacacaacttaaactcactaagacacaacgaaattcaaacacacaaaaccaaaacatagcacagaacgtccaaacaacttccaaaacagaaagcaaacttttacaaaaattctttaaccaaaagtgtggataatcatatttgatgtcaagaacttgctttgtgaatgttccacatttcttactcttttttaatatattgccttagaatagcttctattaacttatttcttggtaaatggtttcatgagaaagaggaaatgtctcagatgcgtttcaacgtactcatgaatgataaggtaatcatgttaaacctattcccatcattttatactcttcttaatagaaccaatgtgagtttaatatatattccaagtattcaggggtgtagttataatcttctattttcagatgatagctcccaccggttctgcctcaagattagagaatgttagtgttttattgcatgttttctcaaattaagttgtgtggttttgtccgtttgatgtagacattgttcattattcatgtgtattgcaggaatataacttagtgtgagcctgctgatgtatctgttaaggagttggtaaatagacttgctgatgtatctattaaggagttggtaaagagacttgaagaaggtaagcttttgtttggtaaagtagtttcttagaatgttggccaaagattataatgactgtgttttctattgtgaaatattcggataacattattcgctaaattatattaggactaacaacacttaaagacgtcagtgaaaaattaaaagtcttgtgaatatgggagagccaagcattttcatgttaaggtaacttgtttctttagtatatttagtgtcatgattttcaacggatgtgaaattcatttactttgcattacttttgtcaggttaaaagtatgaatgagaagcaacggatgtaacagtaagagtttcattaattatttctcggctataattttgttgtataaattttatcttgtgattatctttttttgatatgtttcactatgctcaaagtaaataacaaagtattctaacttttaggagcagcaaagaatcttggtgtagctgagaacaagtgactcttggatgacgtaactgagttagttacggtaactctctcttgctctctctctcttcaaaaaaacacatccaaaaatgttccttacacaacgaacaaaaaaaaaacactaaacaccaccaaaaaaaaaaaaaaaacattaaacttaaaaatgcaaaaataaactccacaactcacgatcacgtaaattcaacaaaatcatgataacataaattcttgaaattcaacataaacaaaaaaacattaatttaaacacatgtaaaaatacaataaaaatgcttaaaataaactccatattttcacgatcacataaataaatcataaacaaacaaaaaaacattatttttaaaacacacgcaacaagtaaatacaaaaatacaataaaaaataaacataaattccacaaattcacaaacaagtaaattaaatcataaacaaaaaaatattaatttaaacacaggcaaaaatacaataaaatactaaaataaactccacatcttcacgatcacagaaattaatcataaacaaacaaaaatacattatctttaaaacacacacaacaagtaaacacaaaaaatacgagaaaaatgcaaaaataaattccacaacttcatgatcacataagttccacaaaatcacgataatagaaactccacaaattcacgatcacgtaaaaggaaatacaaaagtacaagaaaattgcaaaaatacactttacaacttcataatcacagaaattccacaaattcacgattacaagagtttgcttaggcatgattataaccgtatttcggtttgtaaccgaactgtctttaaataataactagtttgtaaacgtatcaagcggttaaaaaaccttaaccgttaaccataaaagtattagctatggactatggttaaaaatacactaacttttaattaaccatacagtcaaaaccttacaaatatattgtaaatgtgtataatgcaaagacaatgatcgaatgttccgataattttttttttcttaatgataatgcatatgtaaagatctatgttaaagacaagtaatgtctcaaacaattatgttgtaatgtcatattgcaaaataaagaaaaattgatctacaatatttttttccatcttattaaaagtgtaaaaggtcgtataatttgtaaaattttgcttcttatgttactcgtatcgtaatcatcagttaaccgtaactatattaaatcgtaattgttttaaccgtatatatatatagcagttaaggttacgattaaattttttttataattataaccgttggtttaataaaccgtcactatggtcatgcggcatgagtcatgcggcatgagtcatgcatatgtatttttctttttttggtcatgcctaagtttgcttcctctcaaactcattttaaatttagattcttatgagaatggctttttgagcagcactaattttcactcaattcttgtttcaatattctcttcctaatatatttttcagcgtcagtaaaaatatcgtgtgatcaatttttactttgattttatgtctgcatattattttttggtttgtaaagtttttgagaaattgtaattcagatatttcatttacatatcaattaaaataaaaagttgagtcatcatttacactcaacttggtatatgaacacaaacattcaatgtgacaaactcacaccagctaaaaagcaaacaaaaaagccaaaatctccctccaaacactgaaaatctgacaaaatgaaaactagtgaggaaatatccgagaaatctctgatgcagacttggaattgtagagttttctctatcgtgtccaaggaatccccaatgcggacttggaatcgtcgaattttttctatcgagtctcaggaatggtcgagttttatctatcgagtccaagaaatcatcgaccaagacttttgaaatcatcgagttttcttaatcaagtccgatgaatccccgatgcggatttggaattgtcgagttttctctatcgggtacgaggaatccgtgatgcagacttggaatcatcgagtcttctctgtcgagtccgagaaatcgtcgagttttctctctcgagtccgagcaatcgtcgagtcttctctatcaagtccgagcattcctcgactgggaaatgaattcgtcgaggaaaataaatcaagtctgaggaatcttcgatccaaacttgaaatcgtcgagaaaaatctatcgggtccgaggaatccttgacccgcacttggaatcgttgagaaaaatatatcaggtatgaggaatccacgttgtcgacttggaatggtcaagctttctctatcgagtctgaggaatcgtcgagtttttctatcgtgtccgagaaatcgtctaccaggacttggaatcgtcgaggttatctatatcaagttagaggaatccctgatgcggacttgtaatcgtcgagttttctttatcgagtccaaaaaattgtcattgcggactagaaattgtcgagttttctctatcgagtctgaggattcctcgaccgagacttgaaatggtcgatgaaaaattattggacccggactaggaatcgtcgagaaaaaatctatcgggtctgaagaattgttaacctggggtcggaatcgtcaaaaaaagattatcgggtccgaggaatcctcgatccgaactttaaatcttcgagaaaaatctatcgggtccgaggaatcatcgattccgacgtccgaatatccaagaaaaaaagaaataactgattaactttcataaattatcgtccacgatgcaatattttgcggtcgaaactcttaaaattcattaataaagagtttaggatgtcaagcttgcatcaaatgtgtccagggggcacagctagaccatgagaatccgatgttgttttaggtcaaatgacttagctggaggtgttagaaaattacgtaaattttcccgaaaataggattcactattcttataaagcatgccaaaagaattttcaaattccaagtattgtttttttggcacgagtgactccttagacatttcaatgtctactcgtgccaagtcaaaaaatagatataaagctatatgaaagggtgggtgttgagggagtctgcacagaccaagggaacctgaaatgtcctaacctgttttgcaaatccgccaaagacccaaaattgcagcaaaactccgatttgctcttaaaacacagatttatgacaattttggctagccatttaacctaaccgttctacgcagcagaaaaacattacaagctagacccttacttaaccaataccttagccattcgtagactctgactcatttacattcatgtgcttccactatctcaccttcaactccaaggactcgatccttcattagctccactatcactcatagctctcttgcatcaattgtaccagctactaataatttgtccaacatctccgttcgtaccgagtcattcaaccaaccaagcccacgagactatgtacaaagagagacgtctggattacacattagacaccgaacatccgtatcactcgcatgtaccactagaatcaccagaaccttaatccttccgatcaaaagaacaatcagacccattccgctctagcttaagtttctccaaacagattcgctctctgatggcatgatttaattgaatcgctcatcgtttgatctcagatacagacttagacacctttcgtcttccaaggccagaacggattccctaacaacagggttccctaatcgcctctcggatttctaaaccatcactcggattttctctctaattccatccaactatttctctccccttctctaaggataatcgcggcgtacttgtgcccccgccccgctctaacgctgcctgagcaatacttataagggggacaagatgcttggggatctttggatctacaggtcatcttcacagaatattcggatcaaatcttgtcagttagatcgcaatctatcctggccaaaatatctggctcgccaatcctccagaggatctaaggaatttttggtccaaatctcgttgttaggatacgcaatcctatctctcccaacaacatattcgcatattcctcggtccgcccaagcccgatccaatcccttggacctatcctggttaaacgtgcagacccttcgagttaaaaccccttaaatcctgaataaaacacattcgctcgactcaaacttggacagcgccccatttactcgacagatttcatagaacagcccatacgtttggccaactctcggcccaaacaaataaccttcgtctcagttcctcacactcgaattccctagtgcccggcccacagacttagggagacggttattacagaaccccctactcggttctagacgtgggtagggatcgagggatactatcgaatatcgacacgaggaatgaccaccgatcggctttgttgcctttttggagtttttcagcagttctcagacaaaaattgttgaatcgtcgaggagaatgggcgtgcaatgtgtgggctgacattaattcttcgatgcattagggtggcggtatataaggatcggagttttttagcagttctcggacaaaaattgctgagagatggagaagaatgggcgtgtcatgcgtggactgacatggattctttgaggcctaggggtggcggtatatgagtttagcgcatgatatactgagatgtccccacgagcatcgtttcacctcgtcgccgaagagaataggtgtcatgcatgggctgaaatggattcttctaggccatttgggtggcggtatattcgtaatgtgcacgaaataccgagatgtcctcatgggcatcgattccatccgcctaggttggatgggcgtgcttcgttgaaagcatggatccgcctaagctgtctcgggggtgagcaaggtgtgagtgtcgcctatggacattgacaccttgtggctaggaattgaaacgagacgggtagcaacgattttgggtggctcttcttactcttgggatgttaatccttccgagttgtgtagatgttattccgagtacattagcaaaaagatgttcttggcaaccatcttttgatgggagtccggttattcgatagtcgaccaagggtgatgaacgaaatgtgaacccttgtcgcctagattggatgggcgtgcttctttagaaagcatggatccgtctaaactgttgtagaggtgagcaaggtgtgagtgtcgttcatgggcatcgacatttggatggacgtgcttctttagaaagcatggatccacctaaactgtcgtagaggtgagcaaggtgtgagtgtcgttcataggcattgacactttgcggctaggaactgaaacaaaacgagtaataatgacgccgtgtggctctttttactcttgaaatattaatccttctgagttctgagttgtgtaaatgttattccgaatattagcaaaccgtaacttacattattatcgtattctctatataaacacatgtaccttattgtaatcattatgagagtcaatctctacacataataacatctggatttatggttatcttccaagttaacgcaataattaaataatataaagattttaagatctctaaataatcaatgatatgattcgattatgtctatttttataagtctgtcgtataatggtttctttgtattacaaaattggaagttgagctgtctcattcaattatttgtcaagagtattcaaaattattcattttatatgatcaaattgatgacgtgtgatcacaacatcaagttttcagatggagtcaacaactacagcttccttggagacaaacttcttcaacattgcaataagctgatcaaagtcgtcttgtgatctgatgagacttagccgcacaaacctttcatccgatccaaacatttccccattacgtcctgttatcttcgccgctttgaaaatctcatagcagtctgtgtcttctggtctctcacacttcacccatgcataagctttcaaatgaaaaccaaacgcataattataagtaccaaaccaaaacaaaagtctcactttcttgcattagttagaagaaaaacttacaaggagtaaactctctaactttcttgaaatagttgcaatactcaggtttgatagtttcgagcgaaaaacgcgtagacatggaaaaaatcttgttcaaaatctcccatctttttttcaaggttccataaccaaaacggaatatttcattgcctccatcaccaatcactactttaagcaactgcaaagcacgaagctgtgtgtctcttgaaactcccatactacttagacttatatatattttcattttttcataaacagttttctcttttactaatgcccagctgcaagaacaacaacaacaacaacaaacaaaaacacttatgagttgttttgaccaatccaaacctttgtatagagttactaggagagtcaaagttaatagtcacccgaatcttgagccagcatgacctgtagtcttggagagactgaacaagctcaaatcttcatcagcttgacgtgtaataggtgaaaaataaggccagtagtaagcataatcatgaatgtatttcacattaggaccatcaagaaccgctcttttcagcttcccatctggattattcggagatgtcactatctctataacttgtttaatatcatcattgcgctcgctcctcttccacgcagacgcatctccttcaaacttgagattggtagaattaaagaaatctgcttgttgtttgtacaactgcactcacacacacatataactgatcagaaccacacatatcaacttggtacataaagccaagaacagagcgttttttttgcttacattgtagtatggaacagaagtcacaagtcttgaaggagataatgaatttgtttgagacaaggcatgaacagaagctgcaagcaattgtgtggctccagctccaaagattatgaatctgttatcagtaactgcatttcccactacattatgtaactttctaatgatcttctcaagctctgccgacataaacaagccatatccgttaaaagtataactcatcctgtgccatcctgactcaacaaccgcactttcctctgcctttcgaatccagaaaggctccaagaacaaagggtctcctcttcaaaatccacaaaaacaacaataacatttttattccaaattttacagattggtttggtcataatgatcgagatgaaaagttgttacatacgagttagcatcgacaggacaatctttgagaagaacggagcaatctttgcctgtgtagcaatcgtgacactcacaaggtttatggccgtcaaggacaccaagaccgtccacgtaagatctgccatggcctgagcatgaaacagaggctgcagcttctgcctccaaggcggctctattggtccacgttggactccatgtgcttgtattattataaagaatatgaatggtgaaaacaagattcaagatgatcgaccctgcaatgagtagcttgttatgtatcatctttactttacctacaaaaacactttaagattgtaacttagtggcaaaaaaatggagggttcattgatagctgaattattgtacgactattgaaaaagttgacatgtgacaatgaggggagaacaagaaattagtttaaaaccactacgtatttgaataagattacatgtttgtatcaatagcacttacctaatttcttaaacaactacatattatttgtttttttatgcatatttctgatgagatttggtctactccgaaagacaaaaaaaaaaaaatgttctcattcttttgttgcttgaaaatttaatctcacgttgaccatgtagtatgtaatttagggcgtgggcattcgggtacccgttcgggttcggttcttttttttcgggtatcgggtctattcgagtaggaggttgagaaccattcgggtattctaaaaattcggttcggtttcggttcggattcgggtcgattcggttattttagtaaaaatgtaaaaataaccaaaaatacccaaaatatttttgggttcgggttggattcgggtattttactcatatatactcaaatctacccgaaatacccaattacccgtaaatatattgtttactttttatacaaatataaccaaatgtaaccaaaatacttaaattacctaaaagaaaactataacatttgttacttttatcccaaatatatccaaatttatatgaattactaaaaaaatctagtataatcggatttataattttaattttgggtgtttgaggtattacaaatatatatataactaatatatttaggttacatttgtattcgggtacccacgggtattagattcggttcggattcggttcgggtagtgaggtcaaggacccattagggtaattctaaaaatcggattcgtgttcggttcggttatttttcgagttttttggttcggatattcggttccgggtattatgcccaggactatgtatgaacctctacgtatgtatggaccgttttattccaacaaatatactctaaaatattccggataacaataagataagcggtacactagttatttaaattatcaattgtccacactatgggtattaaaccaatctagattactaagagcacctccattattttttttacaaaatgtctaatataataaaaatatagttgataagtttaaaatataaaaagatgtaaaatttaatataattttttatattaaactattaatattatgtggatgagatactcataggttaatcagaaggttgtttgaacttaaaaaatcaatgttgggtggcttaccaagaagtactttagagcatttctagtggatcgagcctttcaatggattctttcggttttttaagtataaatttctgaaaaatgttggatgagagtttcaggttttttttttttaatttttcataatccaagggtagtctcttttagtaagaatttcagaaaaaacttattcttttaaaattattttatttcataaaacttaacaaatattgcaaattataaaataaaacacataagttattttcaaacattttataatagatgtgcaaaaaaaaactgaaataacgaagttctaaaaatatggttgcgaatttttttcatgctcaaccaaatggtttttaattataaatgcatatctcgatcacgaactcgattttaaatgctcatcaaaaactaagataacacacgaaaacggcaacgactccaaagagagccagcttttttctttttagttagttttgatttatttttttcaatttaatcaagagaacttcataaaaaagtttccatttatcaccaccgaaaatgctcttatatgataaagtacaaaacacggaaaatgatctcgtgatgatatgtagggttagtaatcaatttttttaaatctctcggagcaatatatcacctgttgggcaagggtgggatccatcgcggaaagcggacgaggtagcttgctagcgatgatgatggcggaacgttacgagtggctcacaacgtcaagtgtgatggttcatggtttgcaaaagaacattacattttgtgagtgagatactgaaggtgattgttaaatagtggtatttgaagagttttttaattaaagtaactactttttttggctacttatgtaacgtaaccaaacattaatatattttctataactctcctgacaaatttcatcgttaagcttacgtgagtaacgtgatgtaatagtttcattatgcattacctactaaaaagtaactttcagatatgtatgagtgaagactacttatagagaaagatctcgtgatgctttgcatgatgatataagtaaacaagtatttccagcttcctaaaattatataacaaaaccgtcagacagaactaaataccatgcgtcgagatgggaagtgaagaccacaaacggttgcagtggacgcgttattctatactgtatagtgtataacatatgtaagaatccaaaccctcctttgcgtcatatgtgctccaaatctagttcaaagatcgatgaatcacttgatagtagtataactcatttgattgaacaaatatatcttgattcactcttttgttttgttacctgaaacacgcttacgaagaggattcatgtcatcgttttatctatcattgatttgaagcgtctttattagaccatacattttatctttctagattgttaatcaaatgtcctgtgtccatgttcaagtgataatgtgatatccctaagtgtatcggtttaattggacaagaatgggcttaaaccaaataagggtataatagtcttttcagaaaatcagtaatttcgatagccaaaatgagctatataagccgaacaaaaaaaaaccctagctcacgctgttgaatcactgaagagagaaagcttgaagacggcgagagctccatcttttctcaggcatctcttatcttcaaatcacaatggtaattagggtttacgctttcgtttctctcgtcttagtctcttccccaacaactactatatgttacttcgctttcctgattccgatcgatctagaacagtagcttagcctcttcctttcaaatccatattgcatagaaagattagggtttgtgttaatttcatgaatcagagaaccaagtatcgaacagaaagtttaggttatgtgttgattagggaatttttgatgtttggctgtaattgtgtgatttttgttactgcatgtagtctctggttgcaaatgaggagtttcagcacattttgcgtgtgctcaacactaacgttgatggtaagcaaaagattatgtttgcccttacctctatcaaaggtattggaaggagattggccaacattgtctgcaagaaagccgatgtcgacatgaacaagaggtattgatttcaatcaaacttcaacctttggaaagttagaattgaaattagcagtctctgtttgcatttgatttgatttgtgtatgtgttttgagtcttgttttgtaacatttaggtcctatagtgtacactttgaagccaattcgagttacttttctatcttctagtttccatgttgaaccttgctcttcttttgactttgtgacctatctttgttagcagtctctgtttgcattgattagctagtgtgttgttgaggttcagcaaatagttgtgttagcatattgtataattcttgtgaatcccaaattgcactttctctggattgttgtctaatattggtctcaacttttcagggctggtgagttatctgcagctgagattgacaacctcatgactattgttgcaaacccaagacagttcaagattccagactggtttttgaacagacagaaagattacaaggatgggaagtactctcaagttgtctccaatgcccttgacatgaagctcagggatgatcttgagcgtctcaagaaaatcaggtaaacccattagtcatttctgatcctaatcatataacatgataaatatgtcctctaggggctttaataatggtggttttgcattttcttacaatgaacagaaaccatcgtggtctgagacattactggggtctccgtgttcgtggacaacacaccaagacaactggtcgcagaggaaagactgttggtgtgtctaagaagcgttaagccaatgttgctagttgcagctggattggatctttgataaggactgaattttaaattttgttgttcgtacaattttgcacgactcgattttgggtcttttgtgagagatcttctctactgtcatattgcttttaagataatgttgcttactggatcttatgtcacctctctagttacatcatctttcggttggcctatttaattgttttcttcatcgattaaattgggagctcatgaatagttctatcaacctcgagaaatggatgcaactatttttgtactaaagtgtgtaaccttgcaacaaagagcataaagagagaaaaatttggtactcactcagctacggcattacttgatcgaggctgttattatttcaaatttctcacttcagactgcaatgtcttaatagtttggttggagagtgccaagcttgcggcttgtaagacattttgagcattggatcagaaacgatacgaagaactgcccaaacataatgcttctacttctgcattcatctactgttcgaggtgagcggtgagcgccactctaatgccttctctgctgtttccttagctgaatagtcgtgaccttctattatggaagtgttctttgattcacagagcctccataagatccatggatataagttgtgtatctgcttctctggtggagagtccttcagggagaagtatcacagctgatagaagtttgcaaatagggaacgccagttcacctctaggaggaattgggataggtgatagtgatcaagttaatcttgcataaagggcatgtaaagagtaagtaattaacagtctccttgcgtgagtgccatcttgcagatggtgaatcccttgataggttcctataagcaaagattaactgagatagaaagacttttagtcataccactataaaagttcttgaacttgggacaagcctttactctccataaggcagtgaatagatgagttagatagctagggatcaaaccagatcaaagtattctccattgcccaccagtttttccgagtggctgcacacatcagagcctgtgcagcatgtatggttatcggcaataaacaccccagaataatcaaacaaatttataaatttcttatttcaatattgaaagctgtgcgttgatgtaacttgatttcgcaaaaatgcattacaaaaatctcaaacgtctgtatgaaaaaattcgctttctttcgtaccaaaccaaaatttagcacgagaatcataaattaagctaataaaaaaacaactcaaaacagagacgtaactatgtgatgttcctgataatatactacttactactaggctttgtcttcgttgtcgtcagaatccgaagcagctccgagtttctgttgacgggtagttggaagagaatagtttcgtcgctctttgcctcctggcttcgaagaggcattaccgtaccagatcatacccagtactgcaattatcattccaacaaccacgtgcaagttaagaccttctctaccaaagaagaagaagcccattatcagcaccaggatcgtcttcatgtgtcccagcacttggaacgatacagctgtgaatcttccgatgcagatgaactggcttaggttggttccaatcgctattgtgcacgacagggttataaacagctgcagaattcagggacattaggttcgaataagtttctaccatgtatgtacagcacggtttggccttaagcacagagaaatggtttgtaagttaactaagaaacaggcattgaaataagctagattcctatagtatctgcttggctctgcatgctgactctaaacaaagttggtaccaaacagcaaaaacacaaaaaggctatcataatcagactaccacaaaattcataaggtagtaacattttacttctattgacataatgatgcgattttgcttttgtgaggagagtcaagttaaatctaattccaatgagactaagaacttattgaggtttttcgtacttaccactgaaaccaagttgtaatcgtacatgtctactcttttttctgtcagccaataatcaagaaacgggccaactaccagtaatgttgcggcttgggctggagcggtatgtcccaataggttgaatgagttaagcgagtacttgcgctgaaggtaatgtacatactgcatcatgtaaaaaccacaccaatattagtattatcttaaacaaagaaacgatatgttactccgtaagagcacagaacacttacgtattgttgcagagcagtactccacacagcaacgaaagcggctacaaatcctttagtgtttacactaacatcagtaacagtgcaaacaccaacacccacaagaaccagtcctatgctaagctttgtatctctggaataacgaatcttatcgaaaaccatttccaacaaacaagatacaggaatcatgctgagcttagcaatctgacaagcaaaaacaggacaatcataaaatcagcaatacatttcttttcacaattacagagctagatgatgtctaatacctgataaaaaccaacagagttccacataagactgacattcattccaacaatggagaaattagcaaacagaataaatctcaaaagctccgtaaacggaagatgagaaggctgaatgtaaccaagacatcttaaaacaagcgtcatcagagtcgttgtagcgaaatgtaaaccagttaacgttgtagctgcaacatgataagtaaacaaattagaagaatagctacaggtttcaaagaaaacgtcttaagtaagagcaaaagagaaatctttaccaaagctataaccataagtcgccattaaagctttattaacaatgatgataccaacagaagtgacgacattgaacatccacgcagcagcatctacggctgccttcttatcagctttactcactggagccatttttctgaactaactttctctcttcctcaatcagtgaatctcttacttcttcaatctcccattctcgagaagactcactttccgctaaagaatcgagtcacgaatcaagagtcatgaagatatcacagaatcgaaaaacatatgaattcgatcgcgatcgctaagcaacagtaaatttgaatgtaacacgattcgatcagatcggatcagtcaccggagattgaaatcggaacgaaatttccgtaagatctaagatcgtagatcaataatttcgacagagcaattcactgattgaaatcaaatctgaggagaggaagcaaattgatgagacggcgtggagttattacctagagaggtgaaaaatgcaaataggaaatgaatcgtgcggaggtgatcggagtaccggtgacggcgacggcgagagtggtagaaaccggaggtaatctgaaaaaggcaggcggttgggaagcgtagggctcgtggagtgacaagagagtgtatgtttaaagcaaaatcgttaattgttactattttaagttttttatttctcaattttcatatttccaatatacagttttttaaaagataaatttgtaaatattaaaagataattttagtcgtgagatcgtatataatgcgagccaaaatcgtaaagaaagtttaggatgatatgtaaaaattaaaattggttcaaaaatccaaaattttgaaatgaaatatacatgtttgatagaattcatgtatacttatcactttagtactctagtcatctacgaacgaaactatgtcatctatctgcaccatgtgcatgagatgattattaagtaaatgagtatataatataattaaataaaattagtaaatgactataacattttagttacaaaatttattgtatttaaacttattatctgcagtcccaaaattgtttttatattattgtttttaaaaatatttaattcattaatcaaggagccgaaaaataatcatatatatgacatatttactaaagttggtcaactttctctatatgaatatctactactcgcattcataattaatgtaaattttatatcttatattataagtatcattaatattctaatattaatggtatatttattattatctatatttaatttttccaatgctaattttactttattattatatactccttatttcaattaattttttggttttttttaaaaaaatttgtttgagttttctttgctaattttttgaagtcttaactcaaaatatgagtatataataagtacaatgagttagctaatagttttctaagtgtgaaaaatacctaagatgaggtccatcttcaaatatacttgagtcttatataatccaaactagattttaacccgcagtatatcgcgggacgatttattttttaaaagtaatatatattaaaatttgcaaattttatttttataaaatatttatattttacagtttataattgttattaagtaagactataccacgaatctatgagacaattgttaaaaaactgaagttgtaacccctattaaaacagtatattaataatattttaaaattttataaatattgattcaaatacatccaccatataactcaattccaaaataaaacccgttctataatttctttacccgtcctgtgattttctttttaaagtagtaatttttaaaatttaagaattatttttttatagataaaagttttgcaaattatatcattctctaatacatttatattttatatatagtaacattatacataccacataacatttttggttttatataattttttctaaattaagatgatttgatatgtttaatattagtggtcttaaaaaataataaattaaagatttaacccatattgaaacggtgtattaattatattttacttttttattaatgttgattcaaaaacccgtcactccaaatccgtcttgccaaaaagccatttattttattaatattaattttattaatgatatgactctgaattataatctaaacattttagctaataacataggagtataccatttttatttaataggggaatgtaccatatgacccgaatgcaattttacccaaatccaccaaaaaagtcttgcaaaaatactatagagataagaaacgatagtcggttttgataggtataagattagcaaatatattagttagcttaaattagttaaagaataaaaactgaaaagttatattacactttattcgaatatagtatcaaaacttatataacacagagatttgataaaaatttaattgttgaatatttttttttgtgctaatttttatgtgattaagatttaatttaagatttaattgattttgtatataaaatattaaaagtaaaatgtgagttgtatatgttttgttgatattatctatattgtttagtgtttaagattatacacttgtagtttgattgttaatttaagagtttcatctgtagtataccatcttgtattaatatcgatctaaacccgtcaattataggattttccagcttgtattaaaaattgaatcatattatacacataaaaaaatctaatatgttattaattattatagtatatagattataaattttcaatataatatgtatgaaattgaatataaatatttcaaattatgacccgttactcagtagaaagttttcttaaatctatttttcacccgttataatatattttcatgtattgaacagtttatattcgttttcaaaaattcaaattatggcatatgcgaaaaaactctaattatttttttataatgatgatattatttttcgcaaaaatagaatcatataaagatgagaagtgaactataataattaataaaaaattaatatgataatttagatatcaaatctaatttgttgattttaataggttacttttttggaaattaataatgtatttcgtttttctaattaatttaaattaattaaaatttagatatcaaatcttatatgttgattttgattggttattatttttgaaaattaataatatatttcgttttttaattaaattaaattaattaaattagtatttgactttttaatccttaaagagataaattaatttactctttaaaattttatttttaatggcatacctatgtaattacttacaaaaattaaggttatatttaaaatgtacttcccaaataatatagtaggatattaccatttataatattggtttaggacaaaatttgtttcgggattgtgcgagtgtgatacattgttgaaaaagttgaaaaacgtttatactctcaaaagtattttgatactaaaaagttggtgattgcatgagtgaatgattgaaaatttataaataaaatttatcaaaatatgatattaaatttaaaagaaacaaaaaaatacatgaaacgtaacgcggatgttgtcctagttatgtacaaaatgagagcttgaagatttataaaagtctgtttaatctcatcaatccaactcataatctcctcaattatatgggggattgtgatgaacacaacatcaatttcaaatagacgtggatattgtagaagatgaatgtggaccttcttcacaagaagtggtgcattgagatacataaattgtcccacaacagttttggaaagaatcttaccgaagacaattttgaacacactacaaacttcactttctcaaagttgtcggacctactggtaactgcaaaagcttgacatttgcagttcttcaagcagtagcctcggcaagggtcgaaccacattcccttgattgaaattgttgaactgcttctaggaagcttcaacatggaaagcttcagaaacttgtcttatcagttaagacgggtgtccctaacacaaccaccccgacgatctttctcattccatttggctgggttctttggcttgaagcctttaaagtagttgcatatgagatttgtaatcggattgcaatacgcgttgcttccacactcagagtaattcatcacatacctcctctggcattgaccataaccgatcccaatcctgagctgcttggttccacctgaactgctgcaacaaacccttatcagtcacagtcaatcttgaggtgaggccatttgcattccctgtacactgacttcattccacagagaactgtttttgtatttttgtttttaaaaacatttaattcattgatcagggagccaaaaaaataatcatatatatgaagttagccaactttctctatatgaatgacccatcactactcgagcatctggtacttgtgcagtcataattaatgtaaaatgtatatcttatattataaatattaatgatatatttattttctaatattaaaggtatatttattactatctatatttagtttttctaatgctaattttactttattattatatattacttatttttaattagttttttggtttttttttttaaatttgtttgagttttttttgctaattttttgaagtcttaactcaaaatatgagtatataataagtacatcatcaaattcttgagtcttatataatccaaatattaccatttataatattggtttaggacaaatttgtttcgggattgtgcgagtgtgatatattgttgaaaaacttttacactctgaaaagtattttgacactaacaaagttggtggttgcatgagtgaatgattgaaaatttataaataaaatttatcaaaatatgatattaaatttaaaagaaacaaaaaaatacatgaaacgtagcgcggatgttgtcctagttttatacaaaatgagagcttggagatttataaaggtctatttaatctcatcaatctaactcataatctcttcaattatttgggggattgtgatgaagacaacatcaatttcaaataaacgtggatattgtagaaggtgaatacggacattcatcacaagaagtggtgcattgagatacataaattgtcccacaacagctttggaaagaatgttaccgaagacaattttgaacacactacaaacttcactttctcaaagttgccggacctactggtaatgcaaaagcttgacatttgcagttcttcaagcagtagtctcgacaagggtcgaaccacattcccttgattgaaattgctgaaccgcttctaggaagtttcagcatggaaagcttcaaaaactcgtccgtcttacagttaagatgggtgttcctaacacaaccacctgggcgatctttctcattccatttggctgggttctttggcttgaagcctttaaaactactggttataaatcaaaacaaatacaaagaatcaaatgttgtgatttagatgtttcccatagagagggatgatgcttcaaaccttttctggagtggcttacgaagacacaagagtgcaatcgagataagacatcgattacagattagtttatcaatctgttagtatgttgagtaacttatgagaatctgtaccggtcaattctagcatttctctcattccaatccatatgagatatattgtcgtttgaaagcagatgtgaagaagattgtcatgttgttgattacccgtgcttgtgattagtctttgtaatgtttctccccaatctggatcatgctactcctggagaagggacctacctaccgtcattcaaacagcgaaaaaaatagacagacaaaaaaaaagatcatctctgcatacatccggttcaccgtataacataagtttgaatttatcaccaattacgcattcgagctctttttgatagtcaattatgcacgggtaactaaaaaaccaaaaaaaagagcacactggggcatcctttggccaaactacaccactttgctccaattaaccaaggattttttttctagtttgatcccataatgtagagttgagaattgtggtctcaaatcatctatgccttgcctctataaaaagtaaaaaaactgatctggtctttcgaatcattagagaggggataagctcatatttgtgccaaagattaatttataaaacacatagtaaatcatataagttttaggaataattgattaaaaactgtaaaaacattattataacctgaaaatggaactcaaagacaaataaagttaactaatgagctttgctttttccatcacaaagctaaccaacccaacaaaagcccaccaatctctctctctctctctctcgccgttactctctgctctgccgccggcattctctccggtacgtctctcagatccatccggtaaatacttcaccatcctcgtttcttccccatttaattacccacagtctcaaaaaaatattatttctttctaaatctgaagatgaatcacactaggaagtgttttagatcccaaagcattaatcctgttttctgtaaaaatgccttctttgtcatcctaatgatttttgatttatgaactttggtatagggatttggagtttgtgtacaaaaagactgttgttggaatgtgcaaatgagacaatattggaaatgttatttgcagcagaaggaggaggattcttctcttcatcagcttctggttatagcaatggtttagctcttcttctattaggtcaaaagactgaacaaaaaccaatcaaagtttcatcacaatggaaccattatcatttagttcttgaagattctgataccgggtttcggttagattcgtctaagaattggctctcttctgcttgcacttctctcatatgttttggtcgaaaatccgaaagactggaaagcgaggggaagaaagatgaggcaccgagtgtggaggactataataactgtgaagtcactaataggtttgcacttaaaagcagcttgaagaaaagatcgtttagtgatgttgtgattggtgatgatgatgtgagtagagatggtgtggtggatcatatagatagaaggaaagtgcagtggcctgatacatgtggtattgagattgctgaggtcagagaatttgagcctaggtatggatgctttctcttatgaagttagattctgtttgattattctttatatgtgtagccactagatgtaagttctggtctatgttagagtagggaataacctgttttcataggaaagaactgacttattccctctctgtctgcttaaaatggtttagggcacatcttttatcatgatcttaccggattcttccatgtaaacttaagcttatagtccgagattttatagtagtaactctcaagatcatgaataagcaacagtgtaatagatccaaaaagtctttaggtcattcttgaatagatactactcataagtcataactccctttagtagactagtgataattattctcttgacacaatggctttttgttcttaagaagttgtgtaatcattcacatttcgtctttcatttaccattttggggaacaaatgttgaaaacagtgtgctctgattgaaattttgcagtgaagttgatgaatcagaagatgagtttcatcatggaagtggaaaaagctgtatgtgcacaatcatgtgacccattggaagttaaaaattgtttgcagacaaagggcttttcatatagttgatgtagctgctctcttatcatgtgcacctttgttattatatatagaaagagagagggagaaggatttgcaaaagattggataagaagaagaggaacttttggatgtgtacttttgtagccacttgatttgtcaattttgtgctgtattttagattattctttgtattacatctctatgctactctgtcctgtaatgataaaatccacaccacaacttttggaaaagaaaatccaattaaaaaaatgctggaattttgaactgaaccgagattttgtttttggttcggtttcggttattttggtaacaacaatcggcattattacaatttgtgtttggttacttaagaatttcagtccagttcccatgtaattgtttttcttaataactggactatactaaaatgagaccggtttattccaaaattagatcagttatcaccaatactctaatttacatcggttaatacaaaaataagaccggtttatacaaaatagccaattttaatcaaattttaaagaaaaaaacaaaaaacaaatcgaatttacccaagaaccaaaccgaatttcttttcaacaacactttacaaatactttggttaaccgacaaccaaataaaccggctctttccggtttggttaaccaaagtttcagctcttaaaaaaaaatctacccaatcatcattacttggttttagctttcaagtcaaacaacagttaaaactattacacgcgctttcaacgcgcgtgggatgattacgaaagtaccatttgcacataaccatgagacttggccatatcacatccacaaagacattaccaaaagacagaaccaaagcttcgaaaatcagacaattcaactaacaaaaaaatgtcagtagcttcaccgattcaatgtatcaggattctaaatccatcatcttcatcttcttcttcgacagcttcgtcgtcttttagattctcaacaacgactaagccatgtgtcttcatcatcagatgctctcagacagaaggtcctttaagaagaccatcggctcctcctactctccgggagcctcaaaaacctgttcctccatcacagccatcttcctctcctcctccttctccgccgccgcagaaagctgtagctgttgatgggaagagtgtaactacagtggagtttcagagacaaaaggctaaagagcttcaagagtactttaaacagaaaaagcttgaagctgctggtcaaggtcccttttttggtttccaacccaaaaatgagatctccaatggaaggtacttaagctatgatctcaattcttgtatttgattgatggatgctaataactcaaaaagttaatagatatagagagatttgtttgaattgcatttgaggtagctctggtattgaataaacaagttactagtcattgatgtttcttcaaattcagacatatatagcctaaagtttcacacttgtcagttggtactgcctagacaagagataactctgtgtgttttgtttgtaggtgggctatgtttggtttcgcagttggtatgctcacagagtatgcaacaggatcagaccttgttgatcaagttaagatccttctctcaaatttcggcattctagacttggaataataagagtgttgttgttatatatagacagatccttttctctcttctcttcgattcctcttcttgttgtttcttcttcttcttcctgtatatgtatctatataatacagggccatttgtgtattcaatcacttttatcttcaaatggtataaatacgatcttgtatcattgattctagaattgcatacaaaagatgttttgaggattaaatggaaagtgtattctcgttttcaaaagtataataatctcagagctttgttaaggaatctgtgcaatctccagaaggattttgtggagagattgaggctttgagaagaaagggcaatgatcacttcctttgatcttgaagactccttcagggctgttctctctcactaacttctcttgaacatctggtgaaagtgcacggtcatctagcgtctggacgtagaatcttctccctttcccatatctttctgcggttagagatactttctccatcattggtccgagtggtacaggtctcattgagatcatcgccaatgctatatcctgcaaaaccataaaccatatcgtttaaaaaagttacagtaagtgattaccaagtgcaaatgcagagttaagaattagcatgttggagtgtaccttgttgggtgattgattgaaatacaagcctttcatatgtggcttctcaaacatgaaccccgtaggaggcttgtctttaccgttcccataaatcaagaactgcgactctttcatgaaccgctctgcggaaccaagctgcagcagtgtagacagtttggcacaaatgttagcacaacaagaagaaacagaaacaaagactacattacagatatgaactcaaagagtgttaattaattacctcttcagagaaaacatcaaaaggtctttggccatcagaaaccattgttgcacatacgaatatagctttagagattttctctggaaacctctctaacgcatatgaaatggaagcacctccagtactgtgacccactagaataacctacattaaacaacaaacttgtatctcattgcctcattcctccaatcaaatggttctgaataaacaaagagagcaggctctaaccttctcttcttcggggagattttcgaggagatcgatcaacggttttgaatattcctccaaggtagagacagtatttgtgtcagtcatattaaatccacacccagtgaggtcaactgtaacaggagacagtcctgactcttccaatgaagcaaccattttgtaccaacaccatgccccaaatccttcaccgtgcaccagaacaaatttcttcactatcaagctctctgaaaaatcaggtacctgaaaaaggaacatagattcattgctctaacatctgaaagctagtttataacaataacatcatcaatctctatagcaatgacaaggtgagacagaaacaaacaatcagcaaagatgattcactatcgaacaaagtgatgtaacttaagttctttaaacaaagaaaaagatcttctcttctcactcattcttctagtcatagcaagcataaatttatagagaaacaagaggagagacaaaatgcaattgaaagacaattaaaagtttatcagtacttctgttgtaaggttatggggtgtggctaaagacagacactccatagttttatagctcatctggtcccaacccagtgtcagtatcagtatcagagtttagaacttttcatttcatgataaagttaacattaccaacaaaaaagtcagaaatcttacaacactttttcacatctcttttctaatcttaacacagaatcttctcttcctccacttttatagtaaccaaaatatataaaaagttcccaaacaatcattaaaaccggcaaaaaggcaaagactcagtcgaaacgatcattaaatcatataaaaatgaaaccttttgaacttttcaagattgaaacttttataagtgtggagaagattgagaatcagtagtgacttaacctgcttgccattagaaaacgggtcagagagagtacgtttcctagtactagtagacccgacccgtctagacatagatccatcaaatctctgagaaagctgagcttgatgaatcgccatggaaagagctcgacgatgcaacatctcttcatcagcaagtaatttcctctgagaccgattcattctcttgctcttagatcctcctcctcctccatctttgctatctttcttcatcattgagattatcttgttacccatctttccaaatcaagaacccagaaaggggaattctcaagaaaatggaagtcaaaagtttttaaagaagagaggcttggcccctagatgggatcagcagcatataggcttgtttggttacttccaaagagagagagagagagagagagagtaggtgaagaagcaatcggtcattaattgtgataaatacagttcattgtgaatttttgtaccaccggaagaaaaaaataaaacagaggatagagacagatttggacaatgttagttgaggttgtagaaactagatttgtaagagattttctaaactctgtctcaatctcttcgaagatatgagttcacacttcatactgttaacattattttactatctttatgatttgatgataatttctaaaaattttgacctttctttagtcaacaaacttcattttcttctcttcttagtcaacatacttgatttcattgtagtctgtgtataaatatatcacatgtgacatgtatttcattttgttacttcgttacaagtgaccaagagagtatatagtcgactggggaagaccaaaaattaattttaagcaaacacaaaacaaatgatggacaaaggaatcaaaggtcaataatacacattcaaagtctccgccgaaatgggacgcatcacactcgattgtaacaactaacaagccaggcccaaaaaactcgaccccaaggggaaatatatattggtctcttatccttatgacttctcttccacaagtgagttctcatttcctaatttttgaccatttgattaatttatgtaaccctctttaatcctaatcgcaagaatatggtctttctaaacgtgaaatcactttcagcataacttttatgttggtgaaatcaaaaataagtacaaatagactaatcatataaaaaataaactaacttccacaagaaaatattacttagcaagaaattaacttcaaagtaatcaaactcttatatggttaaaagcgtgcaatcaagttctaaggcctctcaggaacccaaaataaaacccgacacactgtgcttcccgctccctatacacttttgactttattttcattactcagactcgagagtaagttctcacttctcactcacttgtctgtgacaccgcacaagccaaaaggggggatgcaggtaccgtgaaccgctagggccttcaaaaggcagtagcaaacgagtttttcttatctcacttctcataaatcttgagctgattcctaactttgagaacggcctcttttatgtgcaatactacgacttacaacgttggaccaaaagtctccaaaacccaagtgatgttgataatgttacttccccatttcgattgagatctatagattcccattgaaggacaaaatccagtggaatggctcatatatttagcctgaaaggtcacaacaatcataaaactgtgttgacaaatttcaagtaagagagggtagtagtgcgactgaagcttaccatatgttaagagaatatatcaagtaccggatgatggtttttggatccacatttgcttctgcaacacagtaaaaatgaatcttctatacatggttaaaagaggacagaggaaaagtagtaagaaaagactttggtttggcttgcctcatgtgaactgggaccaccaccacttcctctccgggaggttttaccctcgccaatcaccacctcttcttttctattgcgacctccaacacggcgactagaatgtctggcagaacctggatagagtcaaaagtttttggcagaaccaacgtcacttttatttattcatataataatgacacaagacacattatgcattctccaacttcagatgaactaaccattctcaagagtgtgaccaccagaggagttcaccacttctcccgatctttgagagaacatcctgtctttcacttctccattgtttcctgtaagaacctatcaaatgtcatggaggagaaacacaaccatgaaaatgaaactaattatttattggtcaacaacagaaacagaacctgctgaagatagtggttgatcctcactaccatcacgacgaggagcccacataacacgatcaggtctatccttgtttcttgtacgcctctcttgcttctcactgatggtaccagaagtatgataatctttccctgcacatggaccatctattttgaattatcagcccaacttgggaagcaaacattttcacttaaattgtattcctttataacctgctcgagtgttggctggtcgagaaggtcgtttgtagttttctgcttctgagggttccactctttgctcagactgcacaaaagtggaagactggctcggtcgagagtcatttctcagaagtattcccttgatcaacctcccaccaacatcactcttctggttttgtcttgaatccgtggagtttctagaaagattagtgtctatatgctgttccggttgtggtggagggttctaaaaataccattaacaaataagaaatttacatggcttataattctgtttacaatcaaacagcctgcacaactttcataaagaacaaaaaagcttacatcaggattgtctcggtcttttgatctcaggagcaaaatctttttcttcccagaatccatagtcaatgctatcccagggggagagctatcaatgatagcggctgcaattgagtagcaaaaagacaaagagttaaacgtggccttttaaaaatatgtaattagctagttaggaataacaacagctgttgattttttaccagtttcatttcctggtagttcctttccacttgaatttgactgacgataatctggcttagagctgctgacgtctgctgtagtcttccggggcacattctttgaactttctttttccacatactagaatgaaaaatataatggcaacagatgagtataatggcagacgacactgactattgactcctaaaaagtgagagacaaacctttttcttttcagagttacgtttcgagggccttggactcggcttgtttgcagagactactctggttcttctacctcctcttcgaatatcagataaaccctgttgcttgaacagaaaccagagatcaacaatagaagttccattttgaaataaataaaatagagagacatccgtcccaggaaagttctgatattcaactaggtagaataagtgaaaaccccgtaaaactgtgagcataatgtacctggggtcccatcacagtggcacgtttttgacgtatgaattccataagaggtgtaacaatgggagccgcttttgaagcacctaagaaaaataattgttgtgttagtaatttcgattaattcactagagaataaccaacctcttcagacaaaagaagcatcaaaatgattgcaaatacgaaacacgaaccagactgctcagcttctcttctttccaactggatttcagcactaggaagattctcaacaggttgtgcaatcaccttaagaaactcaagataatcaggatctttactaatagacccttcacgaggatctttcttatcactcggtttcggaacacgctgagaaggtgcatattcaactatagccttaaactgagcacctaaaccaaaagaaaccacaaaaatcacatcttcaaatacacacactactaaaaccacatgcaaccatcagacaaagacagattaaaaagtcaaatacccttttcattaacaaacacatgcccgttgaaaaatgcagcgaactcataaacatcttctggtgccttgaaacttacataggcccgtgaatacttctgatttttatagctgaagacaccacaaaaacacaaacacacacacacatcactaaaaaaaacccaatactactaagtataatttctctacaatcaactaagtaacaaaaatctatacaataatcttcaatttccaacataatcaaatacaatcttctttaatttccatcatcttcttaaattacaaaaattcgtaaccctaaaattcatagaaaccaaaattccaaattcaagacccaacgagaaaataaaaccctaacctggacttcccaggacgaaacgaaacccaattgtaacgatcagcgaaacgaggatcaatttgagataagagatcggactgtgaaagagaaggcggcaagtgacgaacaaccaccttcttcttctgcaaaggttccttcatcgaaaaccctaaattttccttggagaaagtcgcaaatcaaacacgaacacgatgaagaagaagaagaagaaaagtgaaacacatcaatacgctaattttgccctaatttttgtttcctctcttccctttcctctgggaaaagaaaaaattaaaatacccgtagacaaatcaatcttcggtctacgtggactttttaacctatatgggcctctaatgggccttaattatatgtttcaaccgtcggattaagttttaaggcatcggacggcagataattactctgatagtttgtgaaatgggcttgttattgggcttaccgtaggatgaagattataataatacatcgtacggtgtataatcaatctaataggtgatccgcgtcgcaggtgataaagtacgagtttgtttcgcagagacttctggtcttgtcaggttttactgattctgtataaagtccaaaaaagatatttttctctaagattgtcgctttagcttctccggtttttaagcaagtaatcttctttcgtctctatcttctttacttgattgcttattcatctgttgattctgtggttaggtttgattcttctggctctgttttgttctgtttttggtgtttaattcttcttagcaagcaagtaatattcgatcgtcactgtttttgctttgattttgtgatttctctatcaaagattagaactttacgtgaccctttaagcgatcaacaattatctcactgttttttcagataagggtatatgagtttgttggacatgggtggagatatgatggaagatgattgggaatttgcgtcatcatcaaaccctaaaagaaccctagttcttgtgggccgtactggaaacggaaagagtgcgacaggtaacagtatccttgggaggaaagcttttaggtcaagagctagaactgtaggagtgacaagcacgtgcgagtcacagagagttgttcaagaagatggtgatatcattaatgttgttgatactcctggtaagctccccaattgtgtaaattgtttcacttttagtctattttactatttgagtgttatgttaatggtgagttttgtgtataggtttgtttgatttgtctactgcagctgattttattggtaaagagattgtgaggtgtataagtttggcagaagatgggattcatgcgatcttgttggtattctctgtgaggcggcttgctgaagaggagcaaactgtgcttagtttcttgcaagcgctattcggcagtaagatcgctgactatatgatcgttgtttttaccggtggcgatgagttggaagagaatgaggagacattggaggagtatttggctgactattgccctgagtttcttaaagtaagctgactttggctattcttttcttgagtctttcattaaagaagtataatttgaattgtgtgtggcttgtaggaaattcttgggatatgtgacaatcggttggtgttgtttaataacaagactactgataaggtgaagaaagctgagcaagttcagaagcttctctcacttgttgaatctgttgttaaacagaacaatggaaaaccgtattcagatgagttgttccatgagctacaggtggagattgttgctttcactcacttttctgagttattctgttttggaggagaggattctaactgtggttgcaatttcaggaagaggctatcaagctaagggaccagaaaaaggaggttgagttacttcagggttactctaataatgagatagatgagttcaagaagcaaatcgatatgtcctatgataggcagcttagccgcatcaccgagatggtaatttaatttatcaatagttatggtctcacaggagagtttcattgaccgacagctttctgttttgttgttgttcaggtggagactaagctgagagacactgctaagagactagagcagcaactaggtgaagagcaagctgcaagacttgaagcggagaagagggcaaacgaagttcagaagcggtcgagcgatgagattaagaagctcagagagaatctggagagggcggaaaaagagacgaaggaacttcagaaaaaactgggaaagtgcatcaatctatgatatgttgagatgttgtagctccagtgaaatctgataagatcattcatgtcaagtttttttatgtagtcttttgttttcttttggttttttaacaatatggttttatcattaatggcagtgtgttataagtttgcttaaatcataccccttattttaggtgcatccaaatcactgatccaatacgtccaatttttttggtgtaaacatgacgttttgtttggtgacagttagaaaactcttttggtaagggccctctttgtcatatcaccatatggttttctaatcatagacaataagacgcatgcatgtgcatattttcgatcttttgattctggtcaaatttcggtttatcagttttctaatttttgttttgtgttgacttgatgggttatatgtttcaaactcattcttggctcgttttatcctcttgtgtttggaatccgcctatcttgccaaatgccaatgaaatgactccaaaacgcaactaaaataccacaaataattcccttggagttataaagttcaagaagtcacaaattaaccactaaatgcaacaaaaaaagaaatgaaaccataaaagagacataaggaaatatgtaaaacggtaagcaagaacttcgctattgcagctttctttaattaaaaacataattattggtaggaaaatgggaggaactgttttctcttcaaagagaatggtaagaaattcgtcgggaactttattaccatttttcttccacgttttcagtcggtaagaaatttgcgacgaacttcctgtcattctcgattttctacgtaacactacttatacatatttttttgtaagaaaaattgtaggaacttgcttgttcctactattatcataggctttacacggtaggaaaatcgaacattttcttgtaatattcaaaaattacaaatcttagctcttttcgcctcttcattcttacaatgagaaaaaggtgatattgattcaaatcaagtatacaaatcctagggttaacaaacatagactaaaacgtgaaataccttaatgaaagcgtcgagtgtgtcttgagagattatgctccataactcaacacaatgaaacttttcattgagaaaaaaaaatctctttctggactctctattaaattatataaaaacgtgtcacctcacataacacttacacacatatttattacactaaaaatacgtagcaaatcaaacaaagattaggctacgactggcctaatcaatttagataaataacataaatgaaaatgaaagaaaagcaaaagctgactcataacaggccaaaagtccaagagcatgctcaaacgaggaacatagaaaatgttccgcgttagaaacacaaagtctaggcaatggttctctatttgtcattaagaaggcaaagtgtgagggtggaagagcgcacagtgaatgatcagagaatgctgcactgctgacggctgagcatttgcgcttccatttcagcacgcatacgtccttccatctgctttaacttctcctgcatttccattttttgctggtagctcatctcctgagctttttctctttgctcaaagagcttctcctgcgcctccatagctattttcatatttttctccatctgaggtaaataaaaagatattgttaatgacaacttcaacaccacttatgcttatgtttatatgtgaaagaatatgaggagtttataccatctctgccattgccttgaggtttcgttcattcattatctgtaactccttcatcaatgctgcgagctgctcttctgaatgcccttttgattctagctcctcttgttctttcttgtgcctttcattttcttcctgatgagggagagaccatttgctttctttagcattcaaaacatcgcgagagatggatgcaaatggaaacaaaagtggtaaactctttaacctttatcatatggtacatctcatcggtatacggaatattgttgttctgctttctgaccaagtcgataagtttgagaagttcatggacttgctttgtctttttctcatcatccttggttttgttatcaaacagaatcattcgttggccacacaatatgagaactctctgaaaccaaagaaaatgcaataaataagtcacgaagctgaaacctctgtttccgtagagtgcacaaatttgatcacaaattaccaacctttaggaagtccggcatgttatcacccaagtaatcctccaatgtcataccgtcatcttccaatacatctccccccgtgaaaacaacgataaggtaatcaacaatcttactaccgaaaagaacctgcaaggtactaagtaccatctcttcctcttgactaattcgagtccttacagataaaactaagagcacagcgtgtagccctccatccgctagagttaggcatttaactatttctttaccgataaattcagcagataccgacaaatcaaatagacctgtaaccaaccccagtccacattagttacatactgatgacatataaaaaagtcaagatgtgcaatgataaaacagaaaaactatcataaaaatcctcaactattgaaagcgttaatgtaaatcctcaactctcgaccaaacgaaataaatatcaaacttatgtcaacaaaagttgggtatttatttggaaaatcaacataagtttgatatatattttatttcgtcgagaattgagaaattaaatcaacattttcaataagttgaggattttaatgacctttttcccatggcacaacgtaccaggagtgtcaatcacattgagtatagggccttctggtgtcactgctttaactgcatggcattccatcgtaacacctgatgattttgttttcgacttaaacacctttgatctgacgatgctgttccccgtggcgcttttgccgttccctgtacgcccaactaaaactatgttttcgaccggatgtggctgtgatgccgagaattcatccttatggtctacttctgctggagctgccgcatcatccttcttatgatcttccttcgctggaaaagactcactattcttctgatcgttggccatttgctgaaatttccttaaacccttcatttttcacgtaaaatgttaattattagctaatagatcaacataaaaacgttgaaaaagctatacgtgtatggttacgatgtttgagaaaaggaaaatataatcacatgaagaaaaactggaaacttaaagcttgtaagttgtcaattaaaatcacatgaaatacagagaaagcttagagggcacgtaatcgtaaaccatacaaattgatcgatgagaaatttaaaaaaaaaaaaaaaaggtgtgaaaatgacgaacttgatttttctggtagctcttaacagatgctaggcagaagtggttcatcatcaagctagttttcaagtttaaatagaacaattgaaagtccttttttcttcaaataaatataaatataaaatctatataataataaataaatacataattagtcttacatataaggatccttttttagactgcattatatgaagttttagattggtgaccactagaagaaatactaagaaacaaaaagaaaaatgaatgaaactaataaagaggaattaaattaagaaacagaaaatttggataatcagaatatgaaagtacaaacaataaataggaataaactatctaggtaactatttaaaaaatgtttggaacaaagaaattaaacttaaataacaataaattaaagttaattgtaaattttattttatgaatcaaatttataaattcatggtagatatatatgttataaatataagttatagtagtagtttcatattttaacataaatttaaatcttttggacatatctctcgtatttattttaccgtcaatataaaaatgaatttaattcattaaattatttaaacataaaatttcgtataaaaatattagtaactaatctaaaatcagtattttaaattattaaaaataacgtaggataggtagagtcatctatcgtgaatcttcaatgtacgaataaaactagccatggatatgttttcgataatggagataaagttaagtgagaagattgacctctttgcttaaaaaaataaaaaaaataaaattctttgctatgaaattggatgaacttatctattttgacgttgaaacattatgtttgatcactagttgcatgaaattgcttctcctcttcattggtatttttatcttagaagaaaattggtgtaacagattgttcaaagtatcttaatcaaaactaatggtggagccatagttaaaaattccatttcaggacaatcgtaaaaggttttaaacttctttattcacagctcattttaagttttgttttctttttgttaatttaagttcttgaaatgatagtactaccaaaaatacctagataaactatgagaaagaacatataaaaatatgagaaaattagatcgaaaagatttggttcgtctgatttgttttgtgccaacatatataaaacttcgtgagaattgatctctcttttctgtgaaagtacatgtgaacccatccattttgatgttgatacattaattttgaggaattacttctcatcttcctttttgttttttcttagaagaaaattggtacaacggattgttcctaacctcacaagcataaaaaaatggtggagccatacatcaaatttggagatcaagacaaatattgatagttacagtgaatttgtttgatgacaaattttccatgaaacttcttctataattagttgatatgtttccgacaaagtagataaagcttcgtgcgaagattgatctctttgttgtgaagttacatatgaactcattgaaacattaattttgatcactatttccaagaaattgcttcttctcttcatggttgttttttttattagaaaacaattggtgtaacagattgttcctaatatctttaatcaaaaataattgtggagccatacattacaatttcatttcaggacaaacactgatagttacaactcctttttaagtttagcttttaaacttcttgattcacagctcattttaaatcatttttctcaatggttaatttaattctaaaatgatagctcactactgaaaaatacctagattgaactattagagagaaataacaaaaaaatataggagaaaattagatctaaaagatcttggtccatgagacttgatatggtgtgctagcagacataaaacttcgtgagaagattgatctctatttctgtgaaattacatgtgaactcatccattttgatgttgagactagttttgaccaatgcttccatgaactaatcgcttctcattttccttgatgtattagaagaaaattggtacaatggagtaattgttcataacttcataatcatattgtggagccatacattgatctcctttctgtgaaattacatgtgaactcatccattttgatattgatgacaaaatttccatgaaacgttcttgctaagatcaacgttcccagtcaatatccaatgtcgacatttttctgtcactattttcagtttggtcctttctccacatatctctttggtcattcttatatttttagtttatagtaactcatttatttaatacaaattttttaactacagtaagatttcttcctcatgaaattcatagatttttcgtagcatacattttctttatattaagtatctattttacgacgaaatgtgcaagaaaattaaccattgttgttcttgcttgtagccttttaaaacttaaagccaactttatacgtacaccacacgtggcttaaaactttactttcaaggatagagttatatggtgtatgtttaaatgatatagtacataatatacattaagaattaggtttgttacgttgttttatatttttagttttatatatgtacggataccatataatatattacacccacacgtattagagttattataaaggacatgcatgtattaggacactatggattttaacatggttcacatgtgggtgtgacttgttttgcataaaggacttgcatctcctacaccatagtgtctcatcccattttccaaacagctagtgaaccatgttaaatatgtagcattatatatattagagaaaagatctacgaacttccaatgtgtgacaaaaggttattatttattattacaagctttcaagctcaccactttggacctcaattactcattcatagtaactttaatttagacatgtaaatacactatcttatagtactcattagaaggaatccaaagactccataatccggtcatttcggtgaagaacctcaccgaaaaagatgccggaaaattggtcggagggattaattatatatatatatataaattagcacaaactttaggcattaatttgcgttacaaatatagtcaaatataacttgttgaattatattaaaaatagttcttcatcatatgcacatgctagagggaaaattaattagaatacctttttttttattaactcagtataattctaggcctacggagatgctcaaactaatctttaggagagatgtctatagataaattctctctccagatattcaaatggactttaaaaatggattcatatctatgtaagtgtccaaaaaaatatgttgaagtttgtcgtagcagaaatatcaaacgtggaatgtattaatcctaagtccctttccttaccactagaccaccagcccggacatgatataatataataagttggtggaaccaaattgaatcaagtccgaccatatcatatctgcttcttaacgattatggaattgcaccaaattgagtaaaaggaaaatctgaaggggtcggtgaataaatgatatagacttattcagttaggttccaaaaccttattttgttgttttcatttcttttgataatgtggttccaccaacttacgtattttgtttgttcctcgagcccctgcatgcatattatgagaatttattttaataatataattcaacgaatgtaggataaaacgtcatgatttttttattttttttggtaaaatatcttctatataatatatatgacaagaagcaaaatgttacaaagtctattaagccttaatatgatttttaattacatgaggactttattctaatactatgcttttttaagaatctaagaactttaatttctataactaaatgataggataaaaaggatcatgatttttatttatagtgattacagtttctatgtgataacaattttttttcaaattattaagaaaattattatagcaaatcaaactattataaataatgtggataaacaaatacagcgcttctaacttgctaagaatgtggatatttcttgtagtgtcaaaacaattaagaaaattattataccaaatctcattttaaacctaaattgacatacctttacttgaatctctttcctctagcatcgtgcccctaaaactgtcatattttttgctcaaattataatgtctcttcctcatacgtaatgtacaagttaacttgtatttttccattttagtttttagggtctgacggataacacaaaaacgatataaactgtttagcggcaaacgataaaaaatagttaaaaacgttacaaagtagtggtgtaaaaagccgaaaatatcgattttaataatgcttttatgattggtaattatcaaaacattatacttcacattccatcgatacagtgttatatcaaactgtaaaccctgtttttttcgcgactccgtttcaagcttatttcttttcttgatatttaattttagttcttaaaacaacaacactacatataaatacctagataggagagaacttaataaattagatttttaattaagagttgacccatgatgaaggtttgatttttatttttgctagcagtgtgaaattagtctcttaggtgtgaaattatatgtatgaagtcatcaactttgatgttgagactttaattttgttcaccacttcaatgcaattgcttctccttttcctttttgttttattcttagaagaaaattgacgcaaaatagtggtggagctagacattaaaatttcacttcaagacaaacaacggtgaaaaatcttccatgcaacaaccttttttgttgttgttaaagaccatggaacgctctttctaggatcaacgttctcgatcaatatagagagtcagcggtttgtgtcaatatattcaattcttaagatccttgctcgtcgatgttactggccagttggatttttttcatttaatataaggattttccggaaaaaaaaaaagctttcaaatcgtcatattttacaattctacctttcatctctaataatatatcaatcacaatgtaaaaaataaatacacaatataacttttataggtcatttataagatggacttgaactcctcgttacaaaacttcattttgatctattatttttatcaaaattttaagaaaagaatgacaacagacttaattgtgtattattttatattttatgtgatttatcttcatttcagaagatataataaaattgcaaaatggcgatttggagggcttcaattttacttcacatgtttgtttacataaaaacaatgttgtagtaactagacacaaatatgaaatccgaagacaaccttgttatgaagttcttgtgaataggaataattgtattagtatattaaaaaaaatattcaatattattgtgtgcaaaaattacaggactcacttagttttgccatcgtggtgtggtttcgtaagcacatagtatcatatgctaaacaaaaatcgtggataaattgacggtgttatgtgtggtgtaattgtttgaatgcagaattgcgtatgcatgatcataatgttaacttcaaaatttgctcgtcatagatgccccctgacctcttaaatattttgttttttatgcactgtcacaaaattctagatgggcaatcatgtcaaaattcggttttgaatttagattataacgtgttttcagaattttagtgcctagaatgttcatcacccatttttcgttttaaacttataaaagaaaagacttttgtgatcgttcaatataatcgtcgacaagaaagaaaacaataataataataataattttctatataaggtacacttgctacattgatatatatacttgtctaatattcatatcttttggttcattcttcatcttctaccttgtctcacatattgttaaggtaaaaaaagttcgtcctcgtcttcatatctaaatccttaagctttaattcttagataactaggctagctggcaagaaagaaaaaataacttcgatgacaagtttatgctattctccaaagtgtcaagcttttttggcaacatctatttttaaaataaactttcatttctataatgagtagttatttacaaagtggggaaaacaaggaacaagaattgataaaatatgtaaaacagagatcttgttttgattctttgttaaggaggacaaacttgaaaccatatttatttgcagtatcccttttaatattatttctagaaaaatatcaaacgataagtatttcaataattaaattagcaaaaaatttacatatatttaaatgacctgcatgacattgttttctgactgttttgttcgcggttacaatagaagtaataattttaaatacgtttttaggaaaattttacatctactgactactagaagaatatgaactttattagcatactactttccatatagaaaatgtattatttagtatttttctttcttattttatatcatctttataaattaaaattttattagatgtaaatatctattttaatatatatatatatatattaaagcctcttttgaaaataaaaagtattcaactattttgtttgtttttgtaaaacattatcgtaaatacaattgttaaacgatgtatttgatatatatatatatatatatgtacatacatgatatataaaatgatggaatactatttttgaagagaaacaaaatgccaatagataagtgtggaccaagatgaccacgttctgttaactttagtgctaatacatacaaaagagtatactacaaattgaatttagaaaatatatagtaaatgtttaaatgcaagaaacaatgattaaaaatttagaatgacatcttaatcctgcataataacattaattaaatctaacttcaattgatttttcttttctgttttacgatttcattttgatttattgtttatgcttttacaatagtagatatgaatttaaatttttatatataaattatgcaaagacacattatatttcctcatgtgctttctagaaagtgttagccaacttttcattaatagttatgcatctaacaaaggatgcatgaattttgtgaagatgaacaagggtggagctcaacagaaaggtcattcgtcaaagcaagctgaaaacatagttttagtaggccggacagggaatggaaaaagtgcgacaggtaacagcctcattggaaaaaaggtgtttgcttcaaaggcacatgcttctggtgtgaccatgaaatgtcagacacatggagttgtgacaaaagatggtcacaaaatcaatgtgattgatactccaggtatattgttacatgaatcttggattgatttgggattatgattttgtcattccaattgatttcaaaaatatcaccagttgcttgcttaatatgggacaggtctgtttgacttgtcagtgtcggctgagtatataagtaaagagattgttagatgtctaactctagcagaaggagggatacatgctgtgctcttagttttatctgcaaggactcgaattactcaagaggaagagaacacacttagaaccttacaggctctatttgggagtcaaattcttgattatgtcgtcgttgttttcaccggtggtgacgtgctagaagagtgcaaggagacactagaagattatttgggtagagattgccctactttcataaaggtcggtactttggatataatgatttttaaaataccaaattttagttatatgattcttaaaaatatatgtatactagaagttgtcacgcgatgcgtggattatatattcgctcaaaataattaattatagcaattttgatgtttacaagatgctttttacaaagacattttagttgattaaaagttatgcactcaattttaaattatttttttgtgaaacagtatgtttttcttccaaaaaaataaacagaaattattcagtatttgtttttgtaaaattgcaaatgcatgtatgaccaattttcttgaaagtcaaaacaatagatgaaccttctttacatttaaaaatttaaaacctatgatttaagataactttcaatgaaaaaccctctaacttgactaaagattttatatgtcggttcaaaaaaaataagtcatataaaatcttataaatatattgaaagacgttaagttatatatataatttatttaaaaattgttaatatatcgctcaaaattaaataaaatttcaatttggatgtttacaaattattatgatgtgttaaaaagacactttagttgattaaaaatgttcaatgcactaaactgattttttttttttttttgtgaaaacagtatattttactatataagaacttaaaatattcaagaatgtatttttttttgttgtgaaaatgaatatgcatgtattatcaattgtcttgaaagtcaaaaaatagagggagatttgtaaaactatcatttttttactacccttttatgttgtccatttttaaaaataccctttctcttgaacaaaatgaccaaattaccctcatctaatagaaacatgtaattggaaactgaacttttcccgccaaatttattggcgccaaaatttttttttcccgccaaaaaagatttcccgccgaacttttttcccgccaaaaaaaaagtttcccgccaaattttttgttccgtaacaaattttttctgagccaaaaaaataattttaaaaatccttgtaaatatttgtttgcggcaaatagatttacaagggattttaaaagggtcttaaaagatttacaagagattttaaaaaggttttaaaagatttaaaagagattttaaaagatttacaagggttttaaaaaatttacaagtaattttaaaaggttttaaaatctcttgtaaatctttcaaaacacttttaaaccctttaagaatctttacagatcttttgtaaatattttaaagtcctttaaaatctgttgtaaatattgtaaaacccttttaaaatcccttgtaaatattttaaaatcattttaaaataattttaaaccgtttaaaaatctttaaaagacctttgtaaatcttttaaatctctttaaaatctcttgtaaatcttttaaaacccttttaaaatctcttgtaaatattttaaaaaccttttaaaatcccttgtaaatcacccttttaaaatctcttgtaaatcttataaaacccctttaaaatctcttgtaaatcttttaaaactctttaaaaatcccttgtaaatctatttcccgccaaaaaaaaaattggcgggaaaaatatttttgaaaacaaaatttggcgggaatttgttttttgaaaatttttggcggaattttttttttgaaaatttttggcgggaaatttattttggaatattttaggcggaaaaatattaatatttcattttgttaatctaaaacaatttccaaataagggtaaaatggtcattaaaaatttaaagagggtagaaacaaaatggataaaacaaaaggatagagttgaaaagggtcatcatgaaaagggtattagaaagaatttttcaaaaatatatgaaccttcttcacgtttaaaaatttaaagcctataatttaaaataagtttcaatggaaaatctaccaacttaactaaagatctaagaatgtcagttttgaagaaaacaaaagtcacataaaatatgataagtgtactaaaaaaacaaactatatataaaatttatctataattattaatagaaaactcgaaagtaattaaaaatattaattttgatgtttacaaattgtgatgtctttaaaaaagataatttagtttttaagagttttcaatgcactatagtttattttccgttttttcgtgaaaaatgtatgtttttttttttttaacttaaaatattattttttgtgaaaatgcaaatacatgtattaccaattgtcttgaaagtcgaaataataaataaaccttcttcacatatgaaaatttaaagcatatgatttaagatgtctctcaatgaaaaattctcttacttgactaaagatctcagaatatcggttcaaagggaaaattaaatcatataaaatttgataaatatagtgaaagacgtcatgtcactacccaatttccaaatgatcaacaatactttaagtaaatgtaagttaaattagaataaattaaatattctttttaagaacttaaacaacaaaaataaattgatatttgatattacataaaaaatttgtcaccttgaagatttttttttactggatttttcctcaaaagttatattaaaacaattaatacgcagcatgtttaataaaacatttgattcatgattttgaattatacaaattaaaatttttcattatggtaatttgctttcaacagtttaagattactgttaaacttttttttatttatcttttattagatatttccatgaatccattacacatgagtttcaatataggttgaatagaaataaatatttttattttttattataataaatgaaatgtcaaacaattgttattattagatttccaaacagataagacggtgaaataaaattctaattgtttttgttttattatttagcataaatatagttttatttatgtttaacttcaaatgatgggaaaaagtagggaaaatatgtctctaagttaaatgttataagcttttataaattgaaaccataatgtttttatataattaatttaatattatataacaattgttattatttatatgtgatgtaatggcaacaataaatgaaaccaaaaacttaggaatcatatatataaaagtaaagtttcactctttccttaatggtccacttggcaatataagtttttttaaaatttatataaataataaataacttatttaacacacagtttaatataaaactgaaatcaaaaaaatatgtatcaactatatttttccactctactttattcaacacacaattaattaaaaattaactaccacaatttatttacaaacctgaaatcataaatatatataaattaattatatttctccacaccattttattcaacacaaaataaattaaaaattaactcccacaatttatttttaaattgtaacttccatcacttctcatcctataaatatatacattctctcattctctcatttcttcatccccttccaccgtatcttaaatattgttttgtttagttttaagtttttttcttgttgttgttatgagtttaaaaaatattattgtaaacacttaattctaaattttaattttagattatgaaccttacactgttattcttttttgtttaaatacatctcgataatcaatttttcattaccatcttataaataatcattctctcatcattttgcactatattcatgtatatatatcttatgttgttatatgggtaaaacacaataaatttaaaagatagaagttgtccttggggtttaaaaaaaaaaacttttatattaaaattcatatgattttataagaaaacaaattagtttgtcacttacaaaataaaatgaattggaactattatgtatgagtttatatcaacaaattattttgtaatttactttatcatacatttattttgtaaaaataagatatgatatgtttattaatatatacatgcataaataacatagaaaaagaaaaactgttaaaatatgagcaaaagtaagatatcaaattttaacatatttttaattttttaatcatataatattgatacaaaattattttaattaattaaggttttaaaaaaaaaaaactaaagatggaaaattttcttataaaattggaggataatttatagtagtgaactattaatgtgcagtcttattggttcctaatttacaaggaattttgatgacttcaattaaatccttgaaaataaagaaatgaaagattttaaacgattgttagagagttttttataatcttgttgattagtttttcataatcttgtaaagtttctcaaacaatctctttattttgataatactttccatgacttttcatgacttcattttgtgaagaaaaatgtaggaaatcataaccaataacacaataatttaaatcattaacaatcattaacaatcaaagatttttttgttttaattgaataacacaaaacttttaatgactttataaaagtatgaatctaataacccaaaatttatgaagagtttagattactttttacaaatcttaaatgaataacacaaaaatttaacatacttttaaaaaatcttgattgaataacaacagattttacatgacaatttaaatcactaaaactcttttgaaatcatacacgaataacaccccctaaaacataatatcatgtcaaaattttaaagatttgattttgtaattagttaagggagttgcaattatgctagaagaaaattcatttcaaaattgtagtttaatatgaagtaatttcaaagtttaatgactatttttctaaatatttaatatatctattaataaattattttagtcaaactacaattaatgataagtacatgtgtcatcaaagtatagtgccaaatgtcgcattagtaggcaaagttaggaaaaaccttctcttattatataagattttgaattacaggaagtgatgaggatgtctagtaaccgaaaggttgtgatcgataacaagactcatgatgaaggcaaaaaagcagagcaagtccataagcttctctccctagtagatgatatcagaaggagcaagtgtggagaagcatataccgatgatacatatcatatgataaaggtgaaaaaatctcttgcatatattctcctcagatatttttgaaactttaaaatgatcaaatctcgtggtatcttaggaagagtcagagaaactaaggaagcatcatgaggagctggaatcaaagaactattcagaagaatgtgcagctgaaatgaagaatcagtcacttatattgtataaggagaatttgaaacaaatgtcagagcaggtaaaagatatgatcataaatcttatatgactacttccggttttccaatattaacaagctctgagtatattttgttaagttggagaagaagctcaaagatgctgcggaggcgcaagaaaaagcgctaagcaagatgacacaagaaaacaacgagctgaacctggcgcttaagattcacatcccgttgccgccaattactccatgcaacattctttgaaaaatgtcttctttctaacaaaggggtttctcaagaaatatcagtaactattatcgtccaaagggattttgggttgccataagaagatacaatcaaggaggttttgtttgtcaaaatttcaaatgttttaccaaacctttctgttttttttcccattttgtatttcagattacatgttctgtccaaaactatattgtggtttcttttgttgtgtgtggacttttgtataactatgttttcttccatgtttgaataagtgtatggaacttgattttgatgaaaacgatgatgatgagggacttgatgaatcagaaggaaccgagaacacctcttgtgcacaagaagaaagagttatgagccaaaatgagggtcacagaagacaaggagttataagcagtaatgtccccgatgagaactcgtctgcaaatgaaataccaacctcgggtgaagcaagagattgccatgcagagcagtcagagccaatggacgtgtcagctgcgccacttagtgctagtcctcaacttaaaactcaccgaggaagagaaatttctggtgttgctgttaatcatgactcattcagactgtcgtggaaaagctttcattgaaggaaatagcttcatcttttgtcaaaggcagtgcacgagagcagcaagtctgcttaaatcttctgaacatggctatgattggaagtcatcatacattcacaagctttggaaggcatctcgtgacattgacagaggagaaaaatcttttccctagtttactctccatcatagagcaaggaacggaagttctgagggggaaagctcctctctttgttgcatttctctgcaaaaacagtaggcgttggctgacaaatttcttctgcaatgcaagatttcttcctgtggtggacagattagctaaagagaaagacagttacctgcaacaatgtcttgaggcatttgtgaatgtaatcacctccataataccggggttgctggatacaataaccaatgatatccaacagctgatgactggaagacgccatggacctgtctctccccttaacagtcgagcttctgtaaagactaatgcacacctgttccctgtggttcttcaccttctcggaagctctttgtttaagaacaagatggtaactccacaagtcctaaggcagttggcaaatcttacaaaacttgtggaagcatcgtttcaggtcagtagttagaacattgccatccccttttacattaataaaatgctatctgttattttattttgcactaatgggattggtcaattgctcatcaacatttgaattc

SEQ ID NO: 1166 - DNA, 82214 bp, Arabidopsis thaliana
gaattcaagacctcatagagttgattccagagggaataacatttaatcgttgtaataattacatcatatatttataattagattatattcatacatatttgattagattcataaagtaattgatcgtttattaaaaatataagaactaaacatttgatatagacattccatagaacaacatattgtctcgtcggaatttttgtatactattccgttttgacaacgtttattacacttcttgcatatgtatcgcgtgagacgattactgcgaagaatatctttttcttctccaccatatataatcatctctttacctggtaacatatacatctccttcccaagtaagcattgaatatggagtgtgatgtcgcattcactgcacatataaattccattcttgagatatatttttctttcacagacatcacaccagtgctcactactcgcatcttgttcatacgaaaaagtgagaagatgttcgtcatgcttgtacctaaatttcattggtatagtagcgcagtaaaaacacaaaacaaagtcacattttccacaatcgaaacgggtttgtgagcgtactttgcaaatcgaacagattcttgtagatccaaaatcagacggtagaaacaaaagatgtggatgaaaatgatggttaagtggctcagacgtggatgcacaaattacgtctaaacggaaattacaattggtcattagacacatgtatgtgaaactattgctttgacgctggcaagctgaacaactgaacatatgtcccacttgtaagaagagggcgtgaggatgtattacatgttctttttgcagtgaaagatttgcacatactgtatggaggatgaactcacattccatgcaactaaaaatatcacaattataaaccggaagtgcacatgcttgacaatgtttgttatcctcaatctttttatcaatatatttgtggagtctcatttgatgtttatgactaaaatgttgtataatcccaccagctatctctttaaatggcaaaatatctttatatatttcatctggttcttcctcgagttcttttccatcccatacatctttatgtaaagcacatcgagaatgagaaacataataacaacctttcacgcaagaatatcctccatagttctcatcaacctttttgcgacaaaccccgcaaaaccatttccgaggaagaaacgatgaagcaaatgataggcggtgttgatgccgagatatttttatgatgcacggcgaatatatacattctttatggactacaaaatcacattgatggcaaatatatagaaaataccttcgctcgtccaaagcacaaacattgcaagtaatggaagcttctctaggaaaataagacaacatatgttcgtgcctttttttgtggtctatcgtaaggagtggtggttttgcttcacagttagcacaaatgcaaaaattgcatatagagcaatagaaattcaattctttacgacgacaacaacaatagcatattgtgtttagctttaaataatcagatacgagaacttggagcggatgtttacgatgataaggattatttgttatcggttcgatacactctttatgaaaaaagatacgctccttctgacccaagtcttcgcgtaggaaataatagccaatgtcgtcatctaacagataagagcaaactctgcacctggactcccgtttgcagtatttatctttgttttctccgttgttgcaccagacaaggggatgtgaactgcttgtatgtgtagaccgaagaacttttctttcatcgagaggatataaaactaggacaggtgaatctttgaaatgttcggaacgaaagtcttctttttgatcaaaatcatgtcttagacgacaaacagtaatattagcagcattttcaattttcagaggatccatagttgatacgagagaggacggttatgatgatttgagagtgaatattgctaggttaaagcctacaggctacatataacataatatataggcgtggttatgaatgtatacgattttttaattgttgtaatgcaattttttataacctactactcaagtaaagtactgattctgttaacaactttacccgaagcaaccaaactatacattctcacgaaaagtatcactacctaaaagggaagattcagatgctaaccaaagattcttagactaatgttatgataaatgaaacatgctttgctaaaacgtgacgacggaaaccaattactatacttatatgtgtttatataacagttaaatcaatctgtcagacacattttcacatctctagagaaagcataacaaatgaatatgtgaaaaattccctatgcaatttgtaccaataatctatcttctctttttcttcatgctgtctctgaagccgcgtggtttacatatattgaatctactttgtatctccttacacagcttcaggaccgtcttgcggtagaatgaattgacgcattggccttggcgacttggtacactcgtggcgtctgagagtgagtgggatcccttcttgctcaaacccattactatcttccaattgtttaggaaggcgaagagccaaatttcccaaggacgaagaacctacaatcggacccttgttaattgcagaaacattctctcatttttcattttatacacattcctaaagaaagagctcacccaccatcaaccatatcctttgttttgtgaagcaaaaaggttcctgaaaggattgtcacaaacccacacaactccgtcactatctgagttccgtcctgtcgatcccagtcctgttccacataaattaacaattgttgttatctctagttaccaaaacaaattagagaaaacaccaagagttattatattatactttcaccttaaacatgatgacactagctaggatggtcaatgatgtgaacataacatagtatataggtgaaactacagccgtgttgaaagtgtcaagcgcctgtaatcaagaaaacaaaaagagaagccgaatgaaatttcatgatatgttaacagatatcaacatgaaactgatgctacctctataccttgtttagatagttcatttgggttatcacgcaggtgagaactatcagcgtgaagacccatgtctgagggtaaattaactgattcattcctgaaaacgtaagctttaatgctatcccgagcgctttgacgctcatgacctgctcaaatcgttcaagttattaggactcaaaacaaagctaatgaataaaaatgttaaatcataagttttgggtacttaccgacaatgatccaacaagagaacaaaccccgatatataccatgacatgtgactgaccgtactgtggtacaaactgaactatgagtataatggctgctcctactactgctgcagcgtagagaagaaaagctgcacaggacatatcaccatgtcttagacagattaatcaaacatcaattagacgggataaaacaagatttgaaaagagatcaaatggtaccaggttctgtcgcaagattccatacttgtaacacagaatcaatctcttgttcttgaggagcatgtaagacaatagttatcgaaccaacaacacataagacacaaccaagaagcccgaaagtatgcaacttttcgtgtaggatgacatgagcaagagcagcactgcaaaattcacatccgaaatgttctatttcaattactccagtgcacaactcctaatggttcaacaatactatcattgtgaatcaaaaaatttagactaggccacattgtatattccttatatagacaacactaaaagttgattgtgattccacagctagatcaatacataataaatctgacttaatactatccaaacctgataattatgctgagagcaccaagaggagttactaaaatggcaggcgcaaaggcataagcagcaaaattggcaatttcccctacaatcactgcaaaacaatgaaacattgtctatcccatcaacatcactgaaacgccaataactacttataccctcaccatcttccaataacaacaaacaaaaccaatctgcagtactaacaacaagtaaaccaagaccccaaaaaaggagcaaacctttaaatatgaagggaactcactcgttatcatgcctacccaccagagaggctcaagcaggtaagaataacctccagaacctacacaacaccatcaccagaatcatcaacgagaatcaaaagagcaacatctatctgatttgtgatatacttttactacatctgtaatcattaacataacacttaattagccattggcgctgcttcacttcactctcacaaaaacacaacaaatgatcaactagaatttgaaactaccctgaagcagaaatctaaaactggcagaataaatttccaatctttgcatagtgaaacaaacacaaatctcctccaaatcagtaaagagaatggaaataacctgctctgagaccagaagcaccagctctcttgagacctttcttcttaacaatgaaactagcaccaatgaataagcttgaagataaagccaatactaaaccctttatattatccgatgacattcctttatacgcatctctccaactcccactcaaactcgccatgcttttctacaatacacttaacccctaaatacccagaagaaaaaaaccgagctttaggcttgaatcaggcgattgggagagaaaagacaaaaactttttcagatcttgggtttgtccatttgcgaaaggatataggagacgatttagggatttgagagggaacgaggtagatcggatataaagacaagagcgtagaagaagagagtgacaggagagaaattgtagtgatgaagaagcatctaaatttacgaaaaaggtaaaagatttctctagcactcaatttttttttgcctatctaattgatgcaacctctaaattgttttaaaataaaatctatttctggtgacataataaaacgatgcaagtattctcgatttttactaattgcgaaataattagaaaatattaaaaatagcaacacaaaaataatagttcatgttatgtaaaaaatgaacagtattaatatttactattgcaataagaaaataaattaaaagagttttgtatgaagtaattacgagtctaaagttcaaaaccgattggatgcaaattttcataaattgttatttaatttgtgcggaagtgttagcggaacatatagtataaccggtttaatgataaatattaaatagatatggtatggtaaatattatggtgaaattttttataaaaaacatcaattaatttttatttagacgtttcatacccaattgtttttggttggaagaaaaatacacgaaataatgtaatttaatatctaaacaattaaatattattattttcatacttacgatctcacaactaaaataaaattccaattttctctttatcatctcaattaactattaagttttagatgatatgaaattaattttattaacatttattttattgtgtctaaaaatttaaaatttcagttttactataactatttaattttaaaatttaatataaaaattagaagaaaatcaaaaatattttaaaatggtcacgtcgtcctctttttataaacttcttttacgtaatgagagactctttcacggatctagatttaaatctttgaaaactgttgacttttaacttgacttggtggcgttgaatgtgtcgaaggttcgattcctggagtttcatttggagaaataaagtttcagattaagcttggagtgcctcattctctttaccagcagctggatttggagaatgttaagtccatcttcccatagtaagttccacaggtaacctcctcgatcatagaatttctaaacaaagttgttgtcttcccagaagaaacttgagttctttgtttcaagtattattgtggaaaatttgagttcgaaattttggctttgtactagatataagttactgtgaaattggattaagattggtgttgtgaaaagtagacagaaacgagcattaccatttacttatttgatccagtattgtttgtgcgaaaacatctctcattgtgttacttagtcttggagtcagctttatctaccatgttatcacaatcattacttccttctttgtttgaagtggagattgtgaatgtggaggtagtggatggaggactgatttgctcaagcggcgttctagttgaagaaatgggtgatacaaatgaagattgctatatagtgtatgccgcagtctacggtggctaatggctactaagtctccgagtttaacaatgtcattctcgttgataggagagaaaaaacgagaacaattgcagtcactagcttttagttgtatatctttatttaagaaccaatttggtttgtaggaatcaataccacaatttcagttaaaaagtaagtttgattcacactccatatttcagttagagactcatcaaatggttgcagcgttcggtacggtataaaaataatcgcgttcaaaagctcagattatggtggtcaaggatgtagagagacaagcgcagacatgcgatggcgatattaccatattacgaaaagattgaacatgaataattcatctctctaatgacgagaaaaaataatgacttgactctttattctaattgatatgtaaatgaaatatctgaattcaaaaaaacctttacaaaccaaaaaataatatgcagacgtaaaaacaatgtaaaaattgatcacacgatattttacaggttcactgtgacactcaaaattatattagcaagagaatattgaaacaaggattgagttaaaattagtgctgctcaaaaagaatctaaattgaaaatgtgtttgagagaaagcaaacttaggcatgaccaaaaaaaaataaaaaaataagttatgtttaattgatgattacgatacgagtaatatcagaggcaaaatttaacaaattatccgaccgtttatactgtttttaataagataaaaatatatattgtagatcaacttttcttaattacaacatagttgtttttttttaacatagattttttcatatgcactatcattaaaacaaaaaaattatctgaacattcgatccttgtcttttgcattatacacacttacaatatatttgtaaggttttaaccatatggttaattaacagttaaggttttaaccgtatggttaaccatacctatatatttttacggttaatggttaaggtttttaaccgcttgatatggttacagaccaaaatatggttacgtgatcatgaagttgtggaatttatttttgcatttttattgtatttttatgtttacttgttgcgtgtgttttaaagataatgttttttgtttgtttataattaatttatgtgatcatgaagatgtggagtttattttagcattttcttgtatctttgagtgtgtttaaaattaatgtttttttgtttatgattgatttacttgatcatgaatttgtcgaatttatgttatcgtaatttgtggaatttacaaagttgtggaatttatttttgcatttttattctatatttttttttacttgttgcgtgtggtttaaaataatgttttttttgtttgtttatgattagtttatgtgatcgtgaagttatggagtttattttaagtatttttattgtatttttgtgtttgattaatatttttttgtttatgattaatctacgtgatcgtgaatttctcgaatttatgttatcgtgattttgtgtaatttacttgatcgtgagttgtggagtttatttttgcattttaagtctaattttttttttttttgtggtgttttacgtcttcgtgcgtttagtgttttttttttttcgagtgtaaggaacatttttggctgtgtttattttttttatgagagagagagcaagagagagttaacattttgttatttactctgagcatagtgaaacatatcaaaaaagataatcacaagataaaattgatacaacaaaattagagccgagaaataattaatgaaacttactatatactcagctaaggttgcttctcattcgtacttttaacctggacaaaagtaatgcaaagtaaactaaaaatactaaagaaacaagttaccttaacatgaaaaatggttggctctcccatattcacaagacttttaatttttcactgacgtctttaagtgttgctagtcctaatataatttagcgaataatgttatacggatattaaacaatacagaacacagtcgctataatctttggccaacattctaagaaactactctacgaaacaaaagcttaccttcttcaagtctctttaccaactccttaatagatacatcaacaggctcacactaagttatattcctgcaatacaactccttaataatgaacaatgtctacatcaaacggacaaaaccacacaacttaatttgagaaaacatgcaataaaacactaacagtctctctaatcttgaggcagaaccggtgggagctatcctctcaaaatagaagattataactacacccctgaatacttggaatatagattaaactcacattggttctattaagaagagtataaaatgatgggaataggtttaacatgattaccttatcattcatgagtacgttgaaacgcatctgagacatttcctctttctcatgaaaccatttaccaagaaataagttaatagaagctattctaaggcaatatattaaaaaagagttcgagatgaggaacagtcacaaagcaagttcttgacatcaaatatgattatccacacttttggttaaagaatttttgtaaaagtttgttttctgttttggaagttgtttggacgttctgtgctatgttttggttttgtgtgtttgaatttcgctgtgtcttagtgagtttaagttgtgtttgtgtttcatttttttgtgtgcatttgagcgtgtgttttcgtgaatttatgttctgtttttgagacagtgcaagagatgtgataagtgagagagagaaagattgagagagagagagagagagagagctacttcatcaatcaccatacctttgaatagtcttcagatcttctttgcagctaaacactccttcatcttgaaaccctttatcaagagttctttgcagcttgagaaatctcttgacaccaaagaacccttgttaaaaataaaacgaatatttaacaggaagaaacatgttaccgtcaaatcgaattaccttaacatgatgcactaaaagaatgcttggtcatcttatcactgaggctcaagattaggggattctgttactgtcatccacaaccagagcctttttctgtgtgtattatgttgattcccctgatcagaaagtaattaattacccaatagaaccgaaaatacaatgaaaaaacagaaaccataactcttaaagagccttaaacattataaaatcaagtacctggtaaccaaatttcgtagcaccctggggaccagaacaagatcttttctactactttgacctggacagacgcataggcttttattttccagaaacttatccatatccgcaagcatcagaggccgtgtactcaaacaccaccttcaagcactattcaccatcacaaacaaacacatcataatctgatccataaaaagtaccacaaaagatggcaccatcataaacaaacacatcataatctgatccataaaagtaccacaggagatggcaaaaatgggttatcgaagtagctaagaaaatcattaatatgtttgaggcactttgagctttgcgggcattctttagttagctaccttttcctggtaattgtttagcgactgcataccttgagagatatgcggagtttcagctgcaaggcaatatctcaattgagaattcaaaattaaagtttgtgatagtggaggaaggtgcaaacctttgtctcaggatccttgagtttggtgacagtctcgcgccaagcctcgcagtttcctagatggaattctgaagcaagggccgtcacttcttgacagaggttaaactttttgcagaattggtctgatttgactatagacttgtgtgaagaaaagctcggtaaaatgatctaccatggaaaacattgcattatacacataatggcagagttaacatgtaatcactaatcaaaagaaacagaaccgaagagctgagaacaatcgagaaagaacccacaaatgtcaatgtttaatcttactaactagttcgagaacaatcgagtttctagcatcacaagaccatgtcaaccccaagcggggttaggagtaggactccaatctaccgtccatggttcctccataaactataaccatttaataatcaaaactgattcagaggtcatcaaatttaaaaagccttaaacattatggagataaccagaataaacaagtacctgggaattaatagaggactctttcctgcaagttacacatcaattcgtggaatgtgaagttttttgttcctattgttgagttttactgtttgagttagaatttttctacgattgagcgtgaattgtgtttttttttcttcttctttcttttgaatatgcatgcgtttggaagtgtgtttgtgttaagttttcgtgtgtttaaatttcgtttgagcgtgaattttgttgtgattgagcgttatttgtgtttttgccatctttgatctatttctgggataaaacaacatggaaaaaaatacatgatgaacaagccacaggccagaggactagtctgtggccagtttgtggtaagagagagagatacttacctcaacacttgtatgctgaaacttttggtctttgaagcttgaagatttttcttttgaacgtgaagtacctgatcaataaaatccaacaaacacagagattataaaactaactagaccaacaaaaataacagaaccttctggctagataactatgttcacgagatactccaagaatatagtttaattttttttttttttttgtcatcatatagtttaaaatttatatccgactctttcgaataattaagtgttgctaacaattgaaatggagatatgaaaaacatccattagagaatcacgtaacatcttatggattggacactaaaacatcttatgagtactgtagttatctctaagctttggtactatcaagtctaagaactgaaccacgaaactgaaccaatctacattgtaataacaaaaaaactgaactttaagcaaaaatgtactcacttctggatcagatatcgaagctttgatgaagcagaaaaggaagacgtattgagtcgggattgtcaaataccattcgaggtttccaagaattgccttcttcatcactagaatctgtctgctactgtaagcattgtccgtgacatacaccagatcgttaacctgcacatcacatgaacaataatcatcagctcacagtcacatacaaaaacacaatcaaattattgacatcaaacagtaagtacctgaggtggccagatttcttcatatttggaaggcactgattcccactacctgcaactctctcttgggaacagctttcacatagaggaatcgatcaatgatgttaacagtgaggtacagagtttcaaggttaagctcaaacttgatgtgaacttctagtaaccaatcaatcaagatcgctctcatcttctcattcatctcagtttgaatgtgcatgtacatcttaggctgactctccttctcaacttctttatagaacgagtacatatcatcaacatactccactgcagccacatgattatctttgtcagattcatcaatatcaagaatctttggtttgttgactataccacaagcagctttgctttgagcactaagtacatacgagtacgtcactttcttattcttaggtgacatcgctacttcctcttcgtctcgatcacttcaacaggcttcgtctgttgcttaaccactagattcttcttctgaaccgccctttgagcttctgggtttcttgcagcaagaggctgactctttggaccaagagctggaaccttgttgtctccattgattggctttctttcgagttgggcattcgctaataactgggcacgaaaactaagagtaatgggtcgattaatcggaggttgagcctttcctccttgaactccgggaacagaaacaagatttccgatgtcaccgagggcacgccgattcttcacagcaccgtttttgttctgaatcttcaaaccatcaacgagaggagcacctgtttcacagaattcaaaagaaacccatcaagatcttatctttgtttctaaagattcacaagattaacaaaaaatcgatcccaaagaaagaccgttacaagatacttcatattcaaattggatctgtatcgtcgacgagtaatcataacaatgcccaaatcagaccgagttagggcaaacgagttatattcaaacccagattttagatcggcgaaatacaaaaagcaatgatttcacacgcgtatcgttacatatcaaacacaacccagagaaataaatcatatcgatataaagaaatcaaaacaacgataacctactgaaactcaaatcgattcatagaattaagaacaaacctctgacttgttcaggtatgtttgccctcgtcgccatgatcgctcaaaacgcacaaaacagttttcaaagttttgaattagcaaaagtgattatgagatagagagacaaaactgaaccacgaaacgtttataattgcatcggctgtggcacatgatgatagttgaaacaaacagagacaaatcatctcaaatagttgtgattttcataatcaaagaaacaacgatcaaatcaaaacacatgtaactgatgttattcaaaaccataaaacgttgatcatatatctatttaatctttcaaaaactagcaataaacaagattaacagagatgatacgaagatcatcatcacactgattcttctagatcgctaagaatagggtttatacctgagagatttgtgcgtttgtgttcaacgatcgaagcaacagacccagattcaatcacacgcttctgttctggaataatcggaagagaattttgaagtgaatgaaatgatcgatgaatcaaaaacaaaattaaaatcttggagagaaatgaaatgaatagtttgcggagagaaaaggaaaaagcttggtatatgtaattacgaaatgcccttgtttattccgttaaacaatttggattcaaaattgaaaatgagaattttccccctgatctggatattttgtgtccgttaaacttaaaacactccacaaaattcaaaaatacatttcgaatcacatgggctaatatatgatttctcaataccgtgttgtgtagtgtggtttccgatttgtttttgtaaaccgcaatttcaaataaaactctgttctctctcacataactttcagagagagaaagtttttgatgtttacagaccggaaattttccggtgaatcgctgtcccaagtgttttggactgttgcccgatatcttccagttctgttagtggagatagccggttatcgtccggcaaatccagcttctatgagtggttttggccggcttctatcttttctgccgtcgatcggttttataaccgattacttttcaagttttttcatgttttctttcaataatttctatagatttgagttgataattagtttttaagtacttattacttaaaactaatgtctccggcttgtctttagaaacctcaatttgcaggaaatcattcaagcaatttcatcttggtttaaaggattgcagaatattctgatgcatatgatgattctctcatgttgtgtctcttttagagctccgttcagatatatttcggtggtaaacaaggaaatttcgtgcgaagtttcgacgatgttttactcaccggattcggtgcttctcgatggcagaggctgatgtcggtaaacttctgttgactcatcagaacgtgttgctgttgtaatattaggtcaacacttgtctttagatagagtccaatatcaaacagtcttttgccatagatgttaatgtaatgggccattgttgggtatcactgttaccctgcttatttacccttttgtggtttagtaaatttcacttgagacaaaaaaaaaactctgttttttactcaataataaactgtgttcctaagaactactacaagaagtgtttaaacaaggaattacaagaaggaataaaccctaagagcatttacatgtcttaactataatttattggccaaatgaagagagagaaatttgttggcaaaatgaagagaaataaatttgttggccaaataaaagaaaaaaataaaaaacaatagcaccaaccaataacatgatgacatattcgtgtcttccagtatcaaaaaatatcttcccacagacatcaaagccaccttgtctctcctgttaagcgcattaattctcatttttctatttttttattctgttaaaatttgaagataccctctaaatttgtccgatggggatggtctaaaaagataaataaaaaataaaaagtacttaagcccaagttatgtttaaaacaaagcccacgaactaaataagatgagaaacaaagtaaagatgtgttgaatcaaaagtttatagtgttttataatttaaaagaaaacatattctatatttaacataatatattttatatatctatttaatacattgattattatacttagatagtttttttttaatttcaatagtaaaataaagtgaataaaaataattaagcaaattgattctttttacattgtcaataaaaaactaacgtattattgtacaagtgcttttgctaaaatcgttatcgtcaattttctatatattaaaaaaacattaggacatttttttgtttagactaaagagtatgtaaaattttctatactttttcactatgaattctgatttaattttcgcaaaaaaactttctatttttttaccatgtaaattttagattaaagagtcatctacttcaataatttctaatgaaattaataaattaataatatttattttcatttcccttttaatttagtgttgaaattgaaaaaataagtaataataagaatcatacaaaatatattttctgttaaatatagattgtgtttatttattctataataccataaactattcaatagaataacttcttaagaatattaaaataaaaaaaaaatcatttttcgaatatttttgttggtcaatgctgatcaacattggtcaatactggatttcaacaatttgtataccggaaaaagatgttcattgatcacatgccgtcatgtagttggtatatgtggggatgaaatacatctagttcgtgtagttgattgtacatttctaaacttggcatgtgtggctatgtattccactatacttggtgtagctatgtattccactatacttggtgtagctgattatattttttcctatgtattaactcggttcactgtagatttctaataagagattggttttaaaactaaccaatcttaaaataacctctcacgatttgggatttgttgataataataatgggaatgttccactattaggcacttttaaaagaatgtttttccgtttgaggcgctttatagggaatagacaccttttctactaattcatttttttatagacttttttaccctcaattcaatatttatgtttttaattctcaatttctctttattgttatacatcttccacgatccttatcgaaaataaataaaatatctgtctcttttttttttctctctctctctctctctctctctctctctatgatttgtagcgcctctctctctccacgtctccataacttttggagaagtttcttaaacaattcgatctcgattatctcaggaatttggtaaaagttctatgtccataaggtcttggaggtggaggtctctgcaaactgtaacaaaatcaacaaacaatgttttggtgtccataataacgagtccatttaaatatatcccttcggaaacctttttactgctctatatccattctgtataccatgtccatgataacaagaaattcgattaaccggaatctcgatgctacatagatgaaacgagtttgacacatgagagagagagcaaaaatcaaatcaagccgccattgttgaagaagaagaagtttcttagataactgaatctcaaatttaagtcaaaacaaatatttaaatttcaaaataaatcacaatcttataagaaaccaagacctcgtattctccaattagtctagagagaagagaaagccatcgcgtagtgtggatttggagattaattgcagatttggaattgaagatattctggaaaaggtttttttcttcgataaagtgagaaaaaagaaaaaaaaagagaagagatgggaaaaggagagagaagagatggccgatggaaaaaatgtagttaaagggtaaataagtaaaataatttatctaaattaccttctccatttaaagtgcctaattaggaactaactttaaaaaaagtctctaattacgtaatattctcaataataattgaaatcataatttagatataaaaataaaattagcaatacttacccatataagattgggttcttgaaaatcattgctcaagagatctgttcaaacaaaaaaaatcatagattggaatttcaatcgaaacatttggaaaaactaaagtctaaatctgaatcaataataaccttacctctttgtaaaattccagcttagctgctagaaacaggaatatcactctcatcctcaagctaatttttccagcctcattgtacttcatttggcgggagaggaaccaacgtcttcactccgctacttcacgtcctactacttctatcattaaggaaatcaagatgatagttaggacaaggcttgatcctctttctagggctcagagatccacccctcctgccttgaccctcctcgccacttggttctccttatcccaatgacattttcagttgttgtttcttttgtaggcttggtttcattgggttcactttgtgtttggaccttcctcttgctgcgggggctgcgtcctcttgtttcgggcctcggccttgtttgtttctgtttcaggtttgcgtaccccttctcggcatttatcatatatgttatgtttttctagtaaaaatttaaaaaaaaaaaaaaaaaaaatttcagattagcgattaacagatgataaacggtgtcatagtgtattgattatcaaaacaaattgcaagtgattcatactacgaacaaccgtttgattttattttggtgtgtgtttgtttagagaagaagaaaagacaaggtttcttctagaattatctattcaggtaaataaacatttatcttttcaataaaatacaaaaatcaatcaatatgtgaaatgatctgaagaaagttttgtgggtttcggcccaaaacaaaattgtcatgttattcattaatggactcctaaattattcgttgaagcaaacaatttttggcattttattagatattcgataaataatcataaataatagacttatttgtctaaaaaaccacaaaaacaaataaaaattgtatgacttttttgtgttgtcgtcgtcgtcgttatcaaccctcatcatcatcatcaccaacgtaaccaccgacgccatcatcatcgccattaacaactggatctgtctccgtttccatcaaatctctttctctctctgcagatcaattgattttttacaacgtgattgaagcggggctagctccggtgacgatagttgattggttttgtcccttaagatgagctccttcaatggtaacgaacggcgtcggcggccgtgaatcatgagagagatggctcagtttctttttcttttctctgatcttcctctttatcatcagattctatctcagaaacttatcaatgtgcgtttgattttttttgcttgggttccctttacaataatcattagggtttagtttttgaatggaattctcttccaataaacaaaatatcattaatggtgaatagtgaggacgcaaatgattattgaaaagctttgatttcgaatactcgattgcagatctgccacaaatctgaaactctgtttttactattcaccttcttcttcatttgcaagatgatttcatttcgttcgtttaattttttgctttggtttcataaatactatcatctttagggtttaattattgtgaatcaatgaatgtttttagttagaatagattttaagaatatgagatttggaaaaaaaattggatttaaaagaagaggagcgtgcaagaagatgatgagagaagatgatgagattattcaggggtaaaatgatcaaatcgccctatcaaaactactctttttcaaagatcatacacaaaagcctcaaaatcaaaatttttatcaaaaaacatcctcttttgacaataacccctaaataatattataagtattatacactaatattctgcaactgtccagattatttatcatttaccaaagaaatatattaaaaattatatttatctttaaattcaatatttataatggatcaaacatcaaacaaatttgtataccgaaatttttttaaaacacaaaatataagtttctccttaattttcttttatgaaattttcttctaaaaatagaataacatataaaataatacataagagagaaatcatgctttattttacagagaaaaatagagatttacattggagataatcttatatgaaaactgtaaaaaactataaaatcagggcgaaaaatgtgtatggtaaaaaaacttaacatgtggttaaaggttttaaaaagattacagaatagttctctattgggccttcgaaaaaagcccaatacccaacaacaaaaacgcgcgtgtatcacaccttcaatacactagtaagagtcacacagtgatcgtcaccggtaaattagttggcaaactccgcctgctcttcgataattccgaggagcttcttcactcttcttatatctcatttctctctatctctctctctctctcgcattgcgattaacgaaattcgaaaaatgtctcgtcttctccaaacacccttcttaccttcagtttccctccccacaaaaacacgatcttccgttacgggtttccgggtaaagcccagaatcatcccaattcaagcaaagatccgagaaatcttcatgcctgcactaagttccacgatgaccgaaggcaaaatcgtctcttgggttaaatcagaaggcgataaactcaacaaaggagagagtgttgttgttgttgaatctgataaagctgatatggatgttgagactttctatgatggttatctagctgcaatcatggttgaagaaggtggtgttgctcctgttggttctgctattgctttgttagctgaaactgaagatgagattgctgatgctaaagctaaagcttctggtggtggtggtggtggtgattctaaggctcctccggcttctcctcccacggctgcagttgaagcacctgtgagtgttgagaagaaggttgcagctgctccggtgtccattaaggcggtggcggcgtctgcggtgcatccggcgtctgaaggagggaagaggattgtggcgtctccttatgctaagaagttagctaaggagttgaaggttgaattggctggtttagttggaagtggaccgatgggaaggattgtggctaaagatgttgaggcggttgctgctggaggaggagttcaagctgctgttgctgttaaggaggtagtggcagctcctggtgtggagttgggatcggtggttccttttacgacaatgcagggggctgtgagtaggaatatggtggagagtcttggtgttcctacttttagagtcggttacacgattagtacggatgctcttgatgctctctacaagaaggtgagtgtgttttgaaatccgtttggttggtatgatagagtagactggagattccattgattgtgataatagttgcttgatgaagttttgaactttgggatgagattatgagagatagctagttgaattataaatgatagtatcttatgatgtgcatcagaagcatacactagttacaaactgtaagtgtaaatgttgatttggttcacattttgtgtttggtttgtttagattaagtcgaaaggtgtgacaatgacggcacttttagcaaaggcaactgcacttgcactggcgaaacatccagttgtaaactcgtcttgtagagatggtaacagttttgtgtataatagtagcatcaacgttgctgttgctgttgctattgatggtggtttgatcactccggtgcttcagaacgctgataaggttcttttcttttgtatgctttataagagattttgagtttactctgtattcaaaaccggtatcagtgggttgttctatcttttgtaaacaggttgacatttattcgttatctagaaaatggaaagaattggttgataaggctcgagccaagcagctgcagcctcaggagtacaacactggtaatcctactactagaatattgaagtgatttgagtttgagtaatccttcaactagattgtttgagtcttgttgtttttatttcccttccgggtaattgcaggtaccttcactctctctaacctaggaatgtttggcgttgatcggtttgatgctattctaccccctggaacagttagtgcttttacctttatgcgtgtattttagtttgtatcttggttatgtcttttagcctaataattatgctaaggataacagctcattggttttcttgtctttgatcaatgaagggagcgattatggctgtcggagcatctcaaccttcagtggttgcaactaaagacggccgcattggcatgaaaaaccagatgcaggtaaatgttattatcaaccatcgttagaacttgttcctcttctcctttttgtcttcatgaaaacgtctcgagttttcctgggaacttgttaatgatgactggtcacttgcaaacccacaggtgaatgtgacggcagatcatcgtgtcatctatggtgctgatcttgcacagttcttgcaaacattggcaagcattattgaggacccaaaggaccttacattctaggccaaattactgcttttcgcatcccagtcttctctgcttttgattccatgggagcttgtatttctgcggtaatcagtttctttgatagaacaaaccttttaagattaaacataatcatttctttgtttgagatatatcttctgcaacattttctgcatggaaaggccgtcccacatgattttgctactgacttcatatatatccacttcatgcgatgaatcttatatgaactgataactttagcatgattaataacatgaatcttatatggactgataattttcaaactacaactgtgaatgcattacatctttcctgtttctctcagcatctcaaaaatggagatgcagatgatagtctgtcagaggaaagaaacctctctaatctctatgctgcttatacatacagatacagtaacaagcaaaaatttacatatcatgcatctgacacttttaattagagtcttgtgagcatccgtagaacagtcttcatctttggtcttgccccaggagagatgtttatgcaggcaagagcaacaccgagggcacggagcatctgctttgttgctacagttgatgttttgctcactctgagatcaagaatgttgttctgctgctcttgatggctcgaatggctctgcacccacttagccaaatctcttccttcacttacagctggccttccagttaacaactctaaaagaatcaccccaaagctgtagacgttcccagccattgtcaccctcatcgtgtaagcatactctgatgaagtgatcaaaagtgaaagattaagagagctgttgtttctcagacaagcccatataagttttgtataatgtgttcacctggtggaatgtagccgatggtgcctgcaactgctgagaggctgctgttgcttttggaaggatcgattaccttgaacagttcaatgtcccctactagaggctcagtgagcgacttgagtagtatttttttactagacagatctggtagaaggattggatcacgaccgctggattcggatccatgcaagtaagagattccctgagctatgccaaccgcaatactatacctgcttgtccaatcaaccacaccactgctatggttgtgtagaatctcgtaaagtgtacatgtgtgagaaaagtcatagatgagtaagcatccttctgaatagaggacataagctagtggaaccattacgtttgtgtgatgtagcttgcccaacatctctagctctacctctagttgctcactactcgcttgctggaaaaccctgtctcttgtgttaagttttttgatgaagtaactcgaaccagagggcatgacaactctgtagtaactccagaacattgtctgatgcagaccatgttctggatgcgcaacagcttccacagctttggcgaagttgatgtttgatctatgtagagcgtttgaagtgagaagctttccatgaattacctcagggagaacagttgacccttcttcatctgggtcgacctgcatgttgttaatccccttgcagcgccttgaaaatttcagcacggtgacagttatgatccctgtaagcagagcaagaactccaagggagacaaatattacaatcataactagtttgcttttccctgatggatttctctggatagagacttcgttctcagttttcaacttaaccccagggtttcctctgacatcgactgaaacattatgggtgaaccttggaatatttccggtaagctgattgttggagagtatgagctgtgtaagggacattaatctgctcaggaaattaggtatttcgccggagaagttgttatttgacagatcaagaacttccaagcggtcaagttcagacaatgtagtagggatagatccttcaaacaagttgtagctgagatttaaggaaatttgcaactttcgtggcattactgggatcctccctcgtagctggttttgtcccagctgaagttctatcaaatcctccagattttgaatgttatcaggtatggtaccattcagattgttgccttgcaagttcatgttggaaagcctctttagctgagaaagcgaaggcggtatggatccacttagagaattgcagctgatgttaagaatcaagaggttactcaaaaatgcgattgtatctggtatttctcccgtaagcttgttttgctgtagttttatcacttgaagcctgctaaggtttccaaatgcaggaggtaagatcccggtgaactcgttcatagccaagttcaggagattcaagctcacaagatttccaaatgaaggaggtatgaagccagttaaactgttgttgtccatctccagatacgttaggagctgcagcgattcaaacgcaacagagggtactgaccctgttagcttattgcttcctagtcttagcctaaccaggctagacgaaatgctttgtggtatccatccaacaagttgattagatgacagatccacagagacgagtttaagctgcgacaaaaggtcacctggaatcgaccccgctaaactgttgaaactgagatctaagttctcgaggtgttttgtgagccctgatggaatttctcccgtgaatcggttacggttcgctgcaaaccgacgcaatgtctggatgcttgaaagtgattctgggattagtccactaagatagttgttggagagaagtaaactttctaacttggagaggtttcccaacgaactcgggatagagccgttaagctgattatcactgagatctatcagcgttagttcttgataatctttgatgccttcgggaatagtaccgctcaaactattatctgaaacctcaagcttctctagacttttggtcaaatgaaccggaacagaaccagttaatctgttgaagctaagattcaaactcctcaactgaaccaacccatcaaaaccatagtctccaacgttcccactcaacacgttgtgagagaaatcaagaaccgccaatttggagaaaccgcggaaaccaggggaagtagaaaacttgttcgtgctgaagttcagatgcttcagagcaatgagtctttcgcaatttgtaacgaacccttctgggattgagctcaatctgttgttggagacatcaagagactccaaagtctggagattgcagacaagtggtaagaaggaagaattggagagatcaaagttagagagagacaggctaatcacagagctattgtctggtaagctgcagagaacaccgttccatgaacatggattcctctcagaaccaggaagattccaatccgagatattaaggaaactagagagttcgatcattgtgtttgtctggttcaacgacaactcagagaaacatacatggcaacaagataagaagctgaagaagagacagaacatgaacttgcctgtttctggaggaacatgtatcttcttcatctttttgaccccagtgaacattgctttcaagcaaaaaagatgaaaagcttaacgagtagagagtgctgagaaaatggaaaaagagaggtcacggaaagtgaagagaaattactacagtgaatagtgtgtcgtgttgattgggtcgaaggagttgacttgactgatacgtttttcatgtgttttgagattttctgttctgccacgtcatcactctttgtttttaactcttttttttccatcctttttttttaataataaaagtgggttctcttttgttgaccataatacaagttttgttttgttctctatatagaaagaaaatcatggagaactctaaagtctctctaatcattcaattgttcagaaaaaatgaaaaaataagccttggaaatttcaaagaaaatgtttaaataattcttattgattataatatataaattttaggagttttaaaggctagagatataaaaaaattgtcaagcatgtttcagaaaatatattatattgactaatcatgcaagtttagttattagtagtattttctagaaataaacctactggtatttgtttgaagtaaaaaatatgtaatactcacgtatccttaaaataaaaaaaacgagtatatgtgatatgttctttatctataacataactaattgatacgtttcgtggcttatgaaatacttgaaaaccatgatattgaaaaagagcataaaaatgattcaatatcaccactaacaattgaagaaatatttgaaatcatataatattctcaaaactgaagataagaaagacttaaaagatgaaaagattgtttcttatgtaaagaaaatgaaaaaaaactaaaaagacacttcaattactaacattttctactttccaactaatatatagtttttaaatatatatgtttttgtgcactaactttttgatttaaactagaaagatacaagaagatagtttatattcgaagaaacccaaatagcaagcttggaaaataaagtacatgaagatatataaataaaaaatagaaacacaagctcagtgaaactagatagagcatcaaaagaaatgacgaaaacaaactaacacgagcaaatatatgataaaaacacacattaaacaaataatcaccaactgggtaagtagatagtcaccataccttgtgacgttttgttacatgtgttttcaattatcagttaaaaaatataaataattgtttaagcacaagatgaaattttgagatgaacgccgataacttataaactgttatgttggtatatgaaaagaaaaagaattaataactaatgcataatcaagaaagaaaacgatactgaaagtgtgatgagaaaatgcaaatcagagttgatggacgagtaagactcgaccctataaatagatatgaatgaaaatttttttttggggggaggaggggggaagagggagagaaatgagagtaagctgctgagagccctcattgttacaaagaaggaagccgacaaagaagaaggtaagagggacactgaaccacctccaatgattctcgaattcttgctatggagttcgtgaatgttcatacattggtttgtggtagagtgttagatgagtaaatcagcaatttacgtaatcatatgggttggggtattttcacggatgtaaactagccctgggagttcggtagagtcgggttattcgggtcgggttaatcggttttgagaaaattcggtttttgaaaaattctcctgaattgaaccgaaattaacttcggttcgggtcaatcggtactcgggtaattcggttcggtttaagggtataaaattaattccgaattaaattgtttattttttctatttcgggtaatttgacccgaattacaaataaaatatggataataggcttaaataaagcccaaactcattattattaaactgcatttacatacccaacaaaacatttacaaagcccaaacccattaacatttacatacccaataaaaagtttacaaagcccaaacccattaacaattagggttttcgatacatttgttgacggtgaggcagcgacggacggcgacggccaatctctctaacctcaaaaaaaactaccaccaacgagatcataatcataaccacatgcaatctatcatttaaattgagaaaattagaaaaataaaactataaaaattgaaaatccgatgaaaatcaataggatctagagaattaccaatgaatccatgattttggtgataaggaaagcttagcgagcaatcatcaaagaatcagacgaagatacgattaacgagaatagagaagagctaacaaagattgagatttgagagaatgaaagagcaagttgaagatgatgaattcatgatggagaagaaacgttaggctggttatggactgattatggatttggtaaaggaagaagaagaactctctatttgagtttcgtaagaggcagcgcagatccaaaaaattgagactaaattagggttaatgacccataatctttatatatggctgcagattctcggtttaggtaaaaccgatcgcttccggttaccgaaccgacccgaaccgaaatccgattacccaaattaattttgccgatcggttacgtggattctgttcggtttacgccgataaccgaaaatttcggtttgatcggttcggttttctcggttatttccgaactcccaggcctaatgtaaacatatgattaaggtggtagttaactcattgatgtcttcgtagtagatgactactgttgagggctagaactgctcgatggttgcttgatgaatcagaaataccactataaaagaaattgatagtataaacgaaatagtcttatccttgttttagatctttcataaaacttggtgaatagactactcgacagctatactcaccgtaaacagtttagtcaaatggtaaatgctcatattatctacggttatcaaaacgttactggaaaataaattaatatatggaaaaaatatgtaaaattagatgacgatgctgttttaaaaacaatcacatagtagtatcttattccttaatctcccaaaaaacaatctacattgattgttttaatacaattcaagcatgtgaaatgaagaaaaaactctttaccaaaatttgaatactcgtgatgccgttacacccgatctatgataacttttatatctttttctgcctctacttatttatttatgaatttttccccaatcatgatagttgaagtatttattcacacaatactttagtttatgtataatttcgacttagtagttttatttgaatatgaattggccaaactccctagttttccatcattatatattaactagttatgagtggtgacacaattgtagtgatagatttaaggaaatatttactaaaagtataacatatttaacagtatcatttgtttatgtctccaaaatatccggttttgcaagtataataataggtagaagataatctttaatttattgaatgactatatacttcttgttacacaattttcttttcaaaatatcataaaataaatattacactcaaatttttagaatgtagatgtgatatgtagattgtataaattagaaagaaagcttaatatcacgacaacaaggggattttattttatttatggacgatggaaacaaaagtgcataatacaaatgcatgcaacaacaaataagagaaaaataaaaatagaacgagacaccggtaacatttttgacccctttttattaaatatgttttgattcttaattcaacttgagagactcttactggacttcaggtttttgacctcctcttttgaatatatcaatatcttcttcaccattttgcagaattcactccatgcaaacaacacaaaaatgaaatatcaatgtctctcaagattttaactaatctttcaatcaatagaaataaaaaggaaactcacggccatggatcgtctccaacaagcatctcatacccgtcactatctgtgaaagctattttccattggttgcgagtttgtaattggcctttgatatcaaagagcttctccaattctagtattagctgatcatatccattaagaacacttaaatccacagctcttcctattgttacaccttgcatttgaacctgttccatataaagattgtgtgagttgagtacaatgagaaaaagtttcatatataaggaataagaatatattgatcttatacttactttggtacaagtcctagaagaactgaactgcttgctttggatctctattggtgatctcaaagtttggctttgaccaaacttttttctttcagtaagtttcgaaatatccgagccaatttgtttaatgggatctttgatcatcggaggagtgtccagagtgactccaaacagcctaaaattagtgcctgccttggttgttatattttcttctatttgtgtaaccatttggttattgtaatttagtttgggcattggttggacagggtagctcattagcaatctagaaggattcatagcagcttcagttgtatcacgataacgaagagaaatattcatcggggaggccacgcttagttgtccaatttcttgtccttgtgtcaatataggaggcaagagatgtgatgatgaagaacctgtatataaaacatgaatattgagaaggaatttaagaatctcaaattcattaaatagaagattaattctttaaataaaagattataagagtctctttttataccgaattcattaacttctcgtaaacgcttgttcttgagcaaagatgatcgcggaacatttaacgcaggcactaaatgttcgatctcccagggtgacactttattaggtctcgaaaatgatgcaaattcatcccactgcacctgcaaaattaaagttaattagtgatatgttatttattgcactcaaaaacgtattcctaaaagaatgttataaagtgtgaatgaaattttacttctaagctgcgccactctgaacacttccaatgaggagagaaatcactaactccaataattgtcccaaaatatcttaatcaattgaacaaaatgtgttatcataaataatattagacattataaatatatttatgcagaaaataaatttcatctaatgttaccttctttcagagaaatcatcaccctcaaaccgcattgtaaatcttgaaccgacattaaacttattgttcacagcgtctaagaatttgtcataactgacaataaattgacttgacctgatacttataaagacacaaaatataaacctatatgttgaagggactaatctattgatatatcaatataatctaaaatgtgagttcaaatggttctttcaattaccttggcttgtaaaccacaatgaatatacattggttatcaaaagcatgctttgcggaagcaattaccccatgtctcatacaatctattgatactattgatgaaggtatattcccttgttgatgtcttgctcgtctgataccaactcgtaactctccagtctctcccctaaaatcacaagtaaatagtttaaagtccaaaactcaagaatcaaaagatatataacaagaaccaatattatacctaacgaatacaataacatctcctttaaccaatttctttgatgttatgaattcattccaaccagttgttaacgaatgtctttgcggtgtaccttcatggaataagaagattattagttacttctataggatttattacctcaatagttgtgtttgaattatttgaataaaatgaattattacctctatagttgtgtctgaatctccattgattatcatggagatctatagcaagaatttcttgtgccggtagaggctgagacatatcctaaaccaaaatttaatatgtaatgtctaatgaaagcttaaaattcaaattcgtttaaaaaaactataacattaaataccagcggagggagacattcaatggcatgttttttcggaacagagaatccaccataagcgcttgtatctgaggccgttaaaacctttgtaaaggaattaactaatggcctaaatcgattttcactctgagtagggattacaacttgctaagaatttaacaaaatcagaaaaaatcagaaaatcaatgagatataataggagaaaaatacaattgactgaaaataaaagagaaaaatactaaattttcacttacagttgtatctggcatcaaagtgatctcagcataaatctcatcactattgttttccacctataatcaaacatcaaacatcaaacaattaaccaattacttctttttacaataaaatcaaatatagatatcatgcgtattcgctaaaacataatagagatataccttaagatgaattgcaataacacgacattgaagcttagaaggaagatcacaaattggttgtaactcattcaactcttctcttgtagatgcctgaacctgaaaaggccgtcaaaaggtttcatacacgagagaaagatagagagaaagaagagagagagagaagaaagggagagagaaagacgagagagagaagagagaaagagaagagagagagaagagagggagagagagagagagagagagagagagagagagaaacaaaaagagagagaactcacaagctctatattgccttgaggaaagtaataaacattttctccaagttttggaatatcacacaaaggccctgcacagagtttccataactgctcgtacatatagctcttggatccatcaactgccgaacaaaaactaaaacattataaccaaaacaagttttcaataaaataaaataaaaagtcaaaatttcttacttatgcctgataatttaggttgtgcattcacaatgttgccactttccataagctcgtatctaaagatcggtataccaaaatatgttatctcaacaattattatacaactttctccttttcctcaacttctctcgcgaccatgagagtacaaaatatcacatttataggtaacaagtatcaaaatacattaaaatacttccttagatttgaatacacaatttaataaggttaccaaaaattaataaaggtaatttagagaaatgtcattaatattttgactacacataagaaaatcaattttcttatatgtttattgattaacttaccaaaattaacatatgcattattcatatataagttgagtaatataatacagttttaatacttacaatgaaattttttttatgaattttgtttatagatagccatataaatttaaataggagtttttgctagctttttcttttcaacatatgcattattcatatataagttgagtaatataggaaaattttagtacttacaacaaaacatttttttctatgaaatttgtttaaaagtagccatataaatattaaatatgagtttttgcttgattctgattgtatgaataggaattctctagcaccgtgatgagacctatcatatgggatctatggtacatctcatgttagcttttttttttgcttcctctttaagtttttaaggatcccttataaccggttttctcatatatcgtccctctttggagaaatctccaaggacatattcccttttccatttagctttccctttccaattagctatgatgtgaatttgcatgtatcccatggctattgggatgtccttggcatcaggggtggatcaatggtggtggtgatggtttgaccttacaaggggatgtggcttatagtatgataaattccatcaaaaatgtacaagggcttctcgctccctctaaacctgaatgtcatttaagcatttttgctctatgttttatattgatgattataatagttattaatgatattatttagcttatagaatttgttttttattaaattattaattgaataaatttatttaattcattaattcaataatttaaatgactaatcgttttctccaaaccatttgctaaatgaattagattgactcattatccattagaaactaaatttgtatggatatagattggtttgatttggtttaaccaacttgacatccgtaaatataacacccacaaaaaaaaacttataacactcctgtccgacagtcggtgcgccacgtccgggaggctttaaagacttgttaccgaccctaaaaattaccacatgatctttctccatgctttgtcctcactcgcatggttccgacagttactttccgaaaggtcatccatcctgaaactactccagcccaagcacgcttaacagtggaattctctcaggacctttgaccgaaaatataagtgcactttggtgacatagatggccaaatcagttcttttaaatttctccgcatgcaccaccatattccccgaaatcggggtgttacagtattcttcttagacgttagtccactttgctacgaaggaaacaaacccagttctcaagcttttggtcactggatttcactcttcttctctcaagtcagcctcactgatcctgtcatagctgtaaaaatctctccttttctttgattctttcttccgcaagctttttctcttcttcgatcaatgaaagatagttccttttgtaggttatcgatggagaagaaggtaaccaacgacgcagagaattgttgccttcgtataaagctcataggaaatcaccaaatcatgggagctactctaagaggccacatcagttcgttgatgaagttcttagaaaatgcaatgtgccagtgggtaaaactgtttaatactcaatgttcaatagactagctcaattctgtctcttggatatagtttagtgaattagccgtagaagtggatgaatgaatgatcttactggaatcttgtttgtgagctaggttgttagattaagcagttgatccttatatatataatataaattattatatatttcaaaatcccaagcaatatcattcgagtttctatacaaaactcttgaatatgatgctccatccacattcgagcctgaagccattggaactgaaataatttctggaaaaaagaaataactaatgaatgaatctagcaataaacgaatttcagcgatgataaattacttattcgtttcacttttggaataatccctgctcaatatctaaaggtaaaagtcaaaaaaaaaattgaccactaaagcccatattatactatttcgttccacaaaatatgattttgaaagaattatagttttcaatatgagttgcagagcacgtgaaaatcaaaatcatgagatgatggagattctaagaaaagtaataaacttaaaagcacatgaattatagttttctctactagtatgtttagtgtttattggtttgttataaacttttagttaagaaacttaattaattttgtcaaacgcataacaaagtatacggccgttttaagtcccaaccgtataaacgcccgtataagtgccatatatgcggccgtattaagcccaaccgtatttctcaaacgcatagcttaaatacagtgcaataatctgccgtatagcgtgtatacggcctcctagggcatagtttagaacaccgactataatatataattctaggctagaaatcaaaaaaaaatttgtcaagcatgttttagaaaatagattatattaaccaatcattcaagtttagttattagtagtattttctcgaaatggtatttgcttgaagtaaaatatatatgtatacttcaatatttttaaatccgactcggacagtgaaccgaattatcttcttgatcactggatcatggaatcaatttttagaccataagtcaattgattaaaatttatttaatattaacaaagattatataatttttataaatataaaacaaaaataatcatattatatttaacaaaatatgaaatcaaacaataagataacaaagtgactacattgtttaaatccaactaaaagtgtaaaaccgtaacaaatataataagagatcaccaatgacgaaaataaactaattaaatatgagatagttacactttaaagcactttacacgaaagtttttacaatttatgcaatttacaaagaataaacacttttccatctttttttaaatttttttggacatttgtacccttaactgaactaagaaaaacataatgtcaattctctctctctctctaaccgcgtcatcggtgagagcaacaatggagaagaacacatgaagaatattttgctctgatttgtctatcggttgatttcgatttctcttttgtagaagttgaattaaattttaacgatgttaaagaaataagcagatgaagccaaacttttcgaagacgtgtagtcgattgaatcgttatatgaaggagaatggttgttatggagatctgtttaatcttccaacatttggattaatcttcctttctccatggctgagcgtatgcactctgattttaagcacatcattcacatgggaatggcttcctctgatcttgttgcagcggtgcagccgccgctgtcacaaccactgatggttatgaagaaacgtcgacggagatgaatttcaatctttgatttaagttgttgatttagctttatcgttactgctactttacaagaatataacggatgaaaattgttaatgaagtttacagacttgtttaatcacttgttgaacctcttgaacttggaatgagattagggctatgaatggtgacatacacagcacccaaatccgcactgcaacagtactgtaacagtatcaaaatctctacatatacatatatatttatgtattttcgttactatttgaaccgcaccgcaaaatcatcttcaataatagatatgaatgttgatgatgtgaactgctctttttttttatataattatttctttgtttgctttggttttccttatgttcattagcatggaagtaatcaattcgttcgattaatttcagccttctttagcacgagactccacaaagcaaatattctttctctttatcaaacataaatctgaaaccaatcagatactaattagtcattcaaatttagttggataacatggtataactgtataagtagacgtggaaatttaagcttcgatactagagctttagatgattctaaaaccaaattattgatttagctctgttgttaaagctactcaatgttgattgtctggtattaacctgtgaaatagtaatttgacttgaccatttgtgtagagataattggtcattataaaatttcataccttaaatagttgcatctaaagattgattatgcagctaataccgatacaaagagctctcagcaaagttgaccatatacttggagttgtaaacaattgtctatttacttaatcatagccaaaattgttcatgggttccgttaagacgaaaccgaccatttattgttttccacgaagttccttccattcacttatttaagaactagacactaaactgtagatgtaaaatcaaaatctttaaccatatcctaaactattcatatcgtcaattaaaagtacacagttcatttttctttggccaatacacttgtgtatggtttagatttataatttggagaatagcaaatttagtatcaaaattataaaaaatatctttcattattagctttttttttttttttttttttttgtaaagaaaccaaagttctatgttcatatagtcttggaggtcgaggtatttgcaaactgaaagaaaaatcaacaaacaatttcttggtgtccataataacgattcattaaaatatatccattcggaaacctttttactgatccatatccattctatataccatgtccataataacaggagattcgattaaccgtactttgtaaagaaaccaaagttccatgtccataagatcttggaggtggaggtctgtaacgcccgcaatcctcaataggatcgttggctaggacttgatccgaggaaataaggtggagtctcggacaagtgggaaggagctggccataagctcggacaaaggggaaatcatgcgggctaagctaggatcgtaaggaaatcagctgggtcagctcgcccgaagctcaagctcagctggaatgagtgacggttactcgggtcgagtgacagtccagctcgggcagctggacgagagacggttactcgggtcgagtgacagtccagcacaggcagctggacgagtgacggttgagctcaaggtagttggtcgactgtctgaccagctgggcttttatccggacggttacttgggcagttacggtcgaatggttgtttgcccaaagggtggataagggcgagcagttacgggcgaagagatgcaactcttcggaaaggtgcaaggaacggatgtgttgattcgggaagcatctatttctcccctaaataagggagggcgcccacgaccatttcattcaccacaacacacagaaaacaccgaaactcaccattaaactctcgccctctcgggataataaatcgtcggagggtcgaacaagatgtaccgtgaccttaaaaggtactaccattgggtaggaatgaagaaagatgtggccagatgggtggccaagtgcccgacttgtcaactggtcaaggcggagcatcaagtaccaagtaggttgttacaaaatctacctataccggaatggaagtgggaccatataacaatggacttcgtcacaggactgccaacgaggataaagtccaagcacaatgcggtatgggttgtagtggaccgattgactaagtccgcgcacttcatggcaatctcggataaggatggagccaaaatcattgccgagaagtacatagatgagatcgtgagattacatgggattctggttagtatagtgtcttaccgggacacaaggttcatgtcaaagttttggaaggcttttcaaaaggccttagggactcgagtgaacctaagtattgcctatcacccacagacggacggacagcccgaacgaatgattcaaactcttgaggacatgttgagggcatgcgtcttggattggggacgaaactgggagaaatatctaaggttagtagagtttgcatacaataacagttttcaagctagtattggtatgtctccctatgaggcgttgtatggccgagcttgtagaacaccgctgtgttggacgccaatgggcgaacgtaggttgttcggacctacgatcgtggatgaaaccacggagagaatgaagttcttaaaaatcaagttaaaggaagcccaagatcgtttgaaaagctacgccaacaagcgtcgaaaggaattagaattccaagtaggagacttggtgtacttaaaggcgatgacctacaaaggggcagggcgattcacctcaaggaaaaagtgaagcccaaggtatgttggcccatacaaggtgatcgaacgagtaggggtggtgacatacaacttgaacttcctccaaaactagacgcgttccacaatgtctttcatgtgtcacaactacggaagtgtttaagtgaacaagaagaaagcgtggaagatgtacctcccgggttaaaagagaacatgacagtggaagcatggccgatgcggatcatggaccgaatgaagaaagggactcgggggaaatcaatggatttgtaaaaagtcttgtggaattgtggaggctatgaagaatacacttgggaaaccaagaataagatggaggccaattttccggagtggttcaaggagatgggtaaagatcaacttgatgtggatttggggacgaatccaattcaaggggggggagacttgtaacgcccgcgatcctcaataggatcgttggctaggaattgatccgaggaaataaggtggagtctcggacaagtgggaaggagctgaccataagctcggacaaaggggaaatcatgcgggcttagctaggatcgtaaggaaatcagttgggtcagctggctcgaagctcaaacgcagctggaatgagtgacggttactcgggtcgagtgacagtccttctgacggttgaacttaaggtagctggtcgactgtctgaccaactgggcggttatccagatggttacttgggcggttagggtcgaacggtttctcgcccaaagggtggttaaaggcgagcaattacgggcgaagagatgcaactgttcggaaaggagcaaggaacagatgtgttgattcgggaagcatctattcgtcccctatataagggaggacgaccacgaccatttcattcaccacaacacacagaaaacaccgaaactcaccattaaactctcgccatctcgagagaataaatcgtcaaaggattccgtagccagactgtggccgacaagtgagaagaagggtcgaattgactgaacatagtgaaagaaggtaaggaatcttagacttcgagtctaaggattctaggatgcgatatagtattcaggatccttgaaaggatcgactagtgggctgggtagaatcgggtcatgtgcaacctacacaagactcggtccgggcaaggatcggcttaggcggggacgcggctcggcggaggaccggcgggtcttaattgacctactgggaattggccggactgatgcgtgatcttcccctctccgaatcctgtccacggatccgagtagtgtatggactatagagcattacatggacttgcatatgactaagtaaacgagattacttatggctctatgactttcaggaactaatggagatcgtgggaagaacttggcttaggcgcgagagactcaaggccggtatgatggatggttatagttcggatagcctagggatcgattatatgacttgcaatagcttatatgcaaactcataagttttattgaatcctttgcttaattaataaagatcagattgtttgtttactctattcgttccatacattgaatcatagaatcgtatgaaatagatttcactagggaatgaacctcataatcggttagggtcaagtcacttagtgatttgggtcgggagatctcgcccggacttaggcaggacggatcggggcctttcaaggtctctacaaactgaaagaaaactcaacaaacaattttttggtgtccataataacaagttcatttagatatatccatccggaaacctttttactgatctatatccattctatatatcatttccataataacaagagattcgattaaccagaatctcgatgctacgtagatgaaatgagttttacccatgagagagagagcaaacctcaaatcaaaccgccattgttgaagaagaagaattttcttagagaactgaatctcaaatttattttaaaacaaaaatttaaattgcaaaataaatcttaatcttaaagaaaccaatggctcatactctccaattaagataaatttttatttggcttgagattgaaattgaaaaccaaaaattatattactagagacaaaaagagcttccttgttcactttgttcatagttttacaaaagctttgaaaatatcttctcatttcaagttcaagttcgattcttctatagagtaacctcgatccctcaacatctgaagcaccgtgcgacgcaccttgaaaagcctcgtgatttcatcatccatgtccgccattccttccaaagttttgattttttgttcttttgccggcgaggaagaatgagattagtgaggttttagggtttatggcactcataaataatggtgatatagcatgttattatatttaatggtttggatcttcagttatatgagatgaatttcttaaatacgatacgatgaatttctttaggtaatatagactgagactgagatacttgtccatgatcatatatatctcagaccttgagccataaaattgccttaaaaatcaaaagagacgagaaataaagtgtaaataatctcactaaaaaaacatgggaaagggtttttcgctatttatcacaaaaggaacaaaactgagaggaaaagagataacaaacaatgtctactactgtctatagcctatcttttcctcatttgttactattactttacgccatatacaacaacatgtggattacatatatgtataagattatagtccttattcatatcttgtagattgtctttgcttcagttatgcgttgtgtccatttctttcttgtctctttttgccgccattgttgaagaaaaagaagtttcttagagaactgaatctcaaagtttatgtcaaaacaaagatttaaattgcaaaacaaatcacaatcttaaagaaaccaagggctcgtactctccaattaagataatttcttctttggcttgagtttgaaactaaaaaccaaaaatcaaattacttgagccacctgtgagacccagtcccggacgtctcggcgtccggcgaccgtgtactcaagttcgcgcctcttctcggccgaacctcttaatttttcgcgattcaacatagaattgcctttacgaggtttaattctataatcgctctcttattacacaacgaaagtctttctaaccttggtttagttctaaccaactcttgtaccggtttcatcgtctttgtcccttagacttagatcgatcctttactcggtcaagacatgcatatgttcgctaaccattctaagccaaacaatcgcatattcctttatcctactttcacggtcaattaccaaacgtctatcttaactaataagctagatcgttacataccttggccaatatgcggatttgattccttagcccgtttgtcgccttactccattcgttcaacgactcgtatccgatcgtgaattgatgaaccaatccctatcgttacttagccatacaaccaaccaaccccactggtctaagtacaacgatagagattggggatcgtacgattcccttggttcacgatggccgaatcaagctcttggcttattggtccattcgttcaccaaacgtacgcccctccggctacatggtggacgattgagccctcggcttataaaaccatccatgtttccgtttcggtcgtttaacactacgaccgcccacggtttactaaccgtttacccgtccggtccatggtggtcgataaagctttcggcttaatgatccatccatgcggtccgaacgatatccttatcacacccaagggtccgtggattcaaccaccggatcatcgtaggctagcccatgaaatctttcctccgtcggccttaggtttgctcgtgggtccaacatccgttttgtccatcggttcccaccgtggactttcccgttggttatccgtcgagtcaccctttggtcttaccgatcttcgatcggtttcatcatggctgaggagatagatacatgaaggcagccgcgatattgatcccatatggtgaatcacgttccttacccattcttggtgctttctccctttaccggtaagattgcatccatgggcgacccttgggtgtgttcggatgcacttatccttgtgcttcctcaaacacttttcttgatccatcccatccgacgatcggtctgttcgacccgttccgtcagacgatcggcctgtcccatccgacccgtccgacgatcggtctgtccgatccaatccgtctggccgatccgatccgtcccacgatcggtctggctgatccgatccgacgatcggtctaccagatccgattcgtctctaagacgaacggtctaccctctccatcctctacactccatcaaaccgttggaccgggaggtagcatgcgcatcagttcggtcgagttatactcgccgagccgcaccccctttccgaccaacaacttcgggatgtgttgggactcttttaagaatgttttgtggtgtatggatgattgtgagatgatgtgagatgccctaaaggccttgggcgtccttccttatataggggcgaatggatgcatcctgaagcatcacatccgttccttgcacccttccgaaaggtcacatccgttccttgcctctttccaaaaggtcacatccgttccttgcatctattgggcgatgcaaccgttcgttggtacccgctcgaccttacaccttttggccgagacacctcttcacccgtgagctaccacagtccaccagctcgagtgtcagctgaccggaccacccagctgggtcagtacacgatcagctcactaagctcaatcgagctgtcggtcagctcacctagctgagctagctagtcttccagctggtttagctcacctagcttagctagctagttcatcctagtttgtccagctcacctaactggttaagcttcaactttctcgttcttccgactaagtattttagtccgtttcttgaccatggtctagttttctcctaaaacaacctggcttctttatgaacgcgggacgcggtcgttacaccacctatttgctcaagggggtggagaagcccgtggtggatgtaccaacccgtccactggaggtggtgacggataccgcaacagaggcagtaatgaataagaaggatgtggtggcggaaatggaggaagcggtggtggttacgagagatatagcaaaggttacatatcatgtggaggttgtggtgaaaaaggatacggtggtggtggccgtgagggaggtggctggatgttacggaggaagcggagtgtgagttggtaatcaaagatagtcttgttttttctcaccgatagattgttgaaagaaatggaagatgatgataaaccctataagattcaaatttgaattttgaatattgaggttgtcctataatatttgattttgattctggaaaaagagagagatgaagaagagaagttttcttaagagaaatggcgaagattggaagaaatgttgctaatgagaaagagaaaataagtttgagggcaaattggacaatttaacaaggcaaagtgccttcttctatttaagtgccttaatctgcattaactttccaaaaagcgtctaagtactaatattttcataaaatatcgcgaatttaaccaactattctcggatgtctctctcacaatttcattcattctctaaaagtaaattgtgaagtttttaccaaaatctaaaacatcaaataagtttaagaagtaaaaatatttctaaaaatgactgaatagagtttaaaatactatattttactccaaaatcaaataaattttttaaaacccagacccggtcggttcaaacggttcaccgggtcacggttgaatggtgagtttttgtggattttctcgggtttgaaattgttgggtattagcactaaccccaaaccggaaatatatctagattgcgggtaaatcggtcgaaccgggcagtccaggtcgggcgtgaaaacacttacgtatccttaaaaaaacaaaaatgtatatatgatatgttctttaactataacataactaagtgaagatacgaaagacttaaaagatgaaaaggatgtttcttttgtaaataaagtgataaaattaaaaagacacttcacttaataacattatctacttcccaactaatatatagtttttaaatataattttttttttgtgcaccaactttttgattcaaactagaaaaatataagaagattgtttatattcggagaaccccaaatagcaagtttggaaaataaagtatatgaggatatataaataaaagatagagacacaagctcgtcgaagcttgatagagcaccaaaagaaatatcaaaacaaactaatacgagcaaatatatgataaaaacacacacattaaacaaataatcatcaactgggtaagtagatagtcaccatactttgtgacgttttgttacatgtgtttccaattatcagttaaaatcataaataattgtttaagaacaagataaaatcctgaaatgaacgccgataacttataaactgttatgttggtatatgaaaggcaaaagaattaataattaatgcataatcaagaaagaaaacgatactgaaagtataatacaatgaaaatgaaaatcagagtttatggacgagtaagacccgaccctataaataggagtgtaacatttatgaatgaaaatgttttgggagagaaatgagactaagctgctgagagccctcattgtcacaaagaaggaagccgataaagaaggtaagagggacattgaaccacctccaatgattctcgaattcttactatggagttcatgaatgttcatacattggtttgtgggtagagtgtatttacgtgttatgggttgggtattttcacggatgtaaaaatatgattaaggtgttagttcactcattggtgttttcgtagtagatgactagtgttgagtgctagaactggtcgatggttgcttgatgaatcagaaaataccactataaaagaaattgacactttaaacgaaataattgtatcccttttatttggcaagtcagtaccatgttttagatctttcaaaaaacgtgctgaataggctacttgacagctacactcaccatgaaagttttagtcatatggtaaatgctcatattatccataattatattaaatataaaccgttactgaaaaatcatccttctatattatttgggaagtacattttaaatataaccttattttttgtaagtaattacataggtatgccattagaaataaaattttaaagagtaaattaatttatctttttaaggataataaaatcaattactaatttaattaattaaatttaataaaaaacgaaatatattattaattttcaaaaataataaccaatcaaaatcaacatataagatttgatatttaaattttaattaatttaatttaattagaaaaacgaaatacattattaatttccaaaaaagtaacctattaaaatcaacaaattagatttgatatctaaattatcatattaattttttattaattattatagttcacttctcatctttatatgattctatttttgcgaaaaataatatcatcattataaaaaaataattagagttttttcgcatatgctataatttgaatttttgaaaacgaatataaactgttcaatacataaaaaagtattataacggatgaaaaatagatttaagaaaattttctactgagtaacgagttataatttaaaatatttatattcaatttcatacatattatattgaaaatttataatcttatatactacaataattaataacatattagatttttttatgtgtatgatgtaattcaattgttaatacaagctagaaaatcctagaattgacgggtttagatcgatattaatacaagatggtatactacaggtaaaactcttaaattaacaatcaaactacaagtgtataatcttaaacactaaacaatatagataatatcaacaaaacatatacaactcacaatttacttttaatattttatatacaaaatcaattaaatcttaaattaaatcttaatcacataaaaattagcacaaaaaaagtattcaacaattaaaaatttatcaaatctctgtgttatataagttttgatactatattcgaataaagtgtaatataccttttcaatttgtattctttaactaatttaagctaactaatatatttgctaatcttatacctatcaaaaccgactatcattttttatctctatagtatttttgcaagacttttttggtggaattgggtaaaagtgcattcgggtcatatggtacattcccctattaaataaaaatggtatactcctatgttattagctaaaatgtttagattataattcagagtcatatattaataaaattaatattaataaaataaatagctttttggcaagacggatttggagtgacgggtttttgaatcaacattaataaaaaagtaaaatataattaatacaccgtttcaatacggttaaatctttaatttattatttttaagaccactaatattaaacatatcaaatcatcctaatttagaaaagattatataaaaccaaaaatgttatgtggtatgtataatgttaccatatataaaatataaatgtattagagaatgatataatttgcaaaacttttatttataaaaaataattcttaaattttaaaaattactactttaaaaaacaaatcacaggacgggtaaagaaattatagaacgggttttattttggaattgagttatatggtggatgtatttgaatcaatatttataaaattttaaaatattattaatatgctgttttaataggggttacaacttcagttttgtaacaattgtctcatagattcgtggtatagccttacttaataataattataaactgtaaaatataaatattttataaagataaaatttacaaattttaatatatattacttttaaaaaataaattgtcccgcggtataccgcgggttaaaatctagtttatcttataaagcacaagtcactaaaccagtaaaaacttgctacctagatttttatttttcaattaattttttgtaaaaggaattaaacaaaatactttgagatcgtggagaaaaaaaaagcctcaaaagaaagaaaaaccaattctccgcctaacaaaattgggctacgtgaaatcagaaaaaatacattgtaagcccatcacaatttttttaagtccaattgcccatcctaattcttagttttctacatggttttttttctttttatctctcatatgtcgactatcgtgtcctataaaatctccaaaaaatgtaaaaagaattctaattcctaattttgctcccactaacacctccaggttcaagctactttgtaactgattcatcttctatttaactccaataaattcactttaatttctaatcaatatttctctccttcgccaggtaattgttgaactgttttatgattctctggttccaattataaatttcctcatcaattgtcactacatcctatgccgattagtcatattcttttcttttatttttgtcaactcagttgaagatgcctatggattttactcatgtttcacatctaaattcttcaaaaaagaataaaagatcaaaggtctaatatccttgaccttgaatttttatcccaaaaacaaatagaagggagaaaacgaaggagatgagcctaaagaagacaaaggaaaataaactgttggcaaaaaatgtatgattattcactatggagggacctaaattattaatcctgataatatgttctgattttagggtatcatcaattgcatgtctcatcttctttttgcagtttacaattttgttttgttttttgtatttctcaattatggtttaggtttgttcatcatcgtttcatcaattgcatgtctcatcaaattctctattttaaattctttcgattttcaaattatgcattcggaattcacaaatttgctttcactttgttcatcattgtttcatcaatcacaagtctcatcaaattatctatttcacattttttcttagtcttcagaataatgaattttatatttacgttttcagtatctatgacattaccatggagatgaatcttcttaaacaccattcactccaacacaatggcaagttatgcatatatcctttgttgcagcacaaaacattttcgaagaagagcaaatttgaaggtaaattcacttctcttatggtcaaccctaaacagattttttattatcaattttgcaggtttgttgcatctccatttacttatgtttcatatcatatttctggtttttttattaagtagccaagaaattgtttaatcttttcaaacttccaactctttatttcttatggtttttcatatgctatatacatatttcaatcatagtcgatgaagggtatatctcttttcatcatatcatttatacaaattacaatgttgtttcactgtttacaacggtttttggaatgctttattatctttaacaaagttctctttgatttggcaggctctctaggtcttttacaagtgatcatataccattgagactcctctactcgcaccaagtggattcccgtcaagccattactcgcatcacaccaattattcagattttgtattatacaagctaaagaaacaaaagactcggctgggattttctccaaaccatttggcttactcttcatttttttcatcaccattcatcaatatatcaaaattaaacattttcgactttattaaatcgtattgttaaatgtttaaacatctaaacatttctatctttgttaaatggtttaatatattttgggccgtacgtaatacgagttttaacactagtaaactaatatatgggaaaaaagatattcaaaatttctctgtcgataacaaagatgttttaaaatgtataaatgcattactaccattatcgatatgttcaagtgtgttttatactttttgttatgtacaaacaatgacgtatatttgaatatgattttatttgttcgttactcgaatgcaataaaacttactatatgcattcgaaaatagaatgttttattattttttgtagtactcttgcatatagaaactgaaacttttattaaacaaatatatcgcatctatgcaaccaaacttatttttacaagagtgattattcatattaatttctgttcacccaaaaaatatattttaagttagaaatatacaatttggtcctccctccttttctcttccttccttcttcttgacattatcaattttgtccatatttataaccataaaaccgcttacatttctgatttttcatataagttacattttaaatttccaaatcacaaagtatattttcttgtgcaacaaacacatagtagtatgttattccttaatctcccaaaaaaaatctacattattgactgttttaatacaattcaagcatgtgaaatgaagaaaaaactctttaccaaaatctgaatactcgtgatgccgttacacccgatctatgataactttttatatctttcctgcctctacttccttatttataaatttttcttaatcatgacagttgaaatatctactcacacaatactttttttgatttagtagttttaattgaatatgaattggccgaattcccaagtttcccataaatttatatatatatattaactagttgtgagtggtgacacaattgtagtgatagatttaaggaaatatttactaaaaatataaacatatttagcagtatcatttgtttatgtctttaaaatatccggttttgcaagtacaataataggtagagtaaaatctttaatttattgaatgactatatacttcgtgttacacaattttcttttcaaaatatcataaaataaaatactacactcaaatttttagaatgtagatgtgatatgtatattgtatgaattagaaagaaagctctatatcacgacaacaagggaattttattttatttatggacgatggaaacaaaagtacataagacaaatgcatgcaacaacaaataagagaaaaataaaaataggacaagacaccggtaacattttcgaccccttttattacatatgttttgattcttaattcaacttgagagactcttactggacttcaagtttttgacctcctcttttgaatatcaatatcttcttcaccatgttgcagaattcactatatgcaaacaacacaaaaaatgaaatatcaacgtctctcaagattttaactaatctttcaatcgatagaaatagaaaagaaacttacggccatggatcgtctccaacaagcatcttatcatcgtcactatctgtgaaagctatttcccattggttgcgagtttgtaattggcctttgagatcgaagagctcctccaattctagtattagctgatcatatccattcagaacacttaaatccacagctctttctattgttacaccttgcatttgaacctgttccatatcaagattgcgtgagttgagtacaatgagaaaaagtttcatatataaagaataagaatatattgatcttatacttactttggtacaagttctagtagaactgaactgcttgctttggatctctgttggtgatctcaaagtttggctttgaccaaacttttttccttcagtaagtttcgaaatctccgagccaatttcttcaatgggatctttgatcactgaaggagtgaccagtgagactccaaacagcctaaaattagtgccagtcttggttgttatattttcttctatttgtgtaaccatttggttattgtaatttagtttgggcattggttggacagggtagctcattagcaatctagaaggattcataacatcttcagttgtatcacgataagtgagagaaatattcatcggggaggccacgcttagttggccaatttcttgtccttgtgtcaatataggaggcaagagatgtgatgatgaagaacctgtatataaaacaggaatattgagaaggtatttaagaatctcaaattcattaaatagaagattaattctttaaataaaagattataagagtctctttttataccgatttcattaacttctcgtaaacgcttgttcttgagcaaagatggtcgcggaacatttaacgcaggcattaaatgttcgatctcccagggtgacactttattaggtctcgaaaatgatgcaaattcatcccactgcacctgcaagattaaatttattgcattcaaaaacgtattcctaaaatgatgttttaaagtgtgaatgaaattttacttctaagttgcgccactctgaacacttccaatgaggagagaaatcactaactccaataattgtcccaaaatatcttaatcaatagaacaaaatgtgttatcatagataatattaaacattacaaatatatttaagtagaaaaaagttttcatctaatgttaccttctttcagagaaatcatcaccctcaaaccgcattgtaaatcttgaaccaacattgaacttattgttcacagcatctaagaatttgtcgtaactgacaataaattgacttgatctgatacttataaagacacaaaaaatatataaacctacatgttgaaggaactaatctattgataaatcaatataatcttaaaagtgagttcaaatggttctttgaattaccttggcttgtaaaccacaatgaacatacattggttatcaaaagcatgctttgcggaagcaatcaccccatgtctcatactttctattgatattattgatgaaggtatattcccttgttgatgtcctgctcgtctgataccaactcgtaactctccagtctctcccctgaaaccacaagtaaatagtttaaaatccaaaactcaagaaccaaaagatccctatataaaaaaaaccaataatatacctaacgaatacaataacatcccctgcaaccaatttttttgatgttgtgaatgcattccaaccagttgttaacaaatgtctttgcggtgtacctgcatgggataagaagattattagttacttctctaggatttattacctcaatagttgtgtttgaattatatgaataaaaggaattattacctctatagttgtggttgaatctccattgattaccatggagatctgtagcaagaagttcttgtgtcggtagaggctgagacatatcctaaaccaaaatttaatatgtaatgtctaatgaaagtttaaaattcaaattcgtttaaaaaactataacattaaataccaggggaggaagacattcaatggcatgtttttttggaacaaagaatccaccgcttgtatccgaggccgttaaaaccttcgtaaaggaattaactaatggtctaaattgattttcattttgagtagggattacaacttgctaaacatttaacaaaatcagaaaatcaatcagctataataagagaaaaaatagaattaactgaaaataaaagagaaatactaaattttcacttacagttgtatctggcatcaaagtgatctcagcataagtctcatcactattgttttccacctaaaatcaaacatcaaacaattaaccaattacttatttttacaatgaaatcaaatatatatcatgcgtattcggtaaaacataatagagatataccttaagttgaatagcaataacacgacattgaagcttagaaggaagatcacaaattggttttaactcattcaactcttctcttgtagatgcctcaacctgaaaaaagtcgtcaaaaggttttgatacacgagagagagggagagagagatagggagaaagaagagagagagagagaagagggagagaagagagggagagagaaagaagaaagagagagagagagagagagagagagaagagagggagagagaaagaagagagagagagagagagaaaaaaaaaaaaaaaaaaaaagagagagaactcacaagctctatattgccttgaggaaagtaataaatcttttctccaagttttggaatatcacacaaaggccccgcacagagtttccataactgctcgtacatataactcttggatccatcaactgccgaacaaaaactaaaacattataaccaaaacaagttttcactaaaataaaataaaaagtcaaaatttcttacttatgcctgataattcaggttgtgcattcacaatgttgccactttccataagctcgtatctaaagatcggtataccaaaatatgttatcccaacaattattatacaactttctctctttcctcaacttctctcgcgaccatgagagcacagaatatcacatttataggtaagaagtattaaaatactttcttagatttgaatactaaatttaataaggttaccaaaaattaataaaagtaatttagagaaatgtcattaatattttgactacatataagaaaatcattaacttaccaaaatcaacatatgctttattcatatataagttgagtaatataatacagttttaatacttacaccgtgatcagacctttcatatgggatctatggtacatctcatgttagatttttcttttcgcttcctctataagtttataaggattccttataaaccggggttctataagtatatattgtcgatatttggagaaatttccaagggcatgttcccctttccatttagttgtgatgtgaatttgcatgtatcccatggctattgggatgtccttggcatcaggggtggattcccggtggtggttgtgatttggccttataagggggtgtggattataatatgatgagttccatcaaaaatgtacaagggtttctcgttgcctctcaacccgaatgtcatctaagcattttgttctatgttttatattgatggcttttattttgcttctccgtcaaaaacgtgtttccgtattttgtatctctgtcaaaaacatgatttcgcatcttccgccaaaatgtgttcaatgattttcccgtctaaaacatgttttccgcaaaaaaaagtaattctttatatttctgccaaaaatataacttcgtaattttctttcaaaatgtgattcagtgatattttcaccaaaaacatgatcatgatttatgatggtgatcagatgatcattaatagtgatgatgatcacgaatgatgatggtagtatgatgatgattataatagttattatttactattaatgataattatttagattatagaatatttttttttatcatctatagaaaagttattaattgaataaacttatttatccattaattcaataatttaaatgacttatggttttatccaaagtatttgctaaatgaattagattgactcattatccattagaaattaaatttgtatggatatagattggttggatttggtttaaccaacttgacatccgtaaatataacacccacaaaaaaaaacttataacacattagtcagacaacaacaaaaaaaaatacgatttttatttgtatagatttatttgatccaataagtttaccttacttaatttaatttgtaaattttttattcttgtgagagttaaaattttatttgttgtcaactacacattaattaaaaactaattatatgaacgcttatctaatctagaaaaattagattataatttataaataaaaatgtagatgatcgatctaaacaatcctttttaaaattatatatgagaggaaatcgaaatgaaaagagaaaagaaatttgaccaattacaacaatggtgatgctagtgctatcattgagactacactcttagagcccattataaggcccattacgtaaaacataataatctctgaactaataacaaacgactatgggatatttgatcaattgacttgtattcttgtagaacatacgcagaggttgacgacgatgataacagtaggatttattcaacccaattctctcttctccttctcaactaaatccatcgacaagacacaaccttcacgaacgaaatgggtctcttcctcgtcctcttccttttcttctcactcttccgttgagacatttcatcgaacaggtaatgtgcaagttcttcagaaagatgttctctgtggcaacaatgaagaaattaggaagaagaataaaagggtattcttcttagacgttagtccactttgctacgaaggaaacaaacccagttcgcaagcttttggtcactggatttcactcttcttctctcaagtcagcctcactgatcctgtcatagctgtaaaaatctctccttttctttgattctttcttccgcaagctttttctcttcttcgatcaatgaaagatagttccttttgtaggttatcgatggagaagaaggtaaccaacgacgcagagaattgttgccttcatataaagctcataggaaatcaccaaatcatgggagatactctaagaggccacatcagtttgttgatgaagttcttagaaaatgcaatgtgccagtgggtaaaactgtttaatactcaatgttcaatagactagctcaattctgtagcgtgtatatagttaagtgaattagccgtagaagtgaatgaatgatcttactggattcttgtttatgtgttaggttgttagaatagaagggcatgaagcagacgatgtagtagctacgctaatggaacaagctgtgcaaagaggatatcgtgcggttattgcatcgcctgataaagactttaagcagttgatctcagaaaatgttcagattgtcattccattggcagatctcagaagatggtccttttatactttgaagcactaccatgctcaatataattgtgatccacagtctgatttgagctttcgtaagtgcctaaatcgacttatggctacaaacatgtctcttgacgcttgtctttctgtcaactttctttgttaagtgtcaaagccaactcaatccggctggttcttgtgataggatgtataatgggtgatgaagttgatggagttccggggattcagcacatggtcccggcgtttggaaggaaaacagcgatgaaacttgtgagaaaacatggttctctggagagtttactaagcgcagcagctgtaagaaccgtggggagaccatatgctcaagaggcccttacgaaatacgcagactacttgagaagaaactatcaagttcttgccttgaataggttctttctttatcactttaaaccccttcattttgattgattatgcatcacttgtaagatattcttgctgattcttcaatcatttttgtatcatagagatgtgagggtacagattcaaaatgaatggctgatggagagagatacaagcaatgattcagaagtattgtcaagcttcttctcaacattgcatggatgatactgacaagctaaagcacactctcgcattttagctgatagctagtttttgtgagcttgaaagtaattttagacattgtagttcatatctgattttgttatatacttccatagatatgaatcaaaatgtgcagtttgttactaaatttgtttatcactatggacatggctggttaaatcaaaatgaaccataataagtaagaaaaaaaaaagaatccaactttctgctattctgatattattattatggcgaaaacaaaattacagacacaaaagaactgcttaaaaggctaaaaactagaacatcttacataacttatcatatatatggcaatgccttagagactagtatctgaaacagactcaccaacattcctgggcgagaaaccacaggcattcgcaataagcatttgaaaagaactctctgaatcatcaaacatcagtcgcggaaactcgtggaaccctccaaaattacatgtatcaaagttcattggtgagaacgactcctcaaaacatatcctcccatcagtcattccaggctgtgtggtttcttggttagcatttgatgcagaaccaagattgaagccaaccattccttggttgttgttcccgccttcagagctccctctctgagtagatgtactggctgatggttttgtctcttcaagagggattgcaggcgtgtgtccctggaacagagctatgtgaccaaacaacttgtctttccttgaaaatgttgtaccacaggaacaaagccacttgtttttcccgcagtgcttctcgtgggttttaagatctgcaatgacagagaatttcttggtatggcaccggctgcaagtgaagcttttatcgcagtgggtgcgtttatagtgattcttcacgcatagaatcgttttcaaaggctggaactttttgtgctccttgttacgtttgcaaccaaggaatgggcacgagtacctcttgatcagcatcggctcagacccgggtacggattctttgttcggtttcgccagagcagctgctgttttgtactcatctccatgccctctcatatgcatcctcaaattcgcgtctctcttgaaacccttgccacatatcgtgcagaagtgagtatgcggtgcgagaatctcttctttctcaagctgcaatatctcatacgaaccgggaggaaggttctctccttcttccacatcatcttcatctttcatctcatgttcctccacaacatgaccttccctctcatcaacaagaaccggcttaggcaaatcgaactctcgagcaccacagttgttattgttctgactctgtgaagcaacgttattagcctcccttacataagggaacacggctgaaccgggctgcccagtgaatggacccggagctgttgacatattatgcttaacagatggaagaagactacctgcagttgaaataagctgtatgataatggaagtaagatccgtcgttataagctgctgctgctgagccgcgagctcgtcttgacgaccttgaagctgcccaccacgaccaacaagaagatgaacaagatcctgcagctggtgaatcttctgctccataaaagaaaggttactcaacatcgtccttggatcccacgcttgagccctaacaccttgtaagaaatcaacatttgcttgaatgctctcttgcaatccaggctccacacccatctcataatccaagattgaagcatcttcccacttctgctgggacgtaaaacctgcgaatgtcgaattcccacagtctgatgaacccggctctcgcgatttcgaagaagagcttccccaattggtgttgcacaaatcgtcttcagtttccattttttagttcaagatcttgtttttcaattaagagaacaacaaaacctacaaaagaaaccataaaaatcaaatctttatcagaatcagaattaggaccagctcaaagttcatcatacacacttcacagaatcaaatttcattactaagattcaaaatcaaactcaaaattatcgaaatcaacacaaattcttcacccaaacaaacaaaaaaaaatcttcacacataactcttaagatccaaaaaccaaacggtcaaacaaaaaaaaatcatcaaaatcatcaaatcaaaactcgccgacaacaaaataaaaccctaaatcaaaaacaaacacgataaaaacaaagtttcacaaatcaaagatcactaaatcaacagaaatgaaaaaaaaaatagaaagagagagattgaatcacccacaagaagaaaagcttgagatggaacttggagagcaccaatggccgctttaagaagagagatagatagagaaagtgatgatgatgatgatagagagagaggaggaagcagcgcctgagcggggctcatgtttattagctttggggtgctctccactttctgatctaccctatgtaaagtcaacccattaatctcaaccgttgaaattatataaagatcggtatcaatcagatctgacggtgcaaaaccatattatcgcattgaacatggtaacgatgcattagagccgttgatttatgagaaaaaataattgattacgaggtgattagagtaagtcaacctaatcatcgaccgttcgtttataagtaaaatcagatccgacggtttatatgcgtttatcgcatcaagaacagtaccggtgtatcgcagccgttgatttagagaggtgtgggtggggtctacgctatagttggtcgtagtttaaatattattattcgtattatctttctctttctgtctgtccatgcacttcatttttgcttatttgacttggctacttcaaatattgaatattgtgtgcattaaatatttgttttatttcaactagatatttgacaatttataaacaacaacattgtatcttctacaattttgatgttcgaattggtggaaaaatagttataaaggtgatgtttatcatatcctccttctattttggattagttgtttttaaaggtttttacacataaattaaaaataaaaattgtgttactcctaattaatatgttattttatttaataatattaaataatcatctaaaacaattaaaaaaattaaaaaatttatcaaaaagatgcattgaaaatataaaacgacaactaatttgaaacaaatttaacttcccaaaacaatacttattttaaaacgaagagagtatgagttcaacaaacattttgcttcaaaattggagtaatgagagataaatgtaagaaaaattactaaatttgttgtaaatcaaaccatatttatttaaaatttgtgagtaaccagaataaatttcatagaattgccatagctaaataattttaaactgtacgtttcacagtcgtgagaattaatctcatgaaaataataatattcgacatagttcatattaaaatttacatcttcgagtgttcatcttttatattgaactcccaaaaaatatatttttgttatattcagatgaagataaaatctatttcacttctaaactggagtctgtttcaagattcatctaccataaaatctaatataagtgtcttttaatttggcttgtctaattagtctaacacttgacagaatttttaaacatacatctagtatttatatcagtatttatctaatttattgttgtgacttaattgaaagacactattctgcatatagtatgtatctagtttattgtagtgaataaaattttgattctatatgcatgcataaatatacatatttaggtatattctgtatgcatatttaggtgtataaacatgtaaatgagatataatcattttaactatttcaggcacaaaatatagaacaaaaaatgttgtttacgtctagttttttcatgtaccacatgatatgtgtttacttaaaacatagttatattttttttgtaaaaaatcaacccttagttacttcttcgccaacagaaattatgatcatactattaattatattaaaaatctggatagatatcgaaaattaccaagaatggatatcgtgaatgatatagccactttcaaacaaagaaaaattaaataagaggataaagtaacttagattttgaggaatctccaaattaaattacatcagccaagtggagtcacctgccacgaaggttctctcgttcatgcactcgttgttggaaggccaaaattgaatactaatgaattttctatagttaaagtaaattatctttcatacaaaaaaaaaaaatggatcgttgattgggaaacacaagattcccacatgctaaatcccttctgagctaattaaagagtgtcgccgttaatagcaacaacattcaccattttcaaaaccaatggttacctttattttgactttggattttcttgatacttatacaatcccaaacttataagttaatgctctttaattcgttttcattttcacaaacaaaagggaatttaagttcggcagcagattcggattcgcgaaatcttaattagggttgggcatattggtaacccgttccggttcagattaaataggtaatggatttactacttaatacagtaaaaaaaaacatcttcggttccaatacatccgggtttaggtcggtttgggtaaagagtttgaagccctaaaaatacccaaaaaataaaaacggatattttttatgtagatatcggataaccgaaaagaatcttaaaaatttgttaatttttaataaacttaattatatttgaagatattttactaaattttgtcaaataattttatatagtaagtattttattgtgtgacaaaatttagtcaaacaattgttaaatggtaattatgattttcataatttgattggtgtcatctaacctcatataattcaaatagctttggttttagtgattactcaaatttcaagctcgtctaatgcatattcttaacaaaaacaaaacaaattgttatcaataaaaataataatcttatctatataaacaatactatactataaaacatataatatcaacttttcccaaatatttaggattgatactcaataaaacacatgcgaatttctattagacttttctaagtatatttataaaatatgcgttgcatttaaacgaaacaagaaaacggtcttcgttttacgtcagaaaaacaaacaaacaaatcaatttgaaaaagagaaagaggtatatagtaggagtgttcaaatccaattttgagaaataagagagaaacaaaaaggagtaattgtttagacaaagtgggcaaatatgattacaccaacaaaagtggtgggaacctctctaactctagtgtctatgtctctaattacaccaactcctttttttagtttaaccatttatattaaaatttgacaaccttaattccaaaaatgatataccacttccaattttacattcttttattactttatcacaatgtttaaaattttaaataataatctaaatttcataacgtgggcaactaaacatgattaacttttccggaattgccactttaattctaaaaaaagttgctttaaaatgcgacttgactacatgaacgatgttgtttctttctttttttcctttgccggctattgttattcatagtccacaccattacttcaaaaaaaacattataaaaactttagccaaaaacaaaaacattaaaacattttcaagttttgttttatatctagcatactctctggtttaagtctcacacctttttttatttctttgggaagttaaattcacgtgtcgcaaatacatcgagtatgggtggaatatgtgtaagatgttgcatagtgaagaagtgtagcattataataaagaacaatcccttttaaacaatgatttttatgttttgaagagtcatttacaataccacaacaacagtaacaaggtgattatttcaaagcacgttcgcgaattgtgtggtctatatttaagcatttactcaatattctaaatttagtgaaagtgacgatccctatcgttggaagacatatgcaattcggacaacaaaagaaatcaaagatttataataatagtcacataatgaaaatgtcattcattctaaaaacattattccatgttaccatgtgtaagtaagctagttgatttgatttggctttcttggaaagaaggaacatgatgcataatggattgatgtggctatagtgatggatgataatgataaatcatcattatatgtagccatagtgatggttgctgatgatgcatcatcaatgtatatgtgaccatagtgagagttatgtagcaatatgagtttcaagtcttttgcagctgcaccaatctagctctcatcttcctcttccattgtactttgagtttttccttcaagccacctttctctcaactcgaagactccaagtccgtcctctagcggcagtctatgtccaaataaacctctccgagatcggatttaccagactctcataaaactcatttgccgtttcgcaaaccgcaaatcaaaactattcaaactaaaccgatatttgacacacgacgaaaaaactataatcatcaaaatcaacaaaagaaaactgaaatcatttaaaaagtttgattgatttcactccctaaaccatctttaacttaagattgatgaacctacttgtaatcttgtcgttcatagattatagagtggttgtgaccaaacaaaatatgaataatggttacaagtatgtgtatgcattggactattattagttacatataaaataatgagccatcaacaaatctcccaagaaaagtatcacaaaattttgcaactctacgggttaaaaaaattggttgttttacttcgtttttggggtgctgaaaattccataacctgaagccgggccactagaccttccaggggccgtaggttgttcgtttgaagtttcgtttggcaaccgggtttgtggtcgtggtggagctcggggcgggtttggtggttgaggttcaaaccggccggtaggttgttgattcggagcttggttttgaaatcgaggtggaggaccttgccggtctgggtggcgatttggagatggcccagagggttgctgatttggagcttggtctgggaaccgagactgtggtggacttggacgctggtttggaaactgaggattaaaccgccctgtagattgttggtttggagcttggtttgggaactgaggccttggaggctggcttggaaactgaggatcaaaccgccctgtaggttgttggtttgggaactgaggccttggtgcacttggaggctgatttggtgactgaggatcaaaccgcccggtaggttgttggtttggagcttggtttgagaaccgaggacgttgtgggtttacatgctggtttggagactgaggttcaaaccggcttgcatctctacctcctgaaaactcactgctaggttctctttttgcgtatgcgttctggaatttaactggttgagcctgctcaacactgaacctaggttcagacttctctatatcttcctgatcatcaacagtagccactcccgccttcgagctatcaggctttggtgattcttctttcactcttgcagattttatgtcaatatccttcattaatttcacccctcctttcttgggtggaccaaacttggcgtgtctaactataacaactgcgccttttctatccgcctcaggccaagattccacaagtgcatccccaatctgtacaaatataattatgaaccaaagcaaggacgataaaactaggaaacaattgcgaatagaagaagtcataagacttacaaaacaagtgaagcgaaatagtaactcaagcagcttttctggttcaagttccttatgcttgtccttgtcaggcactgcaaggcactgttacacaaagaaaagaaagagcgagacaattaaaaagttgctcaccatggaattcacctcaaatcaagtattaaaaaagagagcattgcgtcgatatgtctggggctttgttttacaccaaagcattcagaacagctataatcgcaaaataatcacttttttcaggagtttcccacgaaagtctatgagaaagcagtatgaagaggtccagtgactaagaaaattactacctttacacgatatccactttccatcagcttcaatgcttgatcagatttaaactttaggtccttggcctcctgaagaaaaaaaagtaagtgaaagaaaaattgtcattgtagtattttcattaccacagagataagaagaagaagaagaaatagatagggtaaagcgtttctagagaagcatacaatttttggagtaaatcgaatttccttgatatcaggtcgaatagcttcagcccgctacaacaaggtaaaaacataaactcaggacacaaatacaactaaaattttcgtacaaacaaacatgagaattcaaagaatggataggccatatcaccgaccttggccttagcacgctcttttcctactttagcttttttgtacagctccaatgagtatttcacaattttacacacaggtggcttagcatctctttggacctacacagatttagaaatatataacgagatagacctcatgagaactatcattaggtgcacagttgtctaaagacaaaaaaaacagaagagctatagttcagcattacacaatgggagtaccacatttctttaagaaaaggagacgcatggattacaaggatacaaatttggtaccatgaaaattatacatacaaatcaagacaattttaccaaagatctccagttgcaatcattagacacaacttcttgaatgactcatgtttaaagttacctcaactaagtcacactgaagctccttagcccgtctgagagcttctctcaacgatacaacacagtgtcctgcataacgacaaaacgatatcacacattcctgattataaaaatcttctaaactcttttactttcctaatgaattcttaagctgtactttggactccacacctcttaagtaaaatctacaaaaacaaaggaatttttaactgactccacctaaagatacttaaccgaaaacaccaacaataggatctctcttcttatactctttctttattttgtacaatctaagactttccacacaccaaaagagaaaaagacttggaataatatattaccttcctcggaaaccaatctaacatagtcgccagtaatcttctcattgagacgtggaccatcagagtcaacttccgcttccttcttccttgtcttgaacaagaacatggatatacaaatttatgaccaactttgacagcaggatcatagtacacatacgacactataacagctctgaaccaaacaatgctcactcactaacatccattagcccaaaaacatcacacaactaaacaattcaaacatgatctaaaatgcatatacaccgtaactataacatggacacatctaaagtcgttgaattcaacaacataacacaaaaatcttgcagggttccagatcttccatacttatcatctaatgcaatctaaaaggcaacaaccccacaattgcaaccaaagtactgaaagttacgaaattgcatagctaccaaaagaagaagaaaacagagctgaaagaaaaaaacgaaactttttatcaaaacaaagagagtaatacctgagctgaagtagcaaggaatctgagattttggaagatattagaaggtcttgtacatatatctgaatttgggatgtcaaaagaagacaactttgttgtctgttttacgacatgagtagaagaagcaagacaaacttgagtgtagtagtttctggttaattggtttgatgcgtatttgagatacgaacgattgattatacgccatatagccatagaacccaatcggacaagagattccccaattgggaatcggaagtgcgactaaagaaagcttcgattttgttatcaatacagaggtgaacggagtttcaacggcggcgattagtggaagggttcaacgtctgatcgttgcgaacttgcgattaactggtccgaagacaaaagctgttgggctttgttgggctttccataaaacaagatatttctaaaagaaagaaaaagatttgtcatactctttttattttattttggaaaaaaaatcttaagaaagtaaactaaaacacatttaactacctaatatatatgtcccaaaaaaaaaaaactacctaatatatattgattgcgtgaccacaaattcgaagtatataacatcatgtggtcaacatcataaacataaaatctcaggttaaccggttcattaatttcagtgttgaccaacgttgattaacaaatctcagggataaccagatcatcttttactaactacatgttaaactgtttgggcttttggcccaaatctatacttcccacacatatacaattttgtttgtaaggttgattgaacttgggttagttctttccaaacttaccccaattctccaaaacccattagaataacagaatttgggttagttttttcttaacctcagcctgtaataacagaatttgttgagagatatgcacaactgcacaagcctacaatatcatgattcgcgttggcaagatcaatcatatcatgcgttactatggtactcgtgattgtgatttttttttataacaacaacacaccattgctttgcatgtattctctatgatgttgattggacagaaacttgggacaaattcttatcaactacattggttcaactcagatcttgtggccatctgagaagaaacttttgctcgctcttccatagaattcattaccacaccacgaacagagttactaaaccggtaattacgttggcaaattatgtggtcgatacctaagcttagcgattaatccgatattctaatttcgtaaagtgacgatccctaccgttgaaagacatgtaattccactatcgaaaaataataaaggtcatgatagaagcaacattatggaaatgtcattcattctaaaaacattattccctgtaaccatgtgtaagcgagtagaatttatttggcttacttggaaagaaggaacatgatagatgatgcatcatcattaaacatggccatggtgatagatgatgatgatacatcatcaatgagtgtggccatagtgagagttatggagcaatatgagtttcaagccttttgcagctgcaccactctctcctctattgtacgttgactttcttctacaagctcggtcgttgtacctttctctcaacacgtcattgtccagatgactccaagttcgtcctcttgccgtgctctctgtccacataaacctctccgagaacggattaaccagactttcatagaactcatgtggtgtctcgcaaatcacaccctagaatccaaacaaaagcgttatttatcacgctacacattgtgcttagtttcaaaataaagaatcttgtaaattacctctgccatggctttgatcttgagagttacatcgttgctaagaagaacgagtttttcgtcacggttacggtttcgataaagaagagcacattcgagaacttgatcttctgatgtcggagaatcaatctctggtgcatagttgttccagtgaagtgaaaaggggaatgccgatgagccatttgactggggagtgactggtggggttggtgcaattgctttggtttcttctgttggactctggacttgaatccaccattttgaattaaccttacattcttcgatccagtccagagctgaagaagcaatctctgttcttcttctaaagagaaaactgcgactgcgcttcacctcatttagttcccttaacactgatcaatgaaaccaaaggtgcgtcatgtttataagggtaaaagattgtcatcctaacaaaaattggttctgatagatttggtctgcaaaaatgggttcttggcatcctaagactagaacttatgttatcacagaaaaagtcttccaaatctatgtgacagattcatttacagccttatcttttataaaaagaaaatgactctatggtttgtatttagagctttaagtgaagattgaaactatttaaggtttgtagggtttttaccagttcttggtacgaccagatgtgtccccttgagaccttgtagtaactgcagtggcttcctagactctttgtcgaggagtgaagaagtatccaaaacaatggtccacttcatcttgctctttgcatcagaaagattctaaaacacagtaaactaattgttagtataagaactgcacaaagactcaatagaggaaaatcataatgacttacagaagaggaacgaatgcccctagaaatattattccttgctgatgcagttgaagaagcctcagtgtatgactgactttggaaagaagatttttcaagtagaggttgaaaaggcgcccgctcagctttcttctttggtgccagaggctcatgcttcagcttagatttgctgcccaggctgtgtagatcttctggttcctgttccaccatcacgttttcttccatacgaatatcaaagaatggtttacgtgttgctttagaggaggagccttttgtatccttaatatcaccaaattctcgcaaacgttttagcatgtgagagcttggggtaagattctccttatctggggtaaagatttctggttctgtgaatgcctctgaagcaagaacagcaatactggaatgaaccaatgacgagcatgattttcctgaaagctttaaagagctcttgctatctttcacgtcaccaatatcttgtaatcttttcaacatatgagaacttggggtgaggttctccttgtcaggagtaaagatctctggttccagaatctctgcaccatgatgaatagtcagagaaatagacttgtcacttagagcctgttttctatgcaacttgtcttttggttgtctcccagtttgtttttgctttccttgactcttgttggtccgtatcttaagaacagaagcagctttccccctcctagaccaaatgttgcatgtacttgagctatccatatcacacaatacatcatctctaacagcatgtgtttccggggtctggttttcttgacttccagaatcagaagaagacagttcttcaatcaattttgtatcctcagatgtttttgcagccaaggccgaaggaatcggacacctagagagtcttccaatgtcagtattttcttcaccctctatttcgcttaggctgtaatatttttcagatctcccagaaccaattaacaattctgttttgggtttttcagtctcactgattattcctgattcttgatcctggtcagtggcaggattcacttcactctcggaaggtggctgcgaactcgagcagagactttgaatatcatctgtattgatacttgaaagacgatcttttggagtggacaaacaatcagatactggactggcttgccttgaactgaccttggtttctccattgcgtttttgatttagtaagttctcacattcggtcttcatggcaacttcactctggaattcagaatcagaacctacgaggcctcgggcttgctgccttgaatcctcagtttctaaagttggctcagctttagagaaagaattgggagatactgtaataatttgccttgagacctcagtttctccatagtcttcatgaatcagaatatcagcctttgtttctacattgcttttttgatgtagtaggttctcaatttcagtctctactgtcacttcacttaggaattcagaacctaggagacctcgagcttcatcagttaaaatttccaaagttggctcaggtggggagacggaactgggagatactgcaatatctggccatgagcactcagtttctccatagtcttcagtttctccatagtcttcgtgactccgaatttcattctttgtttctccaatgctcttttgatgtagtaggttctcactttcagtctctactgcaagttcactagggaattcagaacctatgatgccttgtgcttctccagttaaaatttctatagttggctcagcttcagagaaggacttgggagatacttcaataacttgccttgagccctcagtttctccattctcttcgtgactctgaatatcagctttagcgactggttcagcagatacttcaataacttgccttgagtcctcactttctccattctcttcgtgactccgaatatcagctttacctagtggttcagaagatactcccattacttcctttgtgacaaattcagtttcttcactgacttcttgatgaaggctaagactctcaacctctgcagccaagtcaaatgcagaacaacctgaggtttcaaagcagccatcaatctgctccgtacttggggagcagccactacttggattttcagcgttggcttttacactacttgtgcaaaactctggtgaagcctgaacatcttccacgagccatagtgtttctggattaatgaaatctgttgagagtggaagcgatgaagtctcctttgcagctagaaatggatcatcctccttattagacattgatgattccatcctctctgatatctcattcagatgtaaacttccatctcctctgacatcgcatttatcagcctctgcagcaacaaaaagttcaaaacaacctaattcttccacatagccaccactcagcttcttacctagaacgcagctgctacttggcttctctgctgcagcttctacaacatctaagtcccacattgtcggtgtctgaaaatcttgagtggattgtagcttttgcgtcttgatagaatctctagctagtgtcaaaacatttggagatgcaagtggaaccgaaatctccattgtcgtaatatatgtatcctcatcttcactagggactgatgatccagttccttctgacgtcacatccagatgtagatcttcatcatcacctaatgcagtattcgctagtgactgcatcgaaatcagtttacactttcagactaagcaaataacatcagataaataaaatatggacaactaaactaacaacaaatgatcactgcagcgagggacttaaaacaatgtctcaaacactaaaagccagaaacatatgagagaagcccgaacctgatgttgtgcaacctctagattttctgcttcaatcatattaggcactgatgactccatcttttctgatatcacattcagatgcaagcctccatctcctctgacatcacattcatccgcctctgcagcatcaaaaagttcagaacaacctaatccctccacgtcgccaccactctgctgcgtactacggacaaagctgccacttagcttctctgctacagattctataacatccaagtcccactttggtgaagtctgcaaatcttcattgaattgtagcttttgtgtctcgacagaatctctaactagcgtcaaaacacttggagacgcaactggcatagacatctcccttgtcgtaacatacgtatcctcatcctcactaggaactgatgatccagttccttctgacgtgacatctagatgcagaactccctcatcacctgatgtagtattctctagtgactgcagtaaaggcagattacactatcaggctaagcaaacaacatcagataagtatagaattaaagcaaaataaggacagctaaatatgagaaaacatcaaagatcgaacctgatgttgtgctacctctagattttctgcttcaagcattctattctcttcttcttgctccaacaccgtagacgcatcaagtggtgaaacaaacggattgtctaaatcatacgcacggctcaacggaatccagtgaagcctatagatccttgttgaaccaccaatcctaatcgtatcaccttcttcaacctcaacacaaccatgtggctcgattctaagatccctaacccaagtcccatgcactaaatcgaaaaaacacaatccaatcaacaatcagaaacacatataatcgagatccaattccacagtaacaacaatctcgcgagaggaatataaacatgagttagagatgattcataccagaggatagatccgtgacgaagagtttctgacgagaagagatcgagcggatttctaagtggaatctgctaatgctagggtgcgtaagaagaatatcacaatctggatgacgaccgacgacgagaatctcttctacttcaccgtcatcatcgcttacagtggaaccgtttctctccggcgacgagaaatcgcgactgttcacaacgaagatattcttgagaatagcgccgtttttcagaacggtgaacacagggatcgtcttctccggcaatcgttgcttctcctccatcagtttctcttccttgacctccatgaataagtctgtaagaacgaacgattgagagattttcgaaaatggaaaacgaaagagatgaagaagaagaagatttagagagtgtttctctctttctctctctatctccttctgattttgaaaaagagtccgttgttgaatccgacgacctctctctctctatttactcgtaacggctaattgtggcatcatctcttattacgacaatttcaaattttaataaccaaattaaacccttaattaattcaaatttaggtcggttaaacactaaacacatgaatttttcatttcattttttgtttggtatggacatggtcatcgattatttatgtatgtgcttttctacaattttttcatgcctagaaattgatgccaaatcattcaattcggggtttcaaaactttaaccataacagaccgaagtagaataatttggtttggttcggtttgatacaattcgattcaattgaaaacgaaatacataaaagagcagcttctactaaaaaactcaaaacagttttgatgcattgtgtgagagtatacataaatgtgagattaaaaaaagtgggatcattcctccttggtatgagcaagccttgcgcgatgcctgagctcagctcttttccactttacgattaagtagcaaagcgaaaagagtgtgtttatctgtcaaaaacacaacacctccatcagattttccacattcactacacatagttcgttaaaatcctaaacaagacatggatcagtatggtactatggtttgagttaaggactacaaatactcttaagagttaaaaccaaatcaaacacgaaacatatcctcgatttctcagttaatatgactgctcaatcaaagtatgttttacttgggaacaatttattaagagctagcaagtagattctaatatattaatgcagagaagaaagggaaagattgctgaacacattaccaggattatcattgcaatgaccaaaagtggtccagaccagagagtcgataggaagactccgttcgagtcaaagtagttttgagttgagaagctcttccagtttttcctcaactcccggttgagattctctgcaaagtataccccagccactgcaaattttttgtcacatcatcagtctcaataacgtgtactaagaaaagaaaaaactctaattgatgcagtgacgactcacaaaatatcgcaaagaaatatgccaatcactaagttcataatctaaactaacacagctattgagtagacaaatgaatatcatattttcgttttaccaaacatcgatgatccgataatcctattgtactaaacaaagaaaacaaagcctagtgcattcaatcataagctagagtgaagtaaaacatgtcagtactagcttctcaaacacttgatccactatgaatgccacaacctagactagtgagatcattagatcgaagagatttcttgtacaatatatatatagacagtttcaaagggaacttacaagccaataagaagaggaacatatggaagttgagatgccttctagaaagaagagtcactagtaacaacaaagcatgaaacgccattaaacccataatccaaggttcctgtaaccaaaaaatgccagatgagaaaaaaccaatgtatatgagtatagtttatggaatctcaaattctcacagaattcaaatgaaattctacaaataccgagaatttatctagacttgtgattctaaattcctcaagaccaaatgatgcaatacgaagaaagattctcattaccttccaatcaatggcgtggaaaaaccccaagaaattatcgtaagcaggttgaaaccccgttcggagctctccggagagtttctcaaccagatccgctacgagatccacttgcttctccatcgccgatcttatttcttccattgtcttactaaatgtcaccggaaaaaagaaaccaatttgaaattgcaagcggtggtaactaaaatactcacactccaagtaaccaaaaccctatcgcttcttcgattccagttctcaacttttctcgccaagatttttaacgagtttcttctgcgcttaaaagctctcgaagttgccaggaaaagaaaaaaatgtaatcaccaacttcccagaatacccttatagtttcatattttaacggtaatgccactgagataacatactaatattttggattattcagagtaatatgattttccaggaacatctaaacttatactcaaaccaaatgatttgatcttcgatcgaagtcagttttaatgaaaggattctccgaaataataagacaaaaaatgagtttgagcgattccactcctttccttcatgaaaactctacataattactatgcttatgataaaaaaaaattagatgattattaacattctcaataatcgataataggttaacagatagaagaatgagtgaatggagatgttgagaaagaaagcaacttcaggatgtggatgttgttgtgggtcgttgcttcttacggaagatgtagtttaggagcatcccaagtaaagggaaacttgtaaccatgcctatgtaaccaagccaccataccgactgttttgtctgcctacacagctctttaaagcttttctttgttacatcttcctcaggctttcgccctctctgcttcagtgtggtcttattggtgtcttgctcatatttgactgctgccaccaacccgtcttctgcaatgtttaggtacgggccttggtttatcgatggctcttgtttccctgaccctgagcttcttttatctacaatctgcaaaaaaattgataatcttaggaagaaagaaatagagagaagagttaaattatctaaactgcaattctaataaacggaaacttactttctgtatatgcatataaggactgcagctaaggacgccaagaaactcgttggtggctcgaacccacctatacacaacaacatatataggcagtcaaaataggaagtactattattacttagttacaatctgaaatataccaaccataagctagatccagttaatccttcgaagaacgctagatgtcccccgtgatttgttgtagccaagacaatgtttttgttggcccttttcaatagaaacttcatgttaatcgctgtaacaggatttaagatttaaaaagagatagatagcgtcttacctgcattcgtcccagggaatagcttcctttgtgcataatggatcatctagagcacttatacagagtagtggcaccgccacatttcctacgtattgagtgctgctcgattttcggtaatacgtatccacagtctgcataaaggtgcaacccgttgtacttatattaaatcaacagagaacttaatggtgattatgaagagcattgcaaagatgaatatatgaattacaaagccaattgcggtggaaaactaacatcagaagttaagataatatggaggagaactaatacctcgaattttccaactagacaggtagcatggttgtcaaaatctcggatggaacgtgactgatgaagtaaaaacaacggacaacaacagacaacgtcgatagggaaagaaatatgtaagttatttgcttaagaactctgcttgtttcaatgcatctaccaagtagactgtataacttatgggcctgtggttaattaacctactaacctttttgatgccttcccaattagcaagccgtaaaaactgaggttcatgcctgcaatgaaaccaaaagttataactgaaacctgatcttctcaaagcagtaaaacggaaatatctcctctcagcccatcttacaaactcaaaatctaggcagttcttggtggacatacaattgggcataaccttggagtccgatggtgagagctttgtcatagagcttttgtttcaaagtccgacagataaacctgtcaccaatcttgttgggaggagaaaaggaaaagaaaaagcataacgtatcaagcatccacttgtatcaaacaaaacccttagtactatttacaagttcaaaggtctgaaatcagaacccaatgaagaaaattaaggaagtcataatttctcgtcaagttattagagacaacttcagacacgaatcaatatacaaagaacaagacagttatgaaaaatagctcaccaagaggtcccatggagagcagatagcaacagcacctctcagaggagtcttttcaccctcttccccaaggtattttacctgaagcataagataaattcaggaacctcctcacgcatatcaatggtatttgaaaaacatatataatcaatctactcttttagcttgaaatcgtttttttgaatgtagcatatggtgcagccaactgagcaatatgtaacaaaaagtccatgaaaaacaaagcaaatcttcacacttaaacatcattcaaagctaagtaaaacactgcggttcctgatttagtaccagaacatttgctccaatgctagtgccaatagcaaagagaggagccctcgggtatttgtgttgaagataatcaagaactacccttatatcatctgtccatccagcattatagaagcaatctgactacatacatttgccacaaaacaacacttacataaaagaatatatgtatataagtaatcacaacttttcgtagattcataaaactagcgaactcacagtaacagaaactcctcccaatcctctatggttgctaataacaacattccaacctgtttttgcagtgtcgtaagcaagatgctttaaatactacaacaaaaaatcaccaatataaagtcaattagccattaaagaacagataagtgatttaaaactaaacttactgcagatgaagaatcactagttaaccctggaataacaacagctataggcgttgtatcttcttttgtaatttcactcttattgtgaagagaaccatcaagaactacacaaatcaaacagattcaaatatccatccaaaaccaaccatattggtagtaaaatcagtcactaaaatcttaccatcagaattcgtaagccaatctaatgcaatcgttccaccatcagaagtaagaaatagctgtctaaaacaatacaataaaacatacaaatttgtgactcaaaatcaaacagaaatattgaaaaataccaaatcaccttgtataggtgaaaactggaggcaatccatggaaattcaagaaacaagtctgaatatgagggctcgctaaccatggcgtcgccacatatctgaacaaaaaaaattcaaaaaatcagaaatctaaatccacaattttcgcccaaaatcgaagtacacacacatacactcaccggccgtgaagaatctgacaccgagaaacaacaccgtgataaagaggagaatctggattgtaaatgagattgacgcgacatctgaaataacgaagaatcgcatctccaaggaagtgaaattcgacgaaattgtagaagaagatggtacagagaacgaagagagcgatgaggtagtgacgaatcgggatgagagttagagcttgaaagagaagatcgtatggagatggagatagaatcagatcttcttcttccattgatttgatttgtgatttgtttttgcagatccggcgataggaattagagaaggatcttcttcttcatggttcagtggcgggtgaagatttttttgacgaacttgtttattattaattaattcatattttgaaattctttttatgaaattaataattacacgccgacgcttacgtgtacactaggaataggcataattctcgttctgttccgttccatcatgtatccgtttacgtgtaaacttttctgttttggattagtcgacacaatggtttgattgattcccttcgtaaagacgagcctgagtctatctattacttaagtattattcgcatttgtactaaagattttgttatagtaacattggaaaattgttgcttatccaaaacaatgtccatactgtatcaaacggcacaagggctagtattgacttaacaattagatgaaacaccagagggatggtggtctagtgcctagtggtaatataaaagggttggttcccttgtgcctcggttcaatctcttttgggatgaagagggattctttaaacaaaagtcgactaaagattgtctatgtagtaaatctttcaggtggaggtgttggattcgaggcacgttgggaaggatctcttctctaaaagagatgaatttaacctggtgagggtttcgcctctcggagatgtaggtagggcctttgtgtctgaacttccagattttcagaaaaaaaaaaaaagattatatatgtaattatggaccaaaagttcggaatatgaatcaatgaaaaaacatatatttactatcaataaaataatacaggaaaatctctataaaataataatgttaaatattatgatattttattaagttatagtaatataattttatttttaaattattaaatataaatttgttttaattattaatattttaaaaacgtatgattggagacaacttgatttacatataatgatggatgttatcaattaagaagagaaaatactcatttgacaatgtataacaaaaactgcaaataaattcgcttataaagcctattgaaatagaaaatgataatatttaaaaattgaaacttacaaaaattgatgtctatttttacaatgaagttataaatgattctacaatatgatggtttaaaaatactacaacaagcaattgtatgatacagtcaaactttaacaaaaattcaatggaaaaaaaaaatcatcatgcattattggttataaacttataacttataagtatgtaggtgcatggagtggatctcccgttgccaaaaaatgttgatgagatcgtaatcgatcactccaaaaacctacatgcacggctcgattgatatatctattgtgtagagtgttggtctctaaagattcaatatcttttgaaattcggttgcaccacatatatacattatctaatcttatgaccatattaataaaaactaaaatttatcacaatcaggaactatattataaaaacaactaccaaatctacaaaaaaaaataaaaaaaatacacagaatagaacacggcgagtaatcccataaaataacaataacatacaatatgcaacacactggtcaatgtagataaataaatcaaatgaaattcattgatttttcaaaacaaaaaaaggcgggaaattaagcgaaagaagatgagcaatggaaaggaaaatatgtagtccgaactgaaaatcacaaataaaatgtttatggagaagaagaagaagaatacgtagaagctagcgagatttgatcatagttccaccaaatgtagaatagagatcttcagtggctgacgactatgcagtttgtcctgatctctccagaatttcccgtaagaacttttatttcacccattatctgcattgcttcagcaaatctttctccgaataatgtttcatttaatgcaaaatttgatacgatcctactggttgagtcatcgagacccaagttttgatcaattctaaggattcctctttgactttttatctgtttatagatttgattgtctacctcaagtggcgtcatttggtccaagaccactgatgggtcatttggaccacgacatgtgttctgtaacttagctttcagtttgctgtccattttaggatccttaagcctatcctgaaaaagactgcaatgtgcaacaccgacgctgtgaccaccaccaataagtgcaaccatgttggtgacattcaaacctttaccttcaaaatctttgattgatacagccacggaaattagtggtccgggcaaaatcacagccctaggacttgatataaatcacggaaattacctatcctgtttgtactgtgaaacgtggaccacccgctaatgcaatcgagtcttttgtggctagagttacaatgtctgcgcatgagactgtttttgggcaaactatctcaagctctttcttaacctcatcgatgatctcgaagcctctcacgcttacgtttgcctccgcgcttttctcagatggcctttcgggcgttgagtcgatcaagagggaagcatcacaaccctacacatgcagcattcaaaatatttgcttggttaatataattagctagtttatgatacatcatgcatacatatacaaacacacaaaggagaagcttacgaacgttgacaaagcaatcatgaaactgcatacgaagcaacgctgcagtaacggtttggttaagggagtgatgtttggcaacaactctagacacggtagattcagcgagagggcatgaactgtcataaaacccacgtcggagcttcccgaaaacagagggaacaaggaagcagaaaatgaaaaacgaagctgtgattgccctcatttcaaatttttctccttcactcttatgtgaaaacttagaaatatttttggattgtgtttaggttttaagttttggtgatgaaatagttagtgcccgtaaattgcatatttatacgtaaagatggagacattggtacattttgaagacgtgcagagggtaaaggtacaacactggcaagccatgattttaatgtgtcgtgtaatagtgtggttcatcaatgttgtataaaaaaatattataagatcgtcaatcgacttgtcaaaagattgattatgatatgcaaatattttgtgatattcctttttggattcgtttcattttatcatctttttgctctctcgtataaatttgtaatttgtaaaagacaaggaatttgtttgcaaggattggttcttgtacacagaaaccaaaaacaatattaaaaaaggttttattcataaatatataaataaactagaatttaaccgcgtaccgcggggctatatttttaacaaaaatataatgttatgagttttctgcaaaataacccttcaaatcgatctcgtttgcaagtttaccctccaagtctgaattatgcaactcaaccccaccatctctaaaatcacatacaatacaaccctcccgtgtatcgatgatatggcactcgataactccgtttgaaaacaaaaagattttgggcaaaaaaacctcaatgtatttttttttgcaagataaacctccatgtcaaataagtacgggtcaaaccacaatctgaaaatctcctacgccctttcgtgtatcgatgacgtgacagtcgataattcattttaaataaatgaaccgtaatttaaataaaataataatattaattttttgaatcgataactttaactaacaaattttttatcaaattcgttctggttcgtttttttctttcaaaataattaaaattaaccaaatttaaccaaaattaacaaaacaaattaaaaagaagaaaattttagaaagaaaattaaaatttggttttattttgtaaaggagtatttaattttgaaaaatataactaacaatatttggatattttgattattaaagtatttgattatttttctaaaaataattaatattttgagttta

SEQ ID NO: 1167 - DNA, 117585 bp, Arabidopsis thaliana
gaattcagttaactaattagacaatttatttcaaaacattactagtagacaaactaaatttattagtgttaaaaattagagattcatttagtgacatatgagctcataaaattaatattaatcaaaagaaaaaaaatatagttttttggataagtatttgcataaacacatacctctgttttgagaatgacgttctttgtacgaagtttttggagattgcataattgttcttctttcccatgagggccaccacaaggagggcagagcacagtctcgagtgccttttccattgcttcatttacacatctaattttcatgttctctactctaagtgctatgttatctgctttttcattatgaatctacataaaataaattattctcagttttttggaggtgaaatttagacaaatcttcgtttaaattttaaatatgcaattatcgtgtggaatttacgatggtatacaacaacgatgttgaacaataatgatgactagtaaatcactattatttggtttaactcgattaaatcaatctgtattataaactaaactagattaaaaatagataagacaaaaacaattaccctggcttgagttcttctgttttgaaaccaaaatttgatttgtttgtgtttcagattcagttcgttacccaattgacgtcgctgagaatcgtctggatgtggacattcatgaaaaaaccttaaatcaaattttaaaaaaaaacattaactgtgaattaagaagccaaattttataagaaaaaaaaatctaaattaattaagtaaattaagatcttacgcttcgagcctttgaacttgatgattagagtgatggcggcgattgttggagtcaataccctcttcatcactagaactgtcattatggctagaatccatttttcttatacccactaaaaacaaaaatacaaaagatatcaaaaacttcaaagatatgaacaacttaaaagttgtttatatagaattctaatagaacacaatattaggaaaattatgtataaaagattttcttttgggtcaccaatttaaatatttattatattgcatttagtttcaattagtaaggcaactagtaggagaatcctcaaaataaaatagaactatttatggaataaatctcattatagattttcaactttttggggacattacattaaaaggtaatttatgaattatattttttcaattctatttcagtaaaaagaagaattatcttttataatcatatatgcaagttgaccaactctcttcatccttccgccaagtcagcagtagatagattggcatgtgtcacatcaatatattaattttatttattatttaatttaatttatttaagaattaaaaatcatgagagacatgtgtcacatcgatatattaattatagggtaatattagaggatgaccaaatttgacagcattattaagaaaatagccttcgtgcagaaaagttggataaataaccttttttgagcctgcgaaataactattttaccttttatagatgagagaaactctttcttttcgacaatagctgctacatgtagggaacaaaagacaatagaaagtaatgattacaccgctacttcttaaaaatcatgcaatattagaccactacttattaaaatcacacgcaatatctcttataccttaaaaatgtatacgtaaaagaaaatttagttaaaaaatagccatttagaaacagttgtgattgagtatagaaatgttgcataagatatttaaggacatgctatttatttttattatattagaacgtaggtttattgttttgacaatatggtaaatgggtttcaacagagataagcaaaccacatatgtgttatttatagattacatgtgattgtacaaatttgcatgtgattataaaaaaaacatgaatcatgaatcagtaacttacttgtgattttagtaaaaatatggattattagtaaaatgcacattatctttaaaaaaatattatcttatcaaaaaatacaaacgttttaggaaaatatacatatcaaatagaaaaatagcatgaattattcaaaaattacatgctatcgtttgaattgagacacacggatcattgtaattttagtaaagaacaagtattatttaaaagaaactttgaaaaatacaatgttttagaataaaaatacatgtcaacaaaagtaaacggcggtggtgatgaatagggaagaggcggtggtgttatggatatgatggtggtgaatacggaggcggtagtatttacagatctagtaatactaaatacggaggaggcggtggtgttacggatctagtggtggttattgttgtaagggatgaggaggttatggaagctttagtggtaaaactatttgcctataaagctatttgtcccttcaaccaaaactctattatagggatatgagagtaatttaaagttggtttccgacaggtactatacgcccatggttagtttctataatattatgaatttcatagtcatctagtgcatatacccttaattatatttattaattaatttaagaattaaaaatcatgcattaattctttcttgcatacaaattgacatgttttaacttattaattgaataaatttattttaattaagtacaaagtatatcaaacttgtatataaattaaattatttaaatttagttgtataagtcgtataaacttatgcataaataatatgatataagaatttatttcatggttttatatagtataatatatataggattagtgacaataaatattagttgaatttatggtttatttatataagatactaaattgacactagtttaatttcgtttattttaaaaatactttaaagacaacaattgttttaaaggtaagtaattgtaaataaggtttattaatgtaattaaaaacattaaaaaatagaatgaattatttacttgagagttagagaaatacattaaaatgataattcgataaaatacaaaatatgttttaccaaattaattcaatcgatgttatttgttataactaacaaattatatgaatatactcataccttgtgcaggtgttggcttagtattttaaattcacaaccatcgatgtttataacgagctaatgtataacacatatagctttaaatctagagtataataaaaaataaattttaatggaaatatagtaataataaataaaagatactaaatttcaaatattcaatggttccgtagaataatgttttttaattacttgataaattatttatacaaaattaattaggtgatagttcctcagtattcctcaaaaattaaaagccacccaatatatttttgtaaaacattatgcattactaaataaaattttattttttaattaaaaagatataatgagaatcaaaatttcttcttctcatctttgtttgtttctttggtcatttttaagagctaaatcatcttatcatttgtatttaaattgttttttctgcatatatgattcgaatttatcaaaaacaaaatgttgaagatgcatccaaaataattgagaagggattaagtgatattattacccaggtctagtcgacttaaatgattttcaaaaaatatgatgatctgttgttcttacaaactcagattcctagctagtgtagagcttccagagttctcattgtgtcttgtttgtgtctttacgagaggtttggaacaaatttcttgatcttatcgttaggtttgatcccacacgcgaagcaatataaagattgtgatttttagtattgtgcaagaattcacaaaacacataaaaatatcttgtgatgatcaacaagactagtaaacaagtctatcaaccttacatgtagaagtgcactggtcgaataacgaggatgagatttgtaggtcaaaactgtaattgatggtaaataaacattggcgatcatgatgttataaggggtatcaaaaccaaacttaattgagtgtttagcaatgtggcatcacagtaccattgggggaatcagtattatattttactttgttactgagaaaatattcaaatattggttagtagatatagactaaaatagttaccgaggaatagatattattaagatgtgaccacactttctcatgaacttttgtagcaagttcatagaaaaacatgtgtaaaagaaacatggtgttgctatttagccgcatatatatgagggcttaatctcgtcgctatttaacaatagaaatagtcgacgtcatttgtttctaccaagggacttaaacttgtcctttgtcaatgcgtagttttgtggcttcggattttaaaaaattgtttctgaatttatatagatctaacaacctttgtaagattaatgctttagatactaatatactatcaatgaaaaagagtatttactttgttttcacatttataggaaaaaattagaaatcttcatttacaaaacgacattcgtagtttgaggttattactttttggcgaaaagaaaagaaaagtttgaggttattactaacgatgccaactatcaaaacaaaatttatgttagtaaccaattatgtgggtgtttggttgagtagtaactttcctttttactgttgttcggcagtagctataaactttttgttgtatgattacatgtgttggttgtagatgtagagtttgattggtaaagttaattaaatattgaggattcaaaatttaagtttatcaatttaaaattataacataatattaaatgagataacaaataaataataaatagtaaatttcatatgtataacacattgtttggtcaattttataattttttttacctcaaaaatatgataagatttttttgttgtcttatgtttaaagtacaacgtactcatataatcttatgcttgtgaaagttaaaaataatttctgtcccgcttgatgattatgtcattttattctacaaattttttttggcaaccgatattaattagaattcaaagagttaatccgagagatattgtttatatatatggtatgatgcaattcggtataattctttcataccaaattatccgtttttacatttacactacaaaaaattaaaaataaagaaaagtttgtgaattccttcttgtcattccaaaatttatcttttttttcctaatttttcggtataattctaattactctatgatcaaaaccataaataaagataaaactgaacaaacacaaaaacttggatccaaaaatacggttgggacattaccacatttatggcggcattcaattcaattgattgccacgcatttttccaaaagaatataccctatataaaaaaatccattaaatattatctttaacacataaatgaaatctttctcctacatcctacataatctgtgaatcttctttccatgtttacactgttataaagcaacttcaactaatcccgttttaaatataagctatctactctctcttagccataatgggaaacgaagcagcactaagatcatcaatggtaggtcttgcagtggtgatggtagttgtatggttatggacacagtctttaaagaagacggttgttacttacgccgtcggtatttctcttattggcggcatacttttgccggattgggacttctttgatcggagtttctctcggtggggctatcctgtcaccgccgaggaaagatcagccgctctcgcccgcaaatctcatccttcaaggttacttgtttatcttatctcaatatcaaactagttgttttatcatatcattatatattaatctttgaattattagatctaaattttggtttagctttattgccttaaaacctattggataaacataaatcatacatacaattttttttttgtcaaccgatattaatttggattcaaaagagcgaatctcaaaccatacatacaatgttaggttccatttgcaatgtatgtattattgtatatctacgaattaggtgtacaagttatgattgaatttgtttattttcgtgaatattttctattgattttaattgttagatccaaattttggtttggtttactggcctaattaatggataatggatacatctttggaccaagtaatgcaggtttagagtgtaccctatgaggatggttttatacggcacggtctatggatatgcagtgtataggtggtggatgttcgtatcaaattattgaagccatattgtatttacttggtccatcttttttatggtttagtgttgttgattaacaaaatatttagcttcgttttattttaactttgtagaacatgtaagactaccagattacatattggtgtgtccacataagatggacaaaaattgtcaaatggattgtggtatacaaaattgacccaaaacaaaactcctagagactctaaatgagcattctaccaccaaattctgtcccacatcagaaagatctttaggttaaaagtgaatgtctctaggttgtttcgcaagaaggagcaggagggggaggaggaacaccgaagacccaatctagtacgttcaagtattttgatcgaaatacgtctctttcttgtgcgtaacaatgcattataatggctgtcgaaacgctgaacacaaccacatccgctcttcttaaactcttgggcggtcgaatgtatcctgcctctgtcatgcaagtaaagaagctctctatcgccctcgctaagcagtatagtgatatctctatccttctgcttttcttctcaatagctaaagccagacctgttgggaactgcaggagaagcctaacgttaggtattatattaacaatgatatgtgatgagaatggctttcgtttgtactgttgctatggccacaagcggtatgttgcatgtctcaaaagtgcggaatagtagacaagtccaagccctattttacatcattatagagatggtctaagttccaacttcaagtgagaacaaaacaaaaatcgataagagccttccaagaattgattctaaccaggcagaagagcagtaagtagcgagaaacaaacttgatctcgctgtgcccagaagacccttgccaagtatagagtattgcctgtgatgaaacatattatgaggtgatgaataaaatcagaggatatataccattcaatgagcagtttagacataaacctattacttttttagcaggtcttgacgatggactattagcgctggaatcaaatacacagggacatagacaggtaacgccctcttgtaagcttgaaggaaaaatgtaacaccatgcttaacacatgactcatttccatgtattatctgcaagtaacaacataagtattgcgtaaaaccatgcatgcagactcattgacgatacatcaactatcgacaaatgctttgttcgtcttaacaacccaaaaaagatagtatcatagaaaacttaccgtacaggggactttcatggtaggatccagtttgatatcaactccaacagacttgtaatatttctcaatcgctcttaaattagtgaacggttgcgcggttgcgatatcttttacgccttgtaagattgaaagatccttcccaccttgtttgttaaggaaagacttgtacgatgaaggaaggctttcttgtttcaaaatgtaagcagacctgaaaaaaaaacacaaaatcgctaatctaagaatctaataacaaccaagaacctagtaacaactagctgaaccacaaaatttaatatctttgtagagagaaagagaaagcatacaaaatctgtgaggaagagagacacatgaggaataaatctccatgtttccaagtaagtggcttgcaaatggtaccaaagcgtttacttttaataccgcaacgcgatgcgagaaccgcagcacgcatcaatatataaacagccaaactcgtatgttgcgtatttggccctgtgagaagcatagatggtccagccaccaatccagcaaacagggccctccattttgcagttctggattcagattaaattacttcacagtgatcaaatctgaagaaattgatacttcactatttttgggtttaaatcacaaaataaaagttacaagattagtggggacaaacatgcctcttgtctcctgctaaagcagcaatagcttcatctacagaaacaaaagtcccagcaaaagttcctaagaacaatccatatcttaacgtctccttaatccccatagcgatagcttcactattcgaaaactctccggttttcctaaaccgactacgattagatttcagatcagatgagctaaaccggaaaatttgaaaaatcgatttcggttacctagattgaggagaagatctacgacgacgagcgaaacgagcgacgattgagaaaatagctaaaccaccttttaaaccagtacctatagtgaatcctttgacggaagcgacgatgattcttcgaagcttatccgaatcattcaccgattttgatttcgatttcgaatcggagtttttgcattgtttgcatgtaaactcatccgatttaccgaaatcgttgccatcgttgtcgctggagatgcatgatgagcaacgagaaccgttcgtcgattcgtcggacggcgacatgacgacggcggcggcgagaatcttcggattgcgccaaagtgatgctttggtgggaaattgggaattggcttttgaataaaatagaaagaagaaagagagaaccagaaaaaggaagttagggagagtgacgaagacagcgaaatttttagatttacagggccactaagaattatccagttgtcaaggagtgactgacacgtgtcggttattttttttttttcctttgtgaatcttttgattcttctgctttgggaaccgtaatgatttgtagtatgggtttgtggaaggccatgggcttattttatgggcttgataacagacaggataatattaaaaatttggaacgttacaaaaagaatacgaatattaaaagagataaaaaaatgggtgaattagctcaataaccatattccataaaaatattaagtaactaacaccataaacgaaggaattgagagagtgacgctacgggtatgtgaagttacaacccactccctaagccacgtttctgtgatttcttgtacgcgcgtgagggtaagagcgagcttctttctaccagctgacgtgtctcctttcgaagccagtaaaaaaattatcctagcaccgcttgagaattgtcccatcagtaacataacctgcagatttttacattaatttgaataaaatattccccccaaaaatatcggagcagaagatgctctgttttctatttattgccagtaaatgctataccttttacgcagagatctaacctgcaaaacagaacagtatggatggtggtgaaaatagtacagcagtaaatacagggaatcaaaagggaaaggtacaaaaccatcgctttcttgtttctgtttttagtctctcgtgatttaattgcctagtgtaaagtttccatttaaaaattctcacttttacgttcgaatataccacttacctagattgtagatctgctaaacaacttgttagtatttacttaaattagatcgtgattcacgctgtatttgttattccgtaattaaaagctacgaacgattaaattggaaaactgttattattgattgatatttacatttaattttcattatgttctttctaaataatactgaactatttccataatccatgtagaccgcaggacaagatgaagtattgttggtgattggcgagtgggtcagggtggataatctagcctggcagtttgaacctaagactgtcgaaggatcgtcattcatccgactcagaactaacatgacgtatgaagagctatctcagaaggtgaaagataaacttggcttgcgtggaagaggcatcacagttaaaatggcataccaatttccagagtggatggcgatagatgaaggcaacggttctccacctcaatacatcagcgaagatagtgatgttacaatgttcattcaaatgcggcggcatatagaggaggtcaatctatgtgtaactgtcgtccaacacactattccaagttctccggttgctgttacggacaagaacttcaattcagaggacagtgacgattcagattatgactcagaggaggaacttcaccaatttgcacttgatagtgccgtgttggggcctacactagagccaaccgctgctacaacagagacagaacaacaccgtcgtaccaggcgagagctgttccctacaggaggaatcagtattagagagcctgaagaatgcatccgccttaaaagccctgactgtctccctactgacaaagggaaaggaataatggacccaattgggaagaaagggaaggctggtccaagcagagcaacggtgacagatacctcaacagacagtgatgatgacttgctcattgttccattcacactgccacccaatccaccagctatcaccattccggaaaatgctgacatcgaaggcgcagattcctcacgggcagctgtgggcacgcctcatggcaatcatgtttctcctattggtaatgctgtagcagaaactgaccttcagcgtcaaaacattcttttttgggggcgggcacaagaagctttaaacactatcctatccgatttcagtgatgaccctattctttttggtcgggacgccccaccagtatttaacgatggaaaaggtgaaggtataacttgcattccatatctacatatagattttgtttgatgcttgttgcaaaacaaatttggttatggagtaattgggaaaatagagttcacaccttatactattctatttatattaatcgtgtactatttatattacagactacaaccatgtcgctgatagatgttccttttatttcaggtgtggactctgctttctttgacgttaaatacgaaggagataagctgtttgttggcagagtctttaagtcgaagtctgactgcaagattaagatagctatacacgccatcaaccgcaagtttcacttcagaactgcgcgttctactcctaagtttatggttctgaaatgcatttccaagacctgtccatggcgtgtatatgcatctaaggttgatacttctgacagctttcaagttcggcaggcaaatcagagacacacatgcacgattgatcaaaggcgtagataccaccggttagcaaccactcaagtgataggcgagcttatgcaatctcgctttcttggtattaaacgtggtccaaacgctgcagtgattaggaagttcctacttgacgactatcatgttagtatatcatattggaaagcttggcgggctcgagaggtggcaatggagaagtctttgggatctatggccggtagctatgcacttattccagcttacgctggactccttcaacaagcaaacccaggcagtctatgctttacagagtatgatgatgatcctactggtccacgccgtttcaaatatcaattcatcgcattcgcagcatcaattaaagggtacgcatttatgcgcaaggtcattgtagttgatggaacatctatgaaggggcgatatggtggttgtctcatctcagcatgttgccaagatgggaattttcagatcttcccactggcttttggaatcgttaacagcgagaatgatagtgcatatgaatggttttttcagcggctaagcattatagctccagacaatccggatttaatgtttatctctgaccgccatgaaagcatatacacaggattgagtaaggttagacacaaccatccatctcacgtttcttcatatagtatacatatatcgatttacttaatatgccaataagctggttctattttgattggataatgaatgatttccctaatattgttgcaggtctatacgcaagccaaccatgctgcttgcacggttcacctttggcgcaatatcagacatctatataagccaaaaagcctctgccgcctaatgtctgaagctgcacaagctttccatgtcacggatttcaatcggatattcctgaagatacaaaaattgaaccccggatgtgctgcatatttagttgacttgggtaagtgtttttctcagcttacatatattgttattaacgtggctgagatgaagttgactccataacctctgtattttgtaattcatataggattttcagagtggacaagagtgcattccaaaggccggcgtttcaatatcatggatagtaacatatgtgagtcttggaacaacgttatcagagaggcccgcgagtacccgcttatctgcatgctggagtacataagaacgacgttgatggattggtttgcaactaggagggctcaagccgaagactgccctactacattagctccgagagttcaggaaagagttgaggaaaactatcaatccgctatgtcaatgtctgttaagcctatctgcaactttgaattccaagtacaagaacggacaggggaatgttttattgtcaaattggacgagtctacttgttcctgtttggaatttcaggggttagggatcccttgtgctcacgcaatagccgctgctgcaaggattggcgttccaacagactcgttagcagcaaatggatattttaatgagttagtgaagcttagttatgaggagaaaatctatcctattcactctgttggtggagaggtcgcaccagaaattgctgcaggaactacaggagagctgcagccaccattcgttcgccgtccaccagggagaccaaggaagatcagaatcttgtctcgtggtgaattcaaggcaagtacctattagtaaacattacaatgtacttcttatctgttaacaagctaataacctatctacttttaatatgcagcggaacaggacaaggtcccagaggaggtgttcacgttgttgtggtgttggacacaataaggcctcctgccgtaatgctatataagccgtcaactactgctatggggtgctaataggtgttatgaagaaactttctggagtgggcttaaataatggttgttcccgcatatcttgcggaagcgggtttgtttacttctactaatgcaggagtaagtacatttattgaaatagtttggtatacccaactttgatgtataccttattattttgatttttatgtactacctgttcatcgtgtatatttgtgttggtatctctaatcccgatgtaattaagtaatgccctgtaacaccgcttttgaaatgtatatatatgaaaccccgcagtctgtctaatcacccttctctgcttctttccagtgcgtaatcatccatatcttacttacataaggtacagtctttctttttacgaaaactaaaccctaataatgaagtgggaacccaagcaatgatgcatcagtaattgtatacactgatttttcctgtaacataatcaatggggtaagccataacaaaccaaaaccatcaatctgcttttggaaccacagaaatgagtttgtttacacgtttgatgaaactgttggccgaataacatatgttttacttagtttcattatgctgtatgttggagatgcactttcagtcaatcgcgagcttgtacctgcaagctgttacagaaccaacgtggtgagctggcgagctggcaatgtgaagcgagctggcaatgtgaagcgagctggaaatgtgaagcgagctggcaatgtgaagcgagctggcaatgtgaagtcggggataagcaaagcacgtgttgtgagctagcgagctggcaatgtgaagtcagggatgttaagcaaagcacgtgtgttgtgagctggcgagctggcaatgcaaatggacgttaacggcgatcgttattaacgtggttagcgtttactttctttacctttttgtataagagcaacatgttatgctcatgctttcattatcgaagattgttatagaaactctctctcttctagaactttctttgtaatctctgggtttttctcatcttgagaaccagaggagaatcactccgcgtttcatgaacgttgtttgattcttaagtaatatacagagctttcaatcgtgttggtgttttggttgttaatcggagatcgtgatattttctgtatcacaagcatcacgtttataaatgttatgattatatagccaaacgggcatcatggatggcagcttcgtcataaatagttttgcatggtatcctattctatttactatttactgtactattccgacccatatgcaagattcaaataaaaaagctcgttttacatcaaataattggaggctcaaattgttttctcttgatgtcatgttttcagtatatatgtgaaaatattactcgtttagttataatgatatgcaagaacttgacatttcatttattagttgaatactttggagttataggagtttgtagctataggagttcagcatatctgttattgcatcactgtaatataacccaacacactaggctaataggctgaaacatttcacttcaaacataaatatacaaacatcacagttagtagttgagtttcaatacaactgttctctgattacaacagaaactccatgtttgttcaacataaattacacatctacaaatcaagcaccacgttctgttggagacaatgcattgaaagtttcgatagcgtactgtttagctgcatctcgcatcttcccatcatctagtttcccacaatactccattgcgttcactgagtgtagctctagtaagaccacacttgcaattccaaccagccctgaaataaacaaatgtaactatatatgtaaaccaatcacattgcacacaattagtgggagatcacaaatgaaacacaaacagacctagtgaagaacaactgcactgtatcttgggtctactaacagtcattggctccagcctctgtgttagcatgtacccgttaactccatgctttcgaatcaggtacggtagcatgattgttatgtgctctacgtacttctccacctgctcgtctttcaacacgtctctgttacagtctaaaactgtgactccccacttcttcaaatctatgacaagcccaacccaatgctgcctctcgacctgcatggggcagtagatgacgtcaatctcggcaaaccatttcggacgcaccatgaaggggactcttgcaagagtgctgaagtaaaaagcactcttatctgcagctcctacaaacttgttgtactggcgtcttagctctgacaagaaacttgaaggtaggaaatcaaaacgcagcggcttatttttatctaatcgcagctgtatgaacctcactaacagatcaggtccctgtggcaggaaaatgtttgttagcacaaattctatacatgagttacattgtctatcagtactcccacagttgctgcaaaagtagatgaatgaagtattctatagtaacttactgattcatctagtagtgtctggccctcaaaaatgttcaaaaattctgtattctccagtacaacgccatcagccagaacatatgagctgcatgttaacatataaaggttgcattagttgataccacaaagaagagcggttactattctatacttagtgtgactacttacactccccgttccatttgtttgagaaaccttttcacagatgatggactaggcacagagaacggtttaaaaggcccaataaaagcaggtgattgatttggagtctgcttctccacttttgcagaactactaacatgacttttaccagcccctctgctagctgtttgatgcggctggaccggtatgctagtcatattctctatactgttgctttgaattggcctgtcccttatccggttgctggaccgcaacacagaaactttgctggggaatgtcttcttcttccctcttggaggcaacctgcttctgttatcgttgatttcttgcgttagtcccaacgaaaaattcggctccacaatgtctacttcatcatccaatttctcagttggtgaaacatactgcaaggcatataaacatgtacatagttcagcggagcaacaacatataacgttacatttacataaatgggaactcttactgttttgggttcatgcacggcctctttgttttcaagctgccaataaccaatagcgaaagtaagtgggtttgctgcaacataaagtatgtatattgtaactcaaaaccagaaataaatataactacctttgtgctcgccacatgctccatatctttcgctcgcttcagtggcctattagattgtgcatccatttgagaacaagattttttctttcctcctttctgaatagaatcttcttctcttacctaagaggcatcaaaaatatatgtcattcttaccgaatacacacaaatgcgtcataatcttcactgtattctcacctccattctagtgttagggttgctgcgttctggaacagacactccaacgtttatgccgcacgcagccggcaagttgtcacttccttcacttaacccaatattaggttcaacctgttgggaaactccatgcttatttcctggctggtcagctcttatttgttcctgatgcatcaacagaaaattgttgtttaatgtgaagctgtccatatacatcaaatagcacctactagtgcaatacttgaagtctcaacaagcaaattgaggtgcttaacctgtttagagtgggcatcagcaacacatttgctgcattctccaacaattccagcctgtctatttagcccactcacagcttccctaaccgattcagtaagtattgcaaccaattctttcttctgcttaaccagttcagcctcaaagtatgacttcaattcatcgttgtttgattgttgaatcttgagaacacgtttctcaaactcatcagctacctctttgatgactgcctctctaagaccatgtccagcagagccactatcattgttttccatctcgccagctcttgggacttcctgctgcaacccttctccatccgcaaaactgacaccatctttatctgtcaccggtccatccttattcgcctcaccatccaatccgtctacaccttctccggctgcacactcttccctctcttctgcagcaacaccagaaccatcaacatccatctcatcgtcaccatcccccttagcctgattcacacagtcatcagccatgaactcatcttcagatggatgttcaacatcattagcatcaacaccaccactccaactgttatgctcgaatgggtgttcctccattatcaatgatagcagatgcgaaacttcttcatcatcctcctcatctgagaaagataagtcgatctctttcgccaggagctcttcattcagcagtgaggttacccggtcctaaaagttaagagtcaatagaatagataagtcaagtacacaatctttctacaccaaatacaaagaacaagctttacaacaatagaattaccatgccactttggtcgatagttcgtgcatcatgcacattgatgttcaaactcagccccaatacatactgaaccagcttctcgactggaatggttgggtctagaatgttaaacaccgagtctgccgtgtatataatagctggacaacatgccactgtcacaagaactaaggcatgaggaaacccttgtatagctgtggtatcttgtgcaagctccttggctgttctttgcttggcgcttcgaatagtcgcgagaaacgaagttctaccccaaggatatttaagaaaggattctacatcttttaccatctctacatggtcaggatcgatgatagttcgcgaacatgtcgggcaaagaatcccatcaactagtagcagcaacgataggcgaaatcgagtcaacgggtctttgtatttcttccccatagatagcttcccaacaatccattgtgaagtaggctttctctctttcccaaataatgccttgtagaacctcgtaggattctgaaccgctttcattttccctcttgtccttgcatcctttttgttgaatccagatttgctgcagttaagcccggtaacaagtgcaaaatcatcaatggcaaatcgaattggcttccctgcaaacacccaccacatttcatacttcttatctgtcaccaactgcctagatagaatgtaatgtaagaacattacagaaaactgatgcgtccccatttgcaacagaaatccaaactgcgaaccctccagctgcttcaaatggttttgatctagagcagccttgatgatctcaatccacctaagagtaaagtaattgtttatcctctttcggccctcaggttcagaacctagccgaaacaaacgctttggcaactctacatcccccatggaacagatacactgaaatacaaatgtccacgtatcacttttttgatgctgctacttacacaaatacaaaatatataaatcttagatgtaaatatatgttattaacagactcaaccaatatagcctcagctttccgttactatcaacaacaacaaatggattacatagaagttgagttaaatattaaaccttcataacaccaattagtggaatatcggattaaccagcaaagattcactaactaaagctactcaaatccgagtttatgctattcaatactgcaaataaaactaaaaatgtcattaacacatacaaccaatttgagtagcttccgttactatcaacaaacacaaatggattacattgaagtagagttaaatcctaaaccttcataacaactacaaatgaatatcgtattaaccaagcagattccctacctaaagctactcaaatccgagtttatgctattcaagctcttcaacacaaattaaaaagattttcccaaaagccaaaaaatggcatttcataccttaatttggctgaatcccttcgccgacaccaattgccacagaaattcgagtgttacagtggagacgacggagatataaacacctctactcccgtacaacaaaactcactcaagtactctcaacggaatcaaaaaccctcgattgagaaaagagccaacataagtgttgtacgaaactcggatgcttagataggctcctcctccaattgcagaagatttatgcagtccgattgccagaaatcgaagcctccacagtccccaaatcgaaacccacaaattcaatcttcgtaaactctagaatcgtcactcggattgcacacgcagtctgctcttcgaaactttcccgggtgtcgctttttaaagcccagaattttcagattttcttactgtaacttctctgaatgttcacctctatttgaatttttacagagtaatacatagaagttatcgattgaaaactcagaagaagaagaataagcgcgtgtgctcacgcacgggttaagtttgtcaatattgcataaagttcaatacatattggttgaagtgttagttttgcaattataatttttttgttggctatatttgcaaatttccctaaaaaaattattattagtagtattgaatcctttttaattttttttttgtgcaaagtaatagtattgaatccaacacaatttttctttttctttttggaatgctagttaacatttcttcaacaaatatgtataatacatgttttatcattaaaaacttgaattgtttaatctcatgagaatccagctaagatcaatattataagaatccaacaaatttcaatattataaataatttcatggttcagtcaattaattagatgtcgacatgtgtaaaaaaaattaacttctttttctctataaaaactactataaaagatatatttatattttttaaaattataattgttttggcgaataaaaacaaacaaaattatctataaataaagagattgtaattttattagtttagatttatgacaaaataaatttttgtgaatgtgacaaaatagaaataccaacaaaaaatataagacgttgagatgcacaaattgttggggtcggattccacccaggtaagcgagccaaccatgtttcaacgcctcgggagacatcgaagagttatcccgaatcgggccacaaaacacctcggagatcgcatcaagaatccataccgaggcgatatcgagaatgcttcggagcattctcgtgaaatggtcccccgacccgacctcgaaacgcctcggacataaaatctggcaattcgtcccgaggcgggctccaaaacgcctcgggaacgtatcctcgaataccgcggtccgagcatcccgagcacgacccgaggccagctaaatttcggctcggaagaacctcgggttagacgagaaaaccttcaaaaaagaacttagccggtataagttcaaacacatcatttccgaaaacccggaagagacaatcttcaaagatatcaccgaatacagaaattccgagaatcttcggaagataaggacaatctccttcaacaacttaaagataaagagaaatcttccgagaatatcgcgagaggcgatattctcgagctctataaaaagcacttcgaaggacaaacaaaaggacacgcacaaaaacgctctcaacttcatgctatcaaaaacgctctgactttgaagacaaaaacacttattttcatattctagaacatttgtacgatcaaatcattactttctcattaatacaatcaagaacatcgtccgcagtaattgagaattctgttgttctttgagaatctcacaaagattcgttctttgaagaaacccttaaaataaactctactgtgcgagttttgactctcacaatttggcgctagaaggaggggggatcgagatttctcttactcccggaacacagaaccaaccacccaattcacaatggtcaacaatcaaatctccggtaacacagttgatgcataggggaacccaatccctccaatccagacagacgttcctgaagccgctgttcccgcgaccctagcggaactaagaagtatgatggctcaacttaacttcaacagaaggtgaacgatcaagaacagacaaatcgatccttggcacaacaactcgaagcagctaccttccaaggacagatcaggactactcgtttcggcgcgaggcatcttcaggatcgacgagcagcaacagatctcaaccccacacggctcgtgttccacacgcctggcaatactacaaggcccgtccgcagaaccgcaccggaaatcggaagagaccgaaccgagccagcgattttgggatatcgagaaacgaatcaaacagaaagaaacgaaccaagctccctcttccttgagcagaggttaccgaggccgatcagatcaatgcctcggacaatgaagattcagaagaaaacattaggtgggctgaagagtacgccagagaacaggaaataagcgccatcaagctctgcctagccaaggcagagaacgagatgaagctcgtgagatcccaaatgcatagcgcagtctcctgggcaccgaacatcgaccgcattctggaagaatcccacaacacaccgttcacacacaggatctctaacgcgataatctcggatccagaaaaactaagaatcgagtacttcaacgggtcttccgacccgaaaggacatttgaagtcgttcatcatctccgtggcccgggctaaatttagaccagaagaaagagacgccggtctctgtcacctgttcgtcgagcacttgaaagggccagctctggattggttctcgagactcgaaggaaattctgtggacagttttcatgagctatcgacactcttcctgaagcaatattcggtgctaatcgatcctgacacatcagacgccgacctgtggtcactatctcagcagcctaatgagccacttcgagacttcctcgcgaatcaacgacgtggcggctctctctgctctgaagaaagcactgtggtataaatccgaatttcgaaaggaattaaatttgtccaaaccactgacaatccgagacgccttgcaccgagcctcggattacgtatcccatgaagaagagatggaactactagccaaaagacacgaaccgtctaagcaaacgccttgcatcgaccaatcccaacccagtgctctgaatcatagaaaaggtgcccaaggcgggccattcgttcaccatgaaggacgaaatttctccggagcccataattaccaggccgataaaccccaaggcgaagccgcccgaggccgcggtcgaggacacggtcgagaatcctacacttggacaaaggatcaacccgcaggaaacgagcaagaatattgcgagttgcataagagttacggccatcatacttccagatgtcgtagcctcggagcaaggttggcagcaaaattcctagccggagaaatcagcggaggtttgaccatcgaagacttagaagcgaaaaaaggtaaaaccgagcaggtcaacactgtggccaatcccgagcaagcagcccccgcggcgaaccccgaaggacccaaaagaggccgaggtaatcgcgaagcagacgacgatgagccagaggctgctcggggaaggattttcacaattttaggggattcggctttctgtcaagacacggcggcatcaatcaaggcttatcaaaggaaggccgacgcgaatcgtaactgggcgcggccatttaatggaccaaatgacgaagtaatctttcatgaaagcgataccaacggtttagaccgtccgcacaacgatccattagtcattacactgaccatcggtgatttcaacgtcgaacaagtcctagtcgacacgggaagcacacttgacatcgttttccttacaactctgcgagaaatgaagatcgacatgacgcaaatcatgccaactccacgacctgtgctcggattctcgggagaaaccactatgactctcgggaccatcaaattgccagtccgagccaaaggggtaacaaaaatcgtcgatttctttgttaccgaccagccgaccgtgtacaacgcgattatcagcaccccatggttaaatcaattctgagctatcgcctcgacgtatcatctctgcctgaaatttcccacaagcgacggcgtgaaaaccatgtggggaaatcagaaaaatgctcgcttctgcttcatggcagcacacaagcttaggaaccccgtcactgaatcgacagccgacacgaatcataagaaggccaagcttggccgagcggaagagaaatcaatttccgagcagttatagcagctaaagatcgaggaggctcgggaatctacaacactaactcccgatccggtcatcttaatctgccttgacgacgcaaagcccgagcgatgcgtagaaatcggcggagatctgggagaagaactaacagctgagctcaccgcctttctcaaagaaaacgtcaatgcattcgcctggtccccagaagatttgcccggagtaagtgttgacgtcgtatcgcacgagctcatcatcgactcaactttcaaacccatcaagcagaagaggagaaaattgggtcgggagcgagcagaagccgtgaaagccgaggtagagaaattattgaggatcagatccatcaccgaggcgaaatatctcgattggatcgcaaacccggtcgtagtaaaaaagaaaaacggcaaatggagagtctgcgtagatttcacagaccttaactaagcttgcccgaaagacagcttcccattaccacatatcgatcgcctcgtggaatcaacttctggaaacaagctactgtcattcatggatgctttcgctggttacaaccagatcatgatgaacccctaagaccaagaaaaaaccgctttttacacagaacaaggcatttttttgttaccgagtgtcgcaggtcctagccgattttattgtcgaactacccaccaaggaggctcgggaaaacccactcgacacaacttggcttctgcacgtagacggctcgtcatcaaagcaaggctcacgtgtaggcatccgcctcacctcgccaacaggagaaagcctcgagtagtcatttagattaaatttcgaagctaccaacaatgtggccgagtacgaagcgctcgttgccggacttaatctagctcggggactaaagataggaaacatccgcgctttttgcgatttccagctcgtcgcgaatcaattcaacggagaatacacagctcgggacgaaaatatggaagcctacctgattcatgttcaaaagctagcgaagaattttaacgaattcgagttgacaaggattccacgaggagaaaatacatcggccgacgccctagtggaattcattgagaagccaagtattgagctcggcgaagaaaaacacgtcctcccaatacaatggacaaatggaaagctcgtaaactcaaagctcaggctgcgcgttttgtcttagtagatgaaaaactttacaagtggcgattattcgggcccttgatgacatgcgtggaaggagaagcgatttgcaagatcatgaaggaaattcacggcggctcgtgcgaaaatcattctgggggaagggctttagccattaaaataaaacgccacggattcttctggcgactataatcaaagactgcaaacatttttcaaaacgatgcgaaaaatgtcaaaggcacgcgccaacaatccatcaaccggccgagctcttgtcatcaatcgcctcgccgtatcccttcatacgatggtcaatggatataattggacctatgcatctctcgaagcaaaaaaaattagtcctcgtcctgaccgactatttctcaaaatggatagaagccgaatcttacgccagcataaaggacgctcaagtcgagaacttcgtgtggaaacatatcttatgtcgccacgggataccttatgagattgtcacggataacgtatgagattgtcaacccgcttccaaggcttctgtgataagtggggaattcgacttagcaagtcaacaccacgatatctccaaggaaacggccaagccgaagccgctaacaaaacaatcctcgacggattgaagaaacggctcgatgctaaaaagggctcgtggtccgacgaactcgaaggtgtactttggtcgcatcggacaactcctcaccgagccacaggagaatcccctggagaaacccctttcgctttagtctacgggacataatgcataattccagccgagatgatagtgccgagcctacgacggagtctgtccctcgagaacacccctcataacactcaaaggctcctcgacgaactcgatctgatcgatgaacgagagattcaaccctggttcgtatacaaaattatcagaatgaaatggctcgtcattacaactcaaatgttcggcaacgaagattccatgaaggagatcgggtcctccagaaagttttccagaacactgccgaaccgaacaccggaaagctcgggacgaattgggaaggaccgtacttaatttctaaaatcgtccgacccgaggtgtatgagctcgctgacttaagcggcaaagccgttccaaggtcatggaacgcaatgcacctaaggaaatactactactaagtcagaggtgattaaacttgaactacgaggtggcttgatccctgaaaagggtaggtaggcagctcgtcttcggacgagttcagctaccccccattaaaaaaggagggagtgggtccgtatattcatactcctatttttattatcttgtagattttcgaaccgaaatatgaataaaaattcttcgcaaccttttattcagagcgacggctctgagtatctattacgcctattcggctacagcgcgctatacaaatacgaggtgaaatctatcatattatttctgataagaaattttcatcttcagaaacccggttatacttttaacattggtatcccagctcgttcctaaacgctggtcgggaagtgaatacgatcgggtcgcaaccgagagacttcactttaaaaaaaaaccaatcttatactggtaaaataaaatggttcggaactaataaaccaaaacttttggatttcaaaaaagaaacttaaaattggataaagtcgtccaggcacaggttctacataccatcggataaagctatccaggcataagtattataaccaaacaataagaaaatagagaaaaacaaaaaccgcctcgggtccctaatcaagatcttcagattggcggttatccttggcaggaaggagcgatccggcttgatccgtaactcccgccttgtcggctactgactcgaccgacctatgaccacccggactcagaggagcggactcaagagctggagccttgagatcatctttcagctcggcgatgaagcgattgagattagcctcagcatcggcgaaatctttcaaccactcatcaacttgctctttctctctctccagaactccgccaccttcgaacgcctcgattagctgcgcattggctcgcgcctgagacaagtacatgaatcggtcgttgacctcatcaaggagcgacattttgtgcttggcagtttttatcttggcagtgaaggcttccgaaacctcccgcctcgtcgtctgaatggcccgagccacctcgctatcacgaagccctctctcctcagataacatccccttgtgacggacaatctcagaattcgcctagagattctgctcggccatccttatggcattttctctgtttacgaaggccatcctctcgacctcctccctttccaacttcgctgcggcagcttcggagagtgcctcatttttctcccgctcggcggcctgaatccgagactccgcctcggctaacttaccagccacctccatgttgctccgcatagccgaatcatacgaatgtaccatccggttcatcgaggcgacagcctggaaaaggaaaagttagatttataatgacaacgctaaaagcgaattataagtaacaaagcacatacccgcaaaaagtgagatgccgtctcggcatattttcgagattccagaagagtatctggaggaggaagtaaggtaccaacgcatcccacgagtagattggccgaggcaatgcgatcttcgaagatcgggagtactttctccgcctcggagccggatgtcttctttttcgtcttcttcttctttgacgattcatcgtcaacccgaacgcgcttacccgccgctgtgtcacttacaggtaacgccacaaccgcttcggatgcagcaacagacggctcagcttcctgagcttcagagggtgccgcatcaaccggcgcggcagcatcgggaataacattcccatctcgggacgcctcaggagcgtcccgcagcgagatcagtcccgcatcaaccggcgcggcagcatctggaataacattcccatctcgggacgcctcaggagcggcccgcggagagatcagtcccgcatcaaccggcgcggcagcatcgggaataacattcccatctcgggtcgtctcaggagcagcacgcggcgagataaatcccgcatcaacaaggcgtttctcctccgccaatcgcctctccttatcctctttctttttggcgtaaacctcccacagagtaagcttcgtcgattgcatgtctacaaagaattgggtacggtgatcgaaagactccaaactagtaggacaagaaacaccgtgaagaagacgaagcgcacgttcaactcgctcccgagaaaaatgcttcagccaatcgcacttccgagccgacaacgcgtgaaaagccgaaagaaagtcgtctggaatcggctcgatgaacttgagagtgcgttctgcaaaaggaaaactgcaattagaaaacgaaactaacatcgcatcgggtacaaataaatttctaagtacaactacccaaaattccccatctcgtcagaaccgtcccgaggagatcttcatgaacagcatcttcgatggctacgaagaagaaatgatcggtatacggctcgtccttgctcgagaacccatcaataattttatttcccttagcggaggaaatgtaataccgatccactttggattttggcacccgccggatctcgagaaaatttctcagatgagcaagcgttatctccttttcagactcgtaacctcgaatcaaaatcccaagcaaatgcctcaaggatcgcatcgtgatctgggaaagggcaatctgatatgacgtcacacactccaggaccagcctcgggatcggcagccacaagaagcaaccataaaagaacccctcatacaaggtatagaaattcgcagggggattgtcggcccgctcgtcagggctcgacacacgcaaggttacagcgccaagactaaatcgagccctaaggtccgagagagaccgctcggtgcacaatgttgagccgggagaatctggcattatcacctttttgttcctcttcctcttcttcttctcagccttttcgaaagctttctgctcgttaagacgcaggatatcttctgtctcgttcgggccgaagcaaagaaaatcctcgatcttaaccgtcggcatgaagggctcgggcacatcttgccaattggatgtcccggcttcgtcagccgtcgaggcaaaagacctccgaacgagaggcagctcggggtcgtcaggcaaatccaattcccgagtgatgtcggcattggtttcttcccgagccgtgaagggagtcgcctgctcgggggcatccgaagaagatacagtatcctcttcagaagacgtccaaactgatctccgtttgtagatcgggggaagatcatctaggtgatttgagtcgctagaatcgacaaaagaagcgctcgggatcgacggagactgtgtagaactcattctcggttcgggaacgatagacgagaagggaaacaaccagaaaacaagaatttctcccggaaaaatcaaaaataacaaaaagaacgacggagcttcaccgaaaaagaaaaaacgatagaaatatcaagatcagagagaatgaagcaaaccttgtttattttcttcgaaaacttcaaatgaaatcttgaaggagtggctcgccatatataaagagttttcaagggcgcgtcgggtccgcggcaaacattcaaaacgcgtttaagcgcgtgggcttggcagaaggaaaagatccgcgtggtcctcgggaataagcgagaaacgtttccactcctcaagaatagtcggcgacacgcgacagaagtttgaccgtccgagaagatgaagcgacagaactagaagacgaacagtcggctcaggaatccattcatgaagctcatcgtctctctgccaagtcactgagctggggggcaaaccattggggagctgcgagccaaccatgtttcaacgcctcaggagacatcgaagagttatcccgaaccgggccacaaaacacctcagagatcgcatcaagaatccataccgaggcgatatcgagaacgcttcagagcattctcgtgaaatggtcccccgacccgacctcgaaacgcctcggtttaccaaaaaatcctggtttacatcaaatgcatcttttctaagtttttgaaaaatctaaagacaaaataaaaatttacattttaatgcctagtggaaagccaaaatatgaaaaggttatcatacttcgggttcccggtttttcgaagtagtgtaatttggttgcgaatgtttttgtcgatggttctctctagggtagttgcagtgaccgactcttctctatgccatctgttatttctctctcgtcacatggtgtggactgtgattgacagtgcgtattgcagaagcagcaacaccttcctttcaacagtcggatttgtgatgagcagtgagagttgatcccaatcccactacgaagtaatcttttaactagcttttctcatatttcccttgaataacagcattgaaaaagaggtggtttctagtttcgacccgtttaatgcagaatttacatgagatatcggcttgtatattccacttctgcatgtaaatgccaaatgatcagagcacattttagcatactagtattatattacgatcctcacaagccaacctgacataataaaatgacataatatatggtactattttatgtcatgaaattagtgatacaaaaataaaattgaaggggtcaatagaggatttagaacaaaagatatagggatcatcataaacattattaaccagttcacttaagttttacacttaaaaattaaaatacaaataaatatttataatttacaaaatctgttggggtcagttgacctcccaccttaccacgtagctacgtggttaaaacaatatgttctcgaacgtatacttgttccaagttaccaatgcaacttcgatattaaaacaatattgtgattactgattagtcatgactcatatatccttttaatcctaactaattaataaacataatccattgaaaatgcgaacccattgcaatattgcatcttttaagttgacgtcggtttagtaaaccgttgccaataccaatgcttctcccaaacttgatacatagaatccacaggtatccctttggtctcgggcaagaacatgatgacgaatatcgtcattgtaaagatccaaccgccgtaaaacaagaaagcaccgtacttgaaatcgcagagcgttgctaagaacgtttgagagagagcaaacgttgcggcgaagttcacggcaacgcttaagctctgaccagctggtcgtatcttgagtgggaatatctcacttgggacaagccagcttaatggcccccacgaccatccaaacccagctgcgtatatgcaaagtaacaccaccaccgtcacggcgtaacccttcttcatctctccgtccccggtggctcccactgtcacagctagtaacacagccactgcaatctgtacacaagattgagttatcaatatttggcaattggcatgtttggcccaatcacataattttttttttgtcactcttaacagtttagtataatttgaagatggtaaccaaagtaaaacgttactaaaaatgcttcatatttcggaacacatttcattttagattttcatagttacttttctaagattatgttaaatagacgaagaaaaaactaaaaaatgtgataagtgtcgttagctcaattggtaaagaccgtatgcaaagtttagaggtcgccgattcgaatgacgcttgggacgaaactaatattacatgctgtggtttcgggcttggggggattacgggattcgacccaaaacctcctggtattcaaaaaaaaaaaaaaaaaaactaaaaatgtggttggtggttctagtttggacctatttcttacatcacattctaaactcttgatatttttatttttatctgaaccgttataatattttcaatcgagtaaatttttaaaagtggttatatatattttttatatagttttcttatatcattttttttacagctttgcattgttccctgacagctaaaaaatttgtacaacttttggttgctaatcagatttagtatttttatactcataaacgcaattatttttcattaataaatttaatgctgaagtcaattttttcgatttaatgcagaagtcaattttttatttcaaaataatatttactagaaatgattgagtttatcataaaagttatggaaaatattactatatacgtaacaaaatttgcgtttaaatagtattcataatcatatgcgtaagcataactaacccataacttatttagaacatacctgacagagaagcatcagaataccgccagcaatgaacaaaaaccgtctaccaaaccggtcaataaccattgttgagagaagaagcgaaccaagattaacaaacccgagtatgaacgtcgcaataagagccggaccagaaccaaacccaaccgatcgaaacagaaccggcgcatagaacgcgttcaccgttattccagttaactgttgaaaacatggtatcaccacagcaaccacaagatgaggcctataccgtctctgcaatatcgtcttcataaacagttcggctctagcctcaatggctagctggcttgacctaaccaactctgctagctcggtttccacgtcagctatgttttcgacgccacgtagcttaagcagcgacgtgtgagcttcatcgtgtttcccacgcgccaagaggctagaaggtgtgtcggaaatgaatagacatcccacggtcatgatcgcggctggtacagcagctagacctagcgagatacgccagccgttacggtgactatcggtaccgtaatttattagattggctgctactactcccatactgatgaagcatgaaaagccgatgttgaatgctccacgccatcgcggtggtgctacttccgatagatataccggagccgcctagagtgttcacatttttttttttaaaaagagtatagtttcatccgtatttatatttattaaatgtgatagatatgctaacacattaaataaaattgtttaaaccaaaaccgttcaaaccgaactagattttgtttaaaaaccgacaaaaacaaacttaaacctgatctaaaattgttttagactttattttttggtgaaaattaaaaactgttttagacttttgtgtaactaaaattttacaaagtaggatacataaatatatatataaagtcgaatctaaaaccgtaattttatcaaacctaacgagttataaattattgtgtattggtttcaggtttaatatatagtgataaacccaaaataaatcagaaagaacaacttaattaaccatataccaacactcaaacgaacaaaaatatgctatgggctctagtgaaattggaactatatatagctacctggttggtgaaaccgacaccaaatcctagcaaaatccgaccggagatgagcatggcgatgttagcagctaagccattgatcagagcaccaaagaggaaagtgaaaccgccaaggatcatggtggttcggcgaccataagccgctgtgagacggctagccactaaggaagctactaagccggcaacataaaggctagatgtgaaggccgtaagaagttggctgtcgtagacgcagtagacattcgtcttagcttccgaagcttttttaagaaccgatggaaagaatttctcaagaaacggcttcatagtcgtcacaccccctttgttaaattataatcaaagataaattaactaatatacttgtttaataaaatgatccttttatgttcttgaatttgtaacctgagattccgatgtcatagccaaaaatgagaccacatgaggcagccacaatgcaactcatgacaactgcggctgtgatcttggcatcaatgtttccggcgctggagacatcaagagccaatcctccaccggccattttgcttatgtcttacgcatgaagtgttttttttttgtttttttttggttgtaaaaccaaatgaacaaagagaatacattaaagataaagaaggtttttaggtgagtcttttagttagttggcgtggtgacttgatggtactagtgtgcagccacttatctatgcatatgtcggttaataacgtcataatctaaaaggacttaagaaactttcaaagcaagaaatgagtttttgatttttgtgtcacataaaaacagtcgctaaacttacttaaaccgattcaaatattagacacacaaataaacatcgaatgttatagtggtgtcaaaatacttaacgtcacaagttatcacgatggtttttcaaactgatgctattttgttcaagtcggtttagtatcgacgtcaaggtcaataagaaccgacgtcatgcgccgcttttttgtagtggctacaccacatattttatttggtgtagtgaactaatttgaattctccaaaacaaaatgtaaatgtaataaactaatttacattcttcatacgcagttagtaataatagatcgagtttggtataacatccttatcgctgacagaaactgatgaaagaatccagatagaagataagaatatgaaaataaatagccacacaaagacaaagtttacataatggtggtttgtcacgtgttctaccattttggtaggaagaattaaagacgtagttttagcctcagtgctttgaattctagtaccgtataaataagtgtgacgacatttaagctgactaagaaactaatttggacattagcatattataaaatttccgagatcatgtagataaatctaaatgtgtaatatttgcatttgtaccatttgcgcatggatccattagaaatataagaaaattgagaatgaaacccatcaattagtttggttcgtataaaacactaattaatatcatatacaataagtccatgactctttgttttgtatatctattaatttctccataatatctttgaggtatgaattccaattcgaacccaccaactcattttcatagaaaggagtctttaacaatagagctattggaacttttcatttgaatccaccacctctttttcactttaacgagtctttaacaatagagttatattggaagttttcataattaatggcttctaaatttaatattaacacattcaaggccacaaacacttgcttgtgtagcttctattgagggctggctctgaatataactcctaattattaattgacttgtaataaggtttagatttttttttcttaagtacgtccaatttctacacctttgtatgtattgaataagcaagcagcttctccaatttctacaccttttgtattgaataagaaaacactttctccaatttctatactatctttgacgtttcaacctaactatactcattacaaatcttcaatacgtattaaagtgtaatgaggtatattgtttaatttgtttgaatggtataaaccatatatatatgtttctctttcgaggatgctactatagatcttgacataattgtaaaacaaaatatatttaggtttcaactagagtgcgattttttaaattcgtgtttgtatgtatatagcaaaatctaaatatagacctacgttaaattttttaaaaaatgttatgatctaaaactaacaaaatgtatagtaatagaacgctatattttaagacttaaatctccaactacctacttatattgactactttttagatttcagtctaccaaaaaatatatatacattcacaagaatatcaatctatctataatacactatataaattatcctaatccctcaccaatctctcaaaacactaaaaccattatcttctccaaggaaagaaaaatgaaatcttcaacaactcaaaccctaatcttcacagtttttctccttctaattccaacatcattcgcagcaccaccaaaactcaaagacagtttcacacaatgtgtaaccgttttcaaaccttccgtcccaatccaaaacttcacatacacgcaacaaaaccctaacttcctcaccattctcaacaactacgtccgcaatctccgttacttcaacggtactacacgtaaaccggtagcgatcgtagccgcggctcacttcactcatatccaagctacaatcaactgcgccaaaaaacttggcctccagctccgtatccgtagtggaggacatgactacgatggaatgtcttatttatcaaccgttgatttcgtcgtcctcgacatgtttaatctacgtgcaattgagatcgatccaaaactagataccgcgtgggtacaatccggtgcaaccctaggagagatctactacaacgttgccaataaaagcaacaacctccgtggtttccccgctggaatctgtcccggtctcggtgctggtgggcattttagcggtggaggttacggaaacatgatgaggaaatacggtttatcgattgataacattatagacgctaagattgttgatgctaacgcaagagtcttggaccggagttccatgggagaagatcttttctgggccttacgaggcggtggagccgctagcttctgtgttgtcttagcttggaagatcaagctagttcctgtcccggagaaagttacagtctttaacgttgaaacaatcggaaacagaggagtaatccctaccgatcttgcagcgaaatggcaagagatcgccgacaagatcgataacgatttgttcataagattaacgttgagctcaagtaacaagacggtcaaggcttctttcatgggaatgtacttaggaaactccgagaagcttctagagattatgaacgccaaattcccggaactcggtctgaacaaaacagagtgcatagaaatgaaatggatcgaatcagttctgttctggcttagtatcccaccgggtacagcaccaacatcggtcatgctaaaccgaatcccacaaaagcaaatctaccttaaaagaaaatccgattacgtgcagaaaccgatctcaaaacccggtctagaatcgatattcaagattctttcagagaacgagaacgtgtcgatggcttggaacccatacggcgggagaatgagcgagattccggcgacagagacggcgtttcctcaccgagcagggaacatgtttaagattcagtactcatctaactggttcgtgccaggtgaagaagcggctagcgattgcttgagccaaacggaaagagtgttcgaggcaatgagcccttacgtgtctaagaatccaagagaagcgtttttgaactacagagatattgacattgggaagaacttgaactcaacgtacgaggaaggtaaagtgtatggagttaagtattttaagaataacttcgagaggttggttcaggttaagactagagttgatccggacaacattttccggtacgagcagagcattccagtgcacgttagccgttagagacattcttattatttgtgtcttgtattagtaatgttaaataatataatcttgtgggagaggagataattagtatttttttttgtaacatcaattaaatgttatttaaatttgtatcttttgttgttattagagataaatgtaatattcttgtttaattaaatctgaaaatataagtgtcaaaaaggaaacaatgtattgttaattttgctcttttttaaatttatttatttaaaatccaaaaattaaaaataaaatccaaaaattatgattgtagataattatgaaaatgcccattagaccattacaatatatttgccaaaattataaatagattttgatttttatttggaagaagaatttgttggatttgaagttttaaaattaactcaaagcatgattggtttatgtttattagactattaacaaatctaatcttttgacttagatttgctaagtgcgttgacccaaccaaaaaacaaaaacaaaaaaatctgctaagtgggctgaacttgggcctcataactcactaaacgacaaaacaaaaattaggaattgtctttttcgaagaaaaaaatcggaaacctgtgtatgtgacctttgtggttgtgggcatcgacgatcgtcatcttccttctggttctttctgttctctcaaaaccatttggtcaaaccattatctcgaagtcgtctctgtagaactaatggagccgcctgaaggttcttttactacgatactatttgtgatttcataagtttcataaatcacccaccaagtgttcgatgatattccccactcaaatttaatgacttgaaagctttgtttatgttgatgattgtcaatgatatacagatgggaaggttaatttcgccaaagagctttatggagaaagtttgcagatttcgaaacttagtgaggactctttactttcataggtcataaacttagtgacaattgacaaagtttttgcttttctgattagaactcttacaaatttgtttctgatagtttagttgaggtcttttgtttgctcagattgtttaggcttagagcattgtattgctaagtttttgctttccatgtctctctgataagaactatcttttggtttaggtaataaagatcatggtcttgagaatttagatgatcccttttacggaagttcagatgaagattatagtgaagctcgcgtgttggacaatgagaatgagcagagacgtgtgaaattccactcggtattcttttttgctttatcattctctcagtgtaaaatgtttgttcaattttctccatgtctgttttttttttaatggtaaatcgaaatcgtaggctggatatcgtgatgggattgttgtcgggaaagaagctattgcgcaggaaggttataactttggctataaggaatcagttcttgctggttacaagtttggtattgttagaggtgtttctaggtaattacaagtctgttgcgatgtgttacatatccgatgaagcttatcgagtagtagtaagttatacattttctgttttgactctttttgaagtgcgctggctttcctcccggttgagtttagagaaaagcttatcgatgaacaagaaactagagagaagtttcagaaattacacagttctgtgcatgctctttcgacggaagtcgcaatgaagcagttctatgaaactttgactacgaaacaaggggaagagaagagtggagaagaagggcccgactcttgttctgtttcaggttcttgttcaggtgttaatgtcacagccgacttaggaagctatgttactgagctaagttctcttcttgacaaatctccaacgattgaagtgaaatttgatacatagacgaggcttgttcagtagacgttattcacaagcaaaagcaagattagcgtccagtttccaaaaactgtttgtaagctcggttctgcctcagcgagtagcgacggctaaatcatgctttctgcctcggcaatttcattcaaccttctctaccaattgtagccgcactcgccgagctaagaaattactctgttaatttgggttgacaaaccaacaaagtactttgtcagcaagattatggctagttatttgttaatgttataaaatggactaatcaataaagattttgaattaaaataaattgtaacaaaggcattccatatatgcaagctttatctcgatgcaatgcaaatcattggaataacttaccaagaaacattatcagacgtgatcttatccgatctagagtttgacagaacttaaagaagtcttttaagtcacttgatacaacaatcttcttctactcataactactgtctttgaagtatttatttagaaagaaaaaacaactctggcacaaaatgtttgatttctcgtcgagcaaatgttaaagcggattcatatgcctaaagaagtaagatgtcgagagcaagtttcgagacttgcttcgttcaaaagaggcctaaaacagctcaagaactttagtcttactagggtgtatcatttctggtgttgcttcaaacagagacttccacaagtgaaaaatgctagactctatagcttctctcgcaaacccattcgcctccgatacatccttgacagatctcaaatgctcctctagcttcttaagctcttggttgtagtgtttaaaaccagacggtttcactaagccaccgatttcaagaattgaaacaatgcgagccaaaactctgactccaaaagaaaattgataggaaaacgttttgaactgttcccattggctcgacttgccaccatccttatagactccattcttgggtttgatatatgtttcaaacacatactgaataacataaaacactcttcctaccacgggaccgtcaaagtttctcttccctgcatacttgaatagccaaaaacagaagactaacatagaacgtatgcatctgataataagaacattgcttcagcgacaaagagagagagctcaactcctagttgtacagcctcctctttctgtttatgtttctgcttctcttttgtcctgcacaaattgatacttttcactttctaacacgagtaagaaaataaaccttcaaaagggaatgatgaagatcactaaccctaaagtgtatggagaatatcttgactcttgtagtaatcttttgttgtgtcggagaactcggtcagtcatcgacattaattcaaattgtttcgagataatcgacatgtcagaggaactcattgaagaagaagactcgtgatgcaatttttgtgggctttccaatgcacaaagattaataaacaacaaattctagtcagaaaaatcagatgcaaattccccaaagcatttagttctatggatcggtcaacagagagaataaccctagatatggtaactttagccttcaatttgaaatcaaagagaataaccatagatcgtaactttagcctacttgaaaccttttaaatcaatatgaaatccaaattcctaaaaaaaaaacaaatcatggaaaaagaaggtatcatgcactgacctcatcatcgttgtagtttaaaacctaaatgtatcttactaatcctttcctattctaagctttttctttaacctggacaacaaataatagaaaacaaaaggcttaattatggatgtttttttttttttttttttgacgattaaaaataaaccagctctatatataatttaataaacttttttgtttgttttataaaaaaaccaccaaatatatttatttatttttaaagaaaaaccaccaaatcatttttttttgataaaaggttaaattttacaccattttcgatttttgacagatattacaaagaatactagaaacggaataaagcaacctacataacttaaaaacaccgattccgagtccgcaaagctcagaaatttgcgtggttgccacagaaccgaagaactggaatcctcatcctagttaccacgagcatatctatttgaggcccgtccacaaaacctcaagatagaaacctacaacttctccgagaactaacgcaaaaacgcattgacaatcatggacttctacaccaactcaagagaaagcgttgccaaacagacctattcgccaaatcttttcaaattgaatagaaccaccaatctttattttaaagaaatgaccatatgatgtaacttttcaaattttacctaggcatgcttttttgagcaggcaatttctcttcagctccagcagttctctccgcaaggaaaggatcacagtttggcatgcataatgaattagggatcgtcttcgccaaagaactcttacaaatttgttctcattgtttagcggagttcttgtgtttgcttggattgtttaggcttagagcatcctcaatggaaggtttttagatagttcttatgcatatgaaagtagaatatgaagagagagaattagaaaaaactcttagctaagaggcttgatgatttatatatgagacacatgtctcttttatattggttcaattttctaatatggttaatgtgctggctttcctcccggatgagcttagagaaaagcttatcgatgagcaagaaactagagagaagtttcagagattacacagttatgtgcatgctctttcgactgaagtcgcaatgaagcggttttatggagctctgactacaaaggaagggatttctggttcgggtgttaatgccacaagtgactggggtagctatgttactgagctaagctctcttcttgaaaaatctcctaagattgaagttaaattggacacatagatgagacttgttctctaatggttattgccaagcaatagcaagattagtagtgtctagtttccataccaaactgttggtaagcgcggttctgtttggtctagtaaaacttgcttgccttgatatgaattatttgtaatttcgactaaatctcacttgttattcaactgatatgttgcttataaagattccttttgggagttggggactacagtaagtcgggacgtagcgtaacctgacatcaccttcgtgtgtttttaacgccaatatcatgcatgacacagaaaacaaagttcgtttcacttgtcatgtaataaaatgccttcgtctgtttttgttcgttcataacttatatctcaaatcatagttccaatcctcataatccacaaacgtcggtttagatcatactaatgttttagtcgttttacaatctaaactgaatactaaaccgactaaattcgataccaatagctctgggcatttgggtattcgggtcgcgtttgggtcatgtctttcgggttggattcggttcggatttacttcagatctgaataattcgggtatttgttgaaaaactcgataaataaccaaaactatttcggattgaatactacttacccaaactttatccaaatatatccaaatatacataaaagtatccgtaaaacccaaaagacctgaattataacaagtttttctttaagataataacatgaaacaagatgtaaaccttattttgagcttgttccataatccaatcaatgtatatatgtcctcatgtgtatatatatgttcgggtataaaaaatactcacggatatcgggttctgttcgggtaatacccgatacccacaattatttgaaaacagaatccgatcaggtaattagttggaaccgaagtagaacggattcagatatttcaggtcagattcggttcggttcttcgagttcagatataatgcccaggcctactaaacccgatgcataaacgacccaatatcttcttcttgttcacttgatttattaagctccaacaattaattgattattcttattcaacaccattaatgtataacataactctcatccaacacctacttaatttgatgatctaatgaagttgatgttgagtaaaaaagaaaacaccaatatttcctctgttttttttcctccttaaattaaaaaaaaaaaaccagaaaaccgaatgatccataaagaaatcgggtcgggtcagatctagcggccgactcctcctatacacagatccagaagcacacacacaaccgtataaagtttaatctctgccggaagcgcgtcgccgatcacgcgcattcatctgcatcttctcctttctctcacctaatcacatttttgtactttaatggcgaaatcgatctaattcgtccgtgaacaactataaccaaactcttcccccaaaaaaccttgcttcaaccatacttcacacaaatccttcaccaccactcttctcgcgtctctgtgtatatatatatttggtagagagtgctcatcgacgacgacaatgctaaaatggctcaatttagacaatcgggaacagatagatttagtgttcgcggcaacggcggaggagcttcttctgatcacgtaacgatcgggatccgaaacggcgtcggtggagctactaaaggtaacaacaacaggtggcgaagatccgtgagagctgataagattcgtcgacttggaatcggttctgttgtgtttgttctttgctttgtgcttcttgttactgttctcgcttactgttatatctctgggtttacttataatagctacgatgataaaggtcagttttttttttgttctctggatctttctgttgaagttccttagattgtttttgattagagttgtgttgtgggcaggatttgttgattcatatgagggtgattttttgacgaatgtgactagattagatccttcgaaagtgcttgagtttggtcaaggttcagtgattcatggacgagattcgaggtattgggataaagatgatagaagaagagatgatgattataatgaggatgaagtgaaaaaggatgtacaacaagttcataatcctgtgaaggggattggtttgtataatgaagctggaaggaatgagttgaagatgtatgaagctgagtataaagctacgcttgggaaaggtggtcatgagaaaaacaatgagggagttgatagggatcgtgaggatgatgatgcgattgattctcatgatggggatgaatatgttgattctgggcatgaggatgataatgaagaggtgcataaagagaaggttgttcatttggtgaccaagcaagagaatgtggacaaggatgatggaggtgtttcaaaaatgtcacttggggattcttctcttgttagtaagggtggtaagtctgggaaaacatcacgatctgatactaaaagaagaggtcgtcgcagatcttcaggtgataatttgtgatcagcttggttgtgaagtcagtgtgggtatttgctgctcatcattcatttgttgttcatatctttcaggttcatgtgaaatgaagctattgaattctagtcaaccaatagtggagcccttgaatactcgaaaatctgctagattttctttacagtacatagagaaggaagataagcctgatgaagaagaacagtgggagcctagatttgcaggtcatcagagtttacaggagcgagaagattccttcgtggctcaagacaagaaaattcattgcggctttgtcaaaggtcccaaaggatcttcaagcactgggtttgacctgacagaagatgatactaattatatcagtagatgccacatcgctgttagctcatgcatctttggcaattctgatcgtttgaggcctcctgccaacaaaatggtatgcttctgtccatcgtttagattatgtttatgttgtggtcgtttcttttccatgttaagatttggaaactatgaccagtgagttgtgtatgtttagagtagcctacctcccatacgttggccctaagcttacatagtcagtaacagagacttgcgagttgcgacttgagttatctttgagttcgagtggcatgtgttgaactgtggatgttgttgtagactagttgctgggaataagattaaattgagcagttttgagctaggtacacaaattgtgtgttactaatatttagatagctggcatctgaaagttggttttgtgggtgttttcatcaaccacggacagccatctgttagaatcgcttcctcaagaacctcagaagacatatttgatctgttgtgttcgtattttccttttgattcatggctatgctatttttgttacctatgctaaccttagttcttttcttttttcatttagataagtcggttgtcgagaaaaaatgtatgcttcattgtgttcgtggacgagattaccatgcaaacactttctgcagaaggacatgccccagacagagcaggattcattggtctgtggaagttggttgtcgtgaagaatcttccttacgcagatatgcggagggtaggaaaaataccaaaaatgttgccacaccgacttttcccatcagcaaggtgagtctcatgtcataacgataactctcattttgatgggtctgactagcacatatgttttccagcagttgcatgtagagaacaggtcagtgactcataattaagtataattgaaaaaagtaccggaaataacatcagttataaagcatgtgtatacttttcattctgagctacaaagacaaaggttaaatgtgaaatacattgacgattagatcttgaaactggttctctggaaatatgctttggaatgtgacatgcaatacccgctgaaaattttctcaagtcagaccagatctgtcatttgtatcaacccacacacagaaactcacatggtttatattcttccaggtactcaatctggttggacagcaagttacgacttcagttggacccactactcattctggagtacttcctatggcgtaaaggtcacgagtatgctatatccaatcactatgaccgtcattgtttatgggaagaggttgcacaaaacaagaagctgaacaagtataaccatactgttattaatcaacagtttcagttttacaaggctgatgggctgaccagattcaatgcttcggatccgttcaagcttcttcctagcagtaaggatctgtgtattgactgatataaaccaggattagtaccttccttggagagtgttttcattagttagtgtctttaactgctaatgggtttactcataacaagcacacagggttttgaaatcttatctagtattataaggttcatgattattcacactagcaactggatccttaggaacagtatcttcatagttattccagcatttaggttatatgcattttgtgggtcgaatcattacctggtgttggtcatgcgtacaatacttttgtacggattgcttgcttataaatttacaatcgtctttttttgtttttatcttatctgaagatgttccagaggggtctttcatagtacgagctcatactcccatgtcgaacctattctcatgtctttggttcaatgaagtggaacgcttcactccccgggaccagctgagctttgcctatacttaccagaaactaagaaggatgaatcctgataaaccatttaatcttcacatgttcaaggtaaagatctcttttttgaaaagtcttcatgattatctaaactattgatttgcctccatgtgtgtaagctgggtttagaattgtaatgtcaaaagtgctcttgacatgatatgaactgaagtcctcctataaactagtaatagagccaaacatcgaatgcagtaatttgtctagtcatggagcccgtggtaatatgtaatggttgtaacctgagtcattgatattggtcatgaaactatgtaacgattgaactgtcagtagaaaatgataataccaggtcgaatatgtgttgaatccctgttggttagtataagaaccatatcctatggaacagagagggtctcaaaaccgatgctcttgttcatggataaaacacaaccgatggatttgtggaattatgaattaggttcatatttaggtctgagtagttacgagtatcgagaaccagatttctaagtttccttatgttttgtttgtttcctcatctggatttcaggactgtgagagaagaaaaattgcaaagttgttccgtcacagatcagacgagaagcgaaaccttatacaagcagcaatacaataaacaactctatgttgtaccaagctgtatccgtcgtgtatagtactttgagactctactgctatattcacatggagaaaagccactttttctttgctccagtgacttggaaactgctacaagaagatccagatgttgttgtacattgggaccgagtctgttgcttgtggcgacaaccagatgaggtatatacgaaaacaatgtgaggtgatttgtagatttaggcggcgttaagagttgaaactttgaaagaagaagaaaaggggcttgattagattcatgaaagggttcctccatttttattcaattcattgcttttgtttttgtctgtatccctatcgtgcaacaatttactcttagaaaatatactcatcccctatatattatttataaatgatttctctaagttcgctgatatcttactctctcatgtttactcacacaaacattcacataacacggtataatctacaaaagacaagattatgctcttaggagtgttttcccggttaggaagaaaatcttaattttgtcaagtttaaaactggtgttcaattttaacttttaagatctttttgattttttaaaaattcatatgaggttactatgtactcgataatatcggattctgatctgggcgaattgatcaggagagctaatctaatcgtgtgagacagagactcctatgatcagtaaacattgtttaagagacgttagatcgtagtattcattgatgttgtgaaatccgaagctgataagtgttttggaggtaaagtgattatatttggaggagacgttagacaaattttatcggtagttaagtctattggtagaggaagcgttggaggagacatttgacaaattttatcgtagtatttggtgaaaggtaaaatttccagatccgaattcgatttttcttagaaacaataaacacatttgtttaagaggtcagttgggacttggcccaattgatttacatggtagtcagaaacacattatgagattatgagagtaaatataaacatgataatgtgatgagagtttagaattggaagaagttatatttactctcataatcataagctttgggttacatatgtttatatagtaacatggttttctaaactaagatataaataaatctatacatatcaatataataaatattacaatatcttcatattaacttgtggatcttctagatccttctacacacaggtcaagaaaagatatatcttagttcatatagcatcgaggtgttggtcatcaacaaaaaaaatgggatggtttatacaccaattttttttaataacgtaaaaatatctggattgccaaaccatatattagtattgaagatcggtgttcctattatggtgctccagagtatcaatcttaaaagttatttgtgtaattgtacaaggttgcagatcgctcaactagcgaatcatgttatcgaggctaaatcataactggtactatgattggagagatagttctaatacctaggatattcctaacccctatgagccaaagtttctatttgggatgcagcgtagacaattctcaatcaccgttgctttcataataactattagtaaaagtcaagggcatactttaaccaaagttgggttgtacctgtctaggctagtttttttcatggacaattatatgtgactgatattttctgtttttttttttttggttttgagtttttgttttctttcctatatcatatcttttactgagtcaaaatgtgtttttagaaggtcgtcaacttggtattatggataacaatatcccacattcatttcagatagttggttaattcattcattgccaattagttttgaattggaagtaatatagtaccaaagcatgatccacgcatgaatataccaggaccaataactagagccaccatctcgaagaaacgtatcagagataacaatatctcatagtggaaaggtcatgtcttgactaatatttaagataaataggtcgatccactagttatcatttcacaaaaataccttaatttgtagatttaataattacaatctaacatcttattatgacaacacttaaaagttcacatgtaaataaaatttaacttcttattagaacttgtgacaacactttaagttttggatctgaagttagatgtgttcacaacttttctatgacttgactagcatgtcatcgatatatattgagtggtacgtggtttcataattctttaatttagaccaaaaagtattaacttataataatatatatagcattgtttaatttagacataagggagtaatgaattttacaataggcaatagccctcctgggtatccctagatccaaatggtgccgaaagaccgatcgccgactacaaattctacaagttttattacatccaataaaacttaaagtgttatactggtgcatagtcgcattttttttttatctcttgttccaatataaggcagataaaggtcacgaatgatgatgaccttggactttaaatttgtcaatacccattcattgaagtgttcggagaaaaagtccacgtacttcgtttatcgatcatgattcgtgacacgttataatcaggtattactagctcgattaatagttctttatcatgcagattactgagacatctcatttcattttccttgaaatatattacaatatctgatttcaattatgggatagtcgtgtctaacttggacgttatttttctctggtgtatattggtcatgcctttttaggagtcataaagcttttatccacggaccgcataaaagttttaattcactacaaaaagaattaattttattgtctacccaaaaaaaaaaattaattgtattgatatatattatttcgtcactatgccaaaaaatctgtaacaataaaaatattatgacgaatttgtgattaactataaacagttgcaatatacttgtcataatttttttccgtatcaaaaacgttacaaatattgtgacgttatatttggtaactgttttatcacaaacagcgacgaaaactaaaaataacaataccgtcatataacttccctctctccctcggcgactacagaggcgaccaacaaaactaatttcctgtttcgttttttacaggctgccggcatttgtcggtagttttttttgcttttctacttcttttttcttctgtttttaataattgtgatgggagacattttcatcaatcggatttctgttcgatctactttctgatttcgaatagtgacagtgtttattgtcatgtttagaacagtgacaaacagttaccattttcaagtaaactcgttgccatattcgaatcagaaaattcatcccatcaatgtctcttttcccatgtcatgtcgattcatttgaatcgtgatgtattcccttacctaaagtttggttttggtggttgctctcaccaatgtaatctccggttctcaaccgatgaaatttcttcaaatctatggtttggagaagtcatttgggtatttgatccaggaatcaatagacaaatttttttgagtgaaggaactggcatcgacgataatttcctccttccaaagacatggtccaatgatggtgatgtactcgttgtccaacgatccgtttattcatattcatggtccgatgatgatgatgtacttgctgtccaacgatccatttattcaagttctatggaaaaagaaatcatgatcactaaccggcgacgatggatagagtgttataaaagacatgatcgagattcatctcaagcaatatatcggtgtgttcgattaatcaaagtgatgcagaaagcatttgggagtttcatctataaaatattagccttttacgagtatatgacaaggggacttaacagatttcatctgttgcctgtaagacttccgtttggaaagcagggtcacttccacattttcatcgaaattgtgtataatttccattattttatttaatggttgtatttgaataggttcatgtatcatgtattattatgtaatactcttataatctaatatatttggtttggtgttaaaaaaaaaataataccgtcatatttaccgactataatgagagttttaaaaccgtcatatatcgtgactaacaaaatgtcacagttctgtcactaattaaaacgaaaatatagttattgaatcattactagtgatgattaaaaaatcgttacttaatcatcacatttatcgactaaaaaaatcgtcaaaaaatcgtcatattttgtgactatcaaacatcacatttctgtcacatttgaaagcgaaaatatagttactaattcgttactagtaatgactaaaaaagcgtcacaattatgtcatttcttacaatggagctatagtcactaaatcatcagaattaccggttaaatcatcgtctccaattgttatgatttaaaaatgcaatgttcgtttgcctgtcactggtgactgaaagcagcgacagcatattggagtacataggccggtttagattaattatatttgttcggtttagtattggttagatcttataccacacttgtatataacagagtaattgtacagtgtaattattaagatgaatgagaactttctctttccgtaacaaactctctcgatcttcatcttcttcatcgatccttttctatctttgtaatatggttagactatacagaaactttttctcctgtggctaagatggctacagtcaagttattgttgaaggtctcagcttctaaacagtggtttctgaatcagcttgatatttctaatgcgtttctcaatggtgacttggacgaagaaatttatatgaaacttcctgatggttatgctgatattaagggggactccttacctcctaatgctgtttgcaggctaaagaagtctatttatggtctgaagcaagcatctcgtcagtggttcaagaaattttctgagtctttgctgaaacttggttttatgaaacaacagggagatcacacattgtttgttcgttgtcaaggttcagattttattgccctcttggtgtatgttgatgacattgtcatagctagtaccacggagtctcttgctatttcattaacagaggcattaaaagaaagcttcaaactgagagagctgggaccactgaagtattttttgggtctggaagttgctcgcaccactgaaggtatttctctttgtcaaagaaaatatgctttggaattgcttacttctgctggtatgttagactgtaaaccgtctactatacctatgacaccaaatctgagattatccaaggcagatggtgttttgttagaagatgctgaaatgtatagaagcttggttggtcgtttgatgtatctcaccattacacgtccggatattacctttgctgtaaacaagctttgtcagttttcttctgctccaagaacatctcatcttacagctgtgtataaagttttgcagtacattaagggtacagtgggtcaaggccttttctactctgcagattctgatcttacattgaagggttacacagatgcagattggggtacttgcccagatagtcggagatctacaactggtttcaccatgtttgttggctcttctctaatctcctggcgctcgaagaaacaacccactgtttctcggtcatctgctgaagcagaatatagagctttggctctggcttcttgtgaaatggcatggttgttcactttgcttatagctttacgggttgctacttctgttcccattctatactcggacagtacagcagccgtatacattgccatcaaccctgtctttcatgagcgcaccaagcatatcgaaatcgactgccacacggttcgagacaagcttgataatggtcagctgaagcttctacatgtcaaaacagaagaccaggtagctgacattcttaccaaacctctattccctcaccagttcactcatttactgtccaagatgagtctacacaacatctatgcctcatcttgagggggactattggagtacataggccggtttagattaattatatttgttcggtttagtattggttagatcttataccacacttgtatataacagagtaattgtacagtgtaattattaagatgaatgagaactttctctttccgtaacaaactctctcgatcttcatcttcttcatcgatccttttctatctttgtaatacagcaaccaaaaattgtttattttcccgtcgttggttcagcgacaaattgcagcgaaagttgacagcgaccagcgactgtaattttcattcgctaaattttagtgatcaatagcatgtttttgcgattagtcgctaagattggtcgttgaatccatcgataagcaaacgaacaacttagtgataaaaaatataatttaaatataaaaaaaataaattaatttaaattaaacttgattaaataaattaaactgaattagatttgaataaatcttataaaattaagttaaaataaaatattatataattaaattaaaataaatcttataaaattaagtttaaaaacatacatacattaaaataaaatataattaaattaaaataaatcttattaaattaagttaaaataaattaaattcaaataactcaaagtaattatagtctaattaagtttgataaaattaaagtaatcgatgaacaccgtttttgatcttcgatggtatatagtaacagtaagagatagagattattgcagaaccccatactttaacgaagctcttcagttcttcctccattttttttttttttttgttgttgctcagtttctgcaataacctagttttaacttggtggttgtttgacgtgttccaaacgtaatcgattgaagagaaataatgtatttttttaaaaagcaatctaataggagatcactcaaaatacaatatcgctggcatcggattctttgagttaataacgtatttgtagcttccaaatacacaaacacttttctcttaagtagatcgaagtaaaatcttttgtcttattgtactaaatctatttcaattcactaacagcctgttaattgtattcatatgactcgtatcatattatcacacaattctttcatatacggacaacctggagaaatgtttaaggataagtcagccataatttttaatcacaattgtttttttttttatagagaaaacttacatgcacaacagttgtgtgtatcgtcatcctttattgtattgtaccacatgtgaaagtggagatccacgatggttgttatcatcaacaacatcctctcatcaggagtggcacaataatattttattttgaaactttgtttattacggcatagtcaaacagtaaaactttggaaaaataattcgttgagcatggttagccacttagccttatagaaaaagaattaagggagaggtgagattgggggttcgataatttattaaaaagtaataaagtagaattaataatcacgtagattattaaattaaacacgtagaccacaaaataaaaacgtgagattcatattaattaacgtgcaccattgtcttctctgcttcattatcgggttgtagaatagttatacatgcagatgcatgagatgttaagcatgaaagcgccatttatttgttttactaatgctatagtagaataatctatcatagcatacggaaaaaacgctatctgttgtaaatcagattcgatttaacaccaatttgctttcttcgattgttacaattacgagataaagaagaaactaagaacacgagatttacgagttccctctgttgcaattcgcaacgttgaggtacgtctcggtgaggatttgctcctcacaagccaaatccactatctaatgttttaagaggttacaatggtgctcttcaatggagatctctcaccaactctcgtttacaaatctctctctaagaagatgaagaagaagaagataaagaacaagaagaaacctgagaattactctctctcacttctctctctctaactctcaccaagaacccagaattgaggataagaatctgttttgattacactcacctctcgactctagtaaccaagagaaactaaagcggtgagctctgtgaataacaaactttcacacgtattaacccacacgtgtgacttttcccttattcccttgagagtctctctttgaactagaagctttcacttgaacatgtcattccaatactctagttgctgtagaggctttaccaaacgttactctgcttcttcatgtttttctccatgatgatttagagtctcaaggttgaatcatacttttaacactatcgtttatgaaaacgctattgatgatatttaatagtttttttctcttactaataatgtagatatttcttgtagtgcaaatgtggacattttaagatatgagaagagcaaacaaatggaaacattcattgtaacaaggttttgggtttaataaattttacatgcatttcaaaaaaaaaaaagcgaaaagagaagagcaaacaaatgttgcttctccaacaagtaactcaagatctctcttgtaccctcgcaaacaaacctcctttgattctaagtgtcatcgacaatagaatctcaggacgctccttccctggaacctcaaccacaaaccgctctaaaaccgcagcgactatcgatttcatttgaatataagccatatccttccctacacacatccttggtccagcatgaaacgcaggaaacttagaaggatcctcacctctaaaacaaccatttgtttcatcaatccacctctcaggatcaaaacgatcacaatctttcccccaaatactctccatccttcccattgcaaatatgttataggttattgcccaacctttacctacaaatgtcccatcaggcaatacattgtcctcagcacaactctttatgtccactggcacaggtggatacaatcttaaagattcagttatagcagcgtgaagataattcatcatcttaagatgttcaaacccgtaaacttccccgattcgcttcccagttcgtgcgcgaatcgagtttagctcttgcagaatcttatcttccacctctggatgcatagagagtaaccaaaagaaccagctcaaagcagaggaagtcgtgtctcgtcccgcgaggatgaaacttatgacaatgtcacggagtatctccggcgaattcatctcctccttgctgataaaccgagaaagcaaatcttccttgtggtcacttgatcttccttgatcaatcctgttacgcacgatctcgtctgcgaatttatggacggtcgcgattgattctctcagaactctctctgatccaatgttaagtttctttttaatcctccatgcacacgaagccaccgaccgaaaccgctgcgatataatcgtcgcagcggtttcgaaggcccgcatgaagtttacaccgaccgctccgtcgtggccgagacaagcgcaatcaacattgaaagctaatttacagatgttatcgaacgcgaatcgctccaatatgtcttggagatctatcaactttccggtggttgcagcttctactaacaccggaacaagcctggtgttgatttcgacggtgacgttgctcataacaaagtcacggagagatttagtactaaattcgtagctcgccgtcttcctctgtttccaccacatatcaccatcggaattaaaaatcccgtggccgagaaaatcctcaagaaccgaagtaaactgttggcctttagggaagctctcgaatttggtcttgagcatatactcgacgttagatggattcgccgtcatgatgagttgttgcttccctggtcgccggaaaatcgccgtttgggttggacatcgagaaagagtctccaccgtccagtcgaggaatcggtgacggttattcacaagaccaggaaagcttccgacgattggatacgacttgaaaccaaattctgaagaagatttcttggtgaagaagataaagaagatggagatagggaaacagaggaggaagatgaatattaagagcgccattttctttagtttgtcttcttcgttttaggttttgaacataataaatagtttgtcgtcttctttgacttgccttctttacttcctcgcacgtaatctgatacgaactaaacgtgaacattgtacgaactaaacgtgaatattaaatctcgatcatgctatgacttgatacaaaatagccgttaatcatattttccagtttaacttaatcagctttagctgttgtgattagaaaagattgaactttcaaaatcatttaggattaaagataaattgactcttcaactggattttttaagccatcatcatgtaccgtatcaacagtgttttacaatttataaccataaatacaatttttatagctactagatattgacccgcggtacaccgcgggtgtatatgttcattgaaaagttatagatgttttttataataattattatttgtatatgaataatatattcttgacacataatttttatctatgtaaagcttgggtaattcatgttttatattttgatatttgttgtatattagttttttattaaaattctgtattttatttttttaatttgtggtttgggttttttttagagataataaagatttaaaacttgtattatctaatgaatgtgtaatgtgtaaagtgaaaattaatattgtatatttaatttgttatatttggtttaattagaaaaaaaaaaagaaatcgaagtatattttcttctcttaccagagactgacccgcggtacaccgcaggttgatatttttgttagaaagttaaaaaatttattttagttaatattatttatatatgaatatcatattacgaggtatatcatgtacctatatttttatcaaaaattaaagttttgtttttaagatgatctatagatatatgctattgtttgttttatgtatgatacaactgggaacgatttttataactaaaagatttgaaattttaacttttgttaatattgttagttttggttagtttttaaatttgtataattgtatttcgattgttaattctaagatttcacccatagtatataccattccgtattaatattgactcaaacccgtccactcatataaccccgtctcgtaaaattaaatatcattttcttgttttcttataaagttcaaatatttgtaatatttgaaacttcaaaacacttttaatatcgatccaaactttataattgtattttgattgttatatctacgatttcacccgtagtctaccgtcctgtattaatatatttttaaatatttataatatttaaactttttataaagttaaaatatttataatatttaaaacttcattaaatttttaaaattataaatatttaaaatgttttataaatttaatattttaaacgttttaaattttctaatatttaacttttaataaattttaaatatttataatattctgaaaatatttaaaacttctatttatttaaaataaagaaccatagtaaaccttgataacacttataattttggatgcctgataaatcaagctttttgcttgttcatattcaaatcattttggtctttttttatagtatgactctcaaccattggctagttttttaaacattgtgggaccgtttatacatatttgttttctttatcgattgaataatatatttttattttaaaattttttgaattacatcatatgcagaaaatatataatactttttaaccatatgtattttatatataaaagaaaaacaaattagatataagaacaaataaaagtgaaaaaaaaaatcatttatttataattaatgtagatagagaattttaagaaattagcaattaattaaatctaattcaataaatataagatttaattaaggatataaattttgaataatatatttttttagatagattttgtagggactaaaaagtaaatagaggaaaaagttaattcaagtatttaatgcaaattttggtttgtaagtttttaggaatataatatttggttgagatagaatttgtaaagatttgtatgttattagtaaatagtagagagatttttggcaaaaaatatatatgtagataataccatttaccaacatatgtttgtcaatgatattcatacatgttatcgttataaacagacatattccaaagagccccaagaggtatataagaattcaaatttacaaaaagaataaaatatatatatatatatatatatatatatatagatatataaattccaaatgaacaaaaaaaattttaaaagaaaaggtacgcataaaaaataaacattaaccaaaaaaagaaaaataaacaaatgataagaatgcattactgtattaaacttaaacccttgtaatgagcgtgttaagttcttgattatataggaaaaggttctggttctatggtttattatactacaaaaataataattttattgagacataaaattttgggtagttttgagaactactctgtttttaagtttttgtttgaaaaatacacttatgctattttaaatttgtccagattttaaattaaaagttgtatttaaaaaaatcaaaaataaattcaaacttaacagaaaaaaataataaacaaaattcaaaataattaaactcggatttaagctttattaactgaaaatatatagtcaaagaacatggcatctggagcaatggatccataacgattaaaaaaataaaattaatctttatatataatagttaaatcatgttttcatctccaataacgattagcttgaaaaacataaaattaatctatcattagaatgttgttgtgaatggtgtagacgtaagctatcattagaacatgtatgtgtttgtgtctttggactgtgtagtgttcttaaggttatcctttaatccaattttaagaagcaaaccagactgtacaacttcaagctatcgcatatgtattacgtattgcaaatccaagtcttgtaattattctacctatatttccaaaaatatatatttactcccagaccattgcttgtgtcttagattaacttggaccagttatacaatttcctcgtcaactaatttaccacatgatgcactaaaattgttaatttcatcaaatattaacaatatataatcacaaactgaaaacattagtaaatatttttcacaaataatttagtagcttagcattaatttagtatacatatacgtataatttacttttttataattattattaattttttgagacaattttcgtaattttatatattaaaaaatagttttgttgtttaaaagtatttttcaaacaatactcataaataggatattttaccaaatttactctaaaattttcgtcacaaatctacaacattttagttagatattatatctaattttatttgtcacaaatttatagtatctcttgttatgatatagtgacaaaaaaatcatgacgaagatttgtcacatttagtgattaacatgcgacaatgatatcaattgtaactattgtaacaatattgtggccaatatgttatcccaaattagttaccaatttgtaacggatatgcaacttgtcgtttgagacattagagtgagtaaatattagtcacaaatttgtgatagattaagatattatcctaaatccattagcgcaaaccctaattctaatttaaaaaaaactattcaagagatattagggttttcctttttataattttgtgccttttacacctagaaagaaaacactgtgagagaaagagtagaaaaaaccgccggtaaaatcaatgacagattttaccagtcttgggaaatggtgtaaacggaaggttttagttatcactagtaaccattcgagattatagttatgtaataacgagttctaaaattaaaaagttatgttaaacacaaattatgactattttgagatgatgttttagtctgtaattaagacagttttgttacttttgtgtcgtaactatctttgacgaaataattactataataggttatgaacccccacaatatcatggagaaactcattttcaacaaatatttgtatttatgtattaaattacaaaaatttatttgattgtgtttatgtattagattattgtgaagatatatacaaatattttccaaatattttaaaaaatatttatgaataaaattgtaagaaaaaagaattatgaagttaaaaatattttcattgacaaatacataagaaaaatgtataataaagagaagatagtccaaaaaacttctagaaaatgataaaattaaattccatactgagagaatcagattaaacttgattaatcttgaccaagttcgatcggacaggttcatatgaaattacaaattttctcctaaatttgggatttgcataatttcttcttcttcatctaatcgaatggatcatacgtttgatcatacttttgtgaaggttaatggaattagtatgtacgtcgccgagaaaagtacttccgtcgttggatgaaaaattgtgacaaaaaatgcaatgaaatatagttaagagatgaaaagatgcaactataaagatacaaccataaactgaaaaatgcaactgtaattgaacaatataaatgtttaaaaaataaccataaatattccatcaaaaagatgccctaaaaatacaaccagaaaaaataatcgtctatacttttacaaaaaattgcgataaaaaaataaccaaaaaaataacgatcagttttttaacggaaaattacgataaaatgaaataaagaaaaaaataatcctcaatatataaatgaaaaattgcaataaaaagatttaagaaaacaaaataagttgaaaaataataaccgtaaatatttcaacaaaaatatgcgattaaaagaaacaaccaggtaaaataaccgtcaatattataacggaaacttgcgataaaaaaaacacagctagaaagaaatagtccttagtattttaccggaaagttttaataaaatgacagagtaaaaaaatataaacagaaagttgtaataagaaagcacaactaaacaaaataagttgaaaaaaataatcgtaaaattttaatgaaaatatgcgatggaaagacacatccgggaaaactaattgacaatattttaacggaaagttacaataaaaagacacaaccacaaaaacataaccgttagtattttaacggaaagttgcgataaaatgacacaaagaaaaaaaataaccatcaaatatataaacggaaatttacagtaaaaagatacaaccaaacaaaatacctgtaaatattttaacaaaaagatacgataaaaagacaaaaaaaaataaccggcaatatttaagggaaagttgtgatgaaaagacacaacaaaaatataaataactgtcaatactttaacagaaagttacgatgaaaaaatacaacctgaaaaataaccgtcaatattttaacggaaagttacgataaaaagacataaaaaaataaccgataatattttaacggaaaattgcgataaaaaaacataggcgttaagggtaaaagatctaaccgaaaaaataaccgccgatgtaacgaaaatttgcaataaaaagacaaccaaaaacaactgtcaatatttttaacgaaaaattacgttaaaaaagaacacaactattctcgataaaagacataaccgaaaaaaaaaccgccaatatactggaaaggtgcgataaaaagacaaatgaaaaaataactgtcaatattttaacaaaaaattgcgataaaaagttacaaccgttcacatgtgaaaatgacatttattgagattgttattattattagatttgtaacaatttttgaggtttttgtttcaaataaaaatttgtgacgattatattgcaatcactgacaaaatcgtcacaaatttgtagttatgttttatattgttataaactatttttctttgtgattaattataaagtcttaataatattattgatatactcctactgataggatgttgtgaatgataagggtgcctcaactttcgtaggagctcggcatctttaaagcaagcttcttgattgcaaataaagttgctttccgactttgtaaaattaaaataggttggataaatgtagctcacttatgataaatttcactcgtcaattagagtggccaaagttgccgtggacaactggtgttggtggagatagacagcggaaggtcataaaattggtgacatcgacgattggtgtcgatttcaggcaaatcgcctccggtgtcgcattgtgtgaaaaaagagagagaaaaaaaaaacaaaaaaaaaagaaatacccaatcataaaatgccatatatccggctcttaagtcttagtttgactcttatagaataattattcttaacaatataatcaataaaaacattatatttcatatctaattaacctaacaactaatctaaaatactatcaataataacgcttctataacaacaatcatggatctccactttcacatgtggtacaatcactacaagaaaacagtcgatttgcgagggaagaattactcgtcaatccctcgcaaacagctaaaagcaagggatttgcgaggacaacaagttcctcgcaaatcgctcctcgcaaatggtaaaatgtcgcaattctctcacaaaatttgcgagaaaccgttttcctcgcaaaacacacgcaattagcgttctagtactttcctcgcaattgctacgacggatttgcgattcttctttttttgcctagcaaatccctagcagcatttgtgatggatttgcaagtcttctgcaacgtctttcagatatattaaggcttgattagtgttgaattagactctaattacctagttaattagttgttaattagaccctaattaataagttatggcttgattagagatgatttttgcttctcaaataaacacacatttgaaagctgaaatttcataagtaattttcaacacaacacaacaattgtaatgtttgaaaccataatcaacttgttctaaagagataacagggaaaaaaagacattgttttcaaaatattgatgatggagaggatcctgttgcaaggttagctagggtagcagcagctgtctcctcattggcgacctgctgttccggagcagtagccacaggtgcttcatttgcgctggccggtcctgtctgtgtcgaggaaccacgtcgaagaattgcagctaaagctggatctttgtcagcaagatagtcaaacaggatatcgaagctattgatcttctcagcctgagattgaatgcaagcttcagcggcagccagcttttgagaaagtataaccggatcatcactaggaagcgttgaaccactatgggctgagaatgcttcaaactgcagagaaccaaccccataaatccttcctttctttcgcggagcaacctgcaaagatcacaaaaactcacaaggacacaacagaaaaactatgagaaaacaagttcaaaacaatacaaaagaattcagacacaactagacaaccaatagaatgacaaggcaaatcagacacaagtacacaatattttaattcagacacaaaactacacaaagtaattaagacacaacacaacaacagaaccaatagagtgacaaagctaaccgggactatcaagtacacaacacaaccacataaccaataaaatgacaaagctaatcagacacaagtacacaatacaaagcgcatgagaaaacagacaatagaaagcaattcaaacagaacactacacaaagtataatgaataagctgccaagatgacgagaaccttataccaaaaactagagacgcacaacataaacatttcagacaccatacataacacacggactaaggactaaagacacaacaagcacaaaagaaaaagcacagaaaatttacctcaacaaaaatcttgttcttggcatgaacagataatccacatgatccagtgctctctggattgtcccctgaacacatatgagactcttcctcttctatcctagatgtcactttcttgtagatctcctctgacttcccatcgatgaaagttccatccgcttttctgtgtgtctcatctagcagctcaaggaaatcaggagttgtttctccagtcttctcacactgaaacacaaagagataaacaagttgtcaatataacattgtagattaagtaatggtaaggagagaagaatacttatctaacccgttttcttgcacgagctttgtatgaggtctgacctgaacagtgtttatatatgcccttgccatccgaatcatgatatctaccatttctgctgttggcactctttatttatcacttaagatcttgccaaaactgtactagacctttccacacctcaggatcaatccattttggcttggcttcatcacccttctccttccaatttcccttccaccgtgacacttgatcagacatcctagagtttagctttgcttcaaactcaacccttactcttttgttaattgaacggtcccagttatatacttgctacaaaacagacaaagcacacatcagaaatgaaaccaaacaacaaaacaagcataaacataaaaaaaaaaaagcacagaacttaccgcaaatgtttcataccatcgatcgattgtagcctttgatgtctgtgaccaattggcatgaggttctttgaaatctctttcaaatatgctgcggactgttgctgcaactgtagagtcatcgtcaaacctacaacaagagcaaccagcccacacataaggatctctatgtctttaaacttctaagacactacaatgctaagtacaaccaagctgttttacgtgtttaaacttctaaggcagaaccaacctaattccattttacaagactgttctacacgaactatgaatttaaccttaccagagagttgccagaggtcgctttgggtctagtcttgtcaagccagcacgaccgggactatcaaggagctcatccagtgtcagattgttgagacgctcagcttgagcatcagaatgattgacagaaggctgagtggttggcgttggaggcgatggtggatggcgtgaacctgaaccttgaacccctgagatattcccagcactaacaggagaattgacatgcaacgggtcacgctgctgttgcctaaaccgtatataagtattatccgacggcatcttgcacaaaaaacaaacccaaagttagaaccgtaaactacaaaaggttagatctggaaaaaagaagtaagatcggagaagaagaagaagttagatttgagagaagaacttaaatcggagaagcagacgttacccttagaggcaaaacagttcgagtcagagaagaagagacgcggcggtgtttgaatacagatcggagaagaagagaggcggcgaagaaaggcggcgacgtaatcagatcgaagaagaagagaggcggcgatgagtataacagattagagaagaagaagagatgcggtgacggtatcagatcggagaagaagagatccggcgacgaacaaaacagatcggagaagaagaagagaatcaaagaagaatattagggttagggtttgatgcggctggtttgagcgaagctcaaactaggtcttcgagtatatatagatatttatttcctcgcaaaaccctcgcaacgtttgcttcgaaattgcgaggaaccgtcttttaaaccaattaaaacaaagcatatattgcgagggaactgcgagagctactagcaactccctcgcaatctttgattttaaataatttagggtttagggtaaatatttgcgagggttttgcgagagctactagcaactccctcgcaatccttgaacctattaactccatcattttgattcagtgtttgaatcagatctgatttagattctcctatttcaaataagaccctcaacaaataaaaacatgactaaatattttaaataatttaggttttagggtaaatatttgcgaaggaagtgttacgaaagacttgcaaatccctcgcaaggacctcgcactgtaaaatcaatttgaaaaaatacaacaaaacactactcaaaatcattcggattcgttattctgaatcattaggaagttaaatatctacattagaatctactttctcatcatatacttcaaatgtgcatttttcccaaatacatcaatgatgaacttatgtttttttataatttgaatcataagtgtttaacattttcaaaaagaaatgttaatattgaaacatatataatatgtttttgtgcatcaccatataatcaacttgtatgattatacggtcatttagatttacatttataaatgaaaatcaaagatcccaaatcacttctatgtattttagggtttagggtaaagatttgcgaggttgttgcggaagatttgcgagggttgatattattctttgcaaagtactcgtatttccctcgtaaatttacaaggaaatagtccctcgcaaatattgcgaaggatttgcaatacgcgtccgtaatctagcaaactacctgcaatttccttacaaatttgcaagggatttcttccctcgcaatagttcctcccaaaacaattgttttcttgtagtgaataaaataaaggatgacgatacacatctgttatgcatgtaagttttctttatcaaaaagaaaagattgtgattaaaaattatggctgacttatccttaaacatttctctaggttgtccgtatatgaaagaattgtgtgataatatgatacgagtcatatgaatacaaattaacaggctgatagtgaagtgaaatagattaagtacaataagacaaaagattttatttcgatctacttaagagaaacgtgtttgtttatttggaagctacaattacgttattaactcaaagaatccgatgccagcgatgttttatttggagtgatctcctattagattgcgttaaataaaaaatacattatttattttctaacgataacgtcttgaacacgtcaaacaaccaccaaattaaaattttgaaaatattatataaaattacggtagcgtagatctcttaatattaatcgcaacacatacgatttttttaattttaattttattttaaatctatattatataaaattaaaacgaccaaattagccatttagtaagtaatgttttcagattcaaataatattttctattaagatacttataaaaaaaaaaaaaaagcgatatatatattaaaacaagaaaaatgtaaatttaaaagaaaaatatttgaaaaaacaaaaaaacaaaataaaaataccattaggtcaaaagctttaataaaaatacaaaactaaaaaagctatggcagtttttttatctataatataaatttattacaaagggtgaataatttttgtatgatataaatgtgtttttaaaaaatattgtttctattttcaatgtgcaagtgtttgaaaatatatctttttataatatgtatattgacattttaagagattaacaaatgtatgtttttgacatatttatactcgataaaaatttttttttgaaataatgtaaaattatattcaaccaaaaaaaaatcgtttatacaacgggtgcattgcattttttaaatgaaattgaacaagattagtaactagtcaacatgaagaagcttgttatgaggtggatcgaatggtgaaccacacgatcaagccttcgtcaaagtttctatctcccgtgtcacggatggagctaattcgatttctgacattcttgtctatgtgctttattaatctgctggtatttgaattgatttcgccatgtcgccttacatttctttcttgccaaatgtggtacttatttttctatttgttaaaatattataaacatttaaagtctcgacggctattatccgtgggcctaacattcctctcttggttcatggattccactctcgtctcacggcagttttgttacttatataacatttcgtttacatattaaaaatttaaaatcatatcatctcatctctcttaagaaatatttaatatttatacagggaatgctagtttctgatggaatcaatgttactttaacagcctagaaatattttttttttcttaaatgcaaactaatagaacttcaaacatgtgaggtgtttgcgagaaaaattgaaattatatgcgttttatatacaagtaaaagttgaaatcataacacaacatgctaatttatttgtgttagaatgttgtataatctctttaaatggggaaatatcttcatataagaaatgtaaaaaaaccttatatatatatatatatatatatatatatatatatatattgaagtagtttgcaacacttttatttcataaatcctcaagttgacttatttatatatataattttgtttgcaacacttatatatatatatatatatatagattattacataagataattatcacacgtcaaattttagatgtcaaaatccatttaaaaaagaaccggtatcaaagtttccaaaatattgaagtagttgatagaagagataaaattaaatgaaggaaatgacattacacattttggtaattataacaaaaaattggaaagcttgtgttttacgaaatcaatgattagtgaggcttcagtggcgcgtctctccaacatgttgctcctttcaatctgacgaaaaaaaagaaaataacctgtgacaaccaaaaaccccaccgtgatcaaccgtgacaacatcggactcaacgaccatcgcgtcttcctcttcacggctttttccatcgcggtgcaaaccccctgtaatacaaagaaccaagtaacttcccaagtaggcgtctcacggtttatgtagaagtataccagctcgtgaatcaatccagagacgaagaatgtggtccaacaccccatgaaccttgcccaatcagacctcatttggggttggcataccgaacgcatgggatggtagacgcctggccggaaaatggccgggaccataaggttccaacggcgaccccaaaagtcttgaagagacgtggctaagtatggttcgttgaaatgtggctccaggtcgcatccaagaatgattgtaagcaaagcgttgacgatggttaaaagaacgtcaagcacaaggtatagatgcaatggatagagacatattagaagaattggaggcaacgaacttttatagttatggacgtttaacaacaccccaaaaattgcagctttacaaaagaaaacccatttaggtagatgattttgagagttagggtttttttgaatcttgatgggcaagcaagtaaagcatatgaatcggaagagattagcgggaagtggtaaaagaggacctttgtcgaaggcaaataagatgagcttaaaattagcaagtatagagaggcaaaacgcagtggtggaagagaaaatcgtaaagacgaagaacaaaggaagaacaagaaacagaacacagacaggaagaaccgagagtaatcgatgaacaccgcttttgatcttcgatggtatatagtaacagtaagagacagagattattgcagaaccccatactttgacgaagctcttgagttcttcctccattttgtttttctttttctgttgcgttgctcagtttctgcaataacctagttttaacttggtggttgtttgacgtgttcaaaacgttatcgattgaagaaaaataatatatatttttttttaacgcaatctaataggagatcactccaaatactacatcgctggcatcggattcatggggttgtagcttccaaataaacaaacacttttatcttaagtagatcgaaataaaatcttttgtcttattgtacaaaatctatttcaattcactaacagcctgttgattgtattcatatgactcgtatcatattttcacacaattctttcatatacggacaacctggagaaatgtttaaggataagtaagccataatttttaatcacaagtttgtttattgttttattgataaagaaaacttacatgcacaacagatgtgtattgtcatcctttattttattgtaccacatgtgaaagtggagatccacgatggttgttataagctgctacgaaatatgagacacccttatcatccacaacatcctctcatcatcaggagtataaaccatagaaccagaacttgttccgctcattacaatttacaagggttttaatacactaatgcgttattatcatttgtttatatttatatatattttttagttaatgtttttttttatgtgtatcttttctttaatttattttttgttcatttggaatttaaacaagtatatttcagtaatcttataaataatattttgctaaatttaaatgtatgtatgtctttggaatatttctattcataacgttaacatgtatgaatatcattgacaaacatatggtggtgaaaacttttatacctataaaaattgtattatggttaaacatggtaaaacattgttgatacggtacatgattatggcttaaaaatagatccagttgactattagatataccatatagtgtatatacttaggcttatacatgtaattaatgtctactatataaggtgacattgtacagaacattacaattaatgagaataagaagtttaataatctcaatcttaatatggtatcagagctctaacaaactctttccgccattgtttctcattcaagcttttccttcaaatcaacgtcgctttcgttcgattcttcttcgattgagctcaaaagtcttctttaatggagcttccgaagcatcatcaaatcttttttcatcgtttttggttctgaatcgctgtgattgatcttcttccgtcttcgtacttccctctcttgaagcattctttttctttgacctagattgtttctggttctacacatctgtatccagaacaatttcttttcgtcgatttcaatttcaacattagaaatgtcatcgattccaccaaattacacagcgacttcagttgttactgatcagtctacggatctttatgagaatccttactttcttcattcatctaaattaaaaaatttagagtagtaaatttatctttaatcctaaatgattgtggaaagttcaatcttttctaatcacaacagctaaagctgattgagttaatctggaaaatatgtttaatggctattttgtatcaagtcatagcttttgttttgtagaatgtatcaagtcatagcttgatcgagatttaatattattttttggactcattatatgctctttcctatgaggatttattctttgctctttcctaagtttctatatattgctttaggacaacataattatattcgtgtaatcatgtgacttgtaaaaaccaagatacaatggaacttctataaattaacaatgttgagatggtaaaattctattaatttatctataaatcaataagagagaattttctaattttgtaaattataaaatttctttcaatatataaaatatatttccacaagtaaaaacaactattatgtctaaaagacaacaccaaaagtttttgataaaaaagatataataaaaatattagaaataaatttaaacaagtactaatgcaaacttaagagaaaataataatacaagaattatatttcactcaaaattttttacatataatatatataggtgatacatttatacaattattaatttatgatattgatgaactatatgtttacataagatttttttttataaatgattatctcattattttatcaatttgtgatattgttttgcattgacactaattccgacctagaagaatatattaatttataaaaaaatttactgtattaaactactagaagttgtccacgcgatgcattcggttttagttttgaatataaaataatatttatattaaattatatttaaaacttctttataattgttaatatatcgctcaaaataattaataattaataatagtaattttgatgtttacaaagtatgatgtgtttagaaagacatagttgattaaaagttatgcacacatttttttttttttttgtgaaaacagtatgttttgattttaaagatttgattttgtaattagttaagggagttgcaattatgctaaaaaaaattcatttcaaaattgtagtttaatatgtagtaatcatagtttaatgactattttctaaatatatggtctatctattaataaattattttagtcaaattacaattaatgataaatacacgtgtcatcaaagtagaatgccaaatgtcgtgccaaatgtcgcattggtaggcaaagttagaaaatattataaaataatttaataatatatatataatatttatgactaaataaatattaaaatgtttaactacgttttaaataaattaatcgttttatagtcggttcggaacaccttggttttcttggtactgtgaggaaacaacttaatttttttagtgaatatctaaataaggtttcaattaacattgtcaaacttaaaaaaaaataaaggaagtaaactaagatgacaaataaatatttttttctatatagtaatctttagtaatcatagtctaagaatttccctctatttcatgaaaataaggtttcaattaacattttgtcaaacttaaaaaaaaaataaaggaagtagaccaaaatgacaagtaaatactcttttctatatagtaatttttagtattcatagtctaagaatttccctctgtttcatgaacttcttcaacctttttctttgtcttccttgcctagaaaaaaaaaacaaatggagatacacaatcacggataatgagtaggtactttcggatttgatcattctgggaagaacaattatgcatctcaatggactttaacaccaccagagaaaactttgcatatatttacccaatatttatttagctagcatatcccataattgttgtgaaattgagaatttgaattttcaaagaatatacaaatactatatacaaatataagttagtgtagagtttagatgtttactgaacttgtgaggaacacatccaaactctagaaagataaatagatgtacaactaaaatatgtaaaaaaaaaaaaaatggatattgtatttggagctgagcatttgagacacttgaggttgccaactgcttcttctcaagtcatgcttgttatatagttgcattcttacgccattttcagttatatattaagtcataaattatactttaatgtggtgatcaaaatattgtaacttataagatataaaggatcataaatttttgaattaaagtactcctaaatagtgttgaataccttattacggttaagcagctaagaaaatgtaaagagtatgcattaatggtaatctataatagtgaatataatgatttttattatcaaaaatatattaataatgattaaatatagtattatttagttgttaaatatattgtatttttttattttgtaattagttaagggagttgcaattatgccagaaaaaaatcatttcaaaattgtagtttaactagattttaacccgcggtacaccgcggtgacaatttatctttttaaagttagtataactttttttttgcaaattatatctgtctataatatatttttattttatactttacaattattattaagaacgtcttgccaaacccgtcccgccaaacccgtcccgtaaaaaaaacatttatttatattaatgttgatcttatttctgatatgtttataaattattgtctaaatatttttgtcgatgcgggacgttgaacccacacattttttgccagttggttaatatatgtttattttaaaaaacttgaatcataaaatatgacggaaaaaattaagatttttttaaactctatatattatataatgatgttaaacaattgtgatatatcaaactttttataagtttaaatattaataatgttttataaattttatatatataaataataatattttaaaaaataatatttttgcttataaggtaatgacataataactctaaaagcaaggatttagaagatttaaatctttaattaaatatcttcattaataaataattaatgtcaataacatgacattgtaaataagttcaaatacaaaatttatttatttaaacaaaaaacgtttagtaagaataatatttatttaacaaaaaactttgttttaaaatattgttagcaaatatgtttatgctaattttaagggattaatttgaagtttgttgggattaaatttgattgataatgtgattgacaatttaaatcaaaaatttaaagtaaaattaattattttgaaaaaaagatttaacgctaatggcattagattgtaaataagtgtcaagtagaggatttatttgctaaaatggctgcaaaaatgtatatatagatatgtagtaattttatagtttgatgactatttttctaaatataagatatatctattaataaattattttagtcaaattataattaatgataagtacacgtgtcatcaaagtagagtgtcaaatatctcattggtaggcaaagttagaaaaaaccttctaagattttaatggcttttgcctacatcaaataaagttaatatcgatggcctacatatcaggagaaaaaactatgacttatcatcgcggaattttacaatctggaaacagatcttatgagatgcaagttttagccacaatctccaactaaacaaaaatttcatcaactaactttgctttaaccgataggcatagctggcgctaactcatgtaaagctacaagaaaaaagaaagaaaaaagaaagaaaataaacaagggctgcatgagtatacaaataattgataagttcttaaccatgattgaaccagagaagacatggtcaaagagaaaagaagaattgataagtgcgttcctttaggagatcaagctccatgtttccatattcccactttgttaattatgttctttgttaaagacatcgaagtcatgagaaggaactagacttgaagattgacaaaacagagtttatctctttagttattttgtgtgttcttgtgttaagacaaaacacatctctttggctttgaggagagaccacctatcaataatatcaagaatatgaaattttggcttcgaccaaataagtccagcacttatcactactcctacgctctagattaaatctccaattaagctccttgtagattgctataggcggaacatatatattttatgttatgacaaatttaatttatgtcatgacagatttatttaaggttatcaaactgtggcttttgatagcagatttgataatgaaagaagaaacaactccaaagaactttatagtaaaaatatttgcatatatatcatcaggtgttgaatggttgcgtagtatgatgtagaccggactaaaatcggaccagccggcacttaattcatcattcactattgcggactaaagtgcactaatgcagactaaaaatctccacactaccatgcacatgagcatacaactccataccatcacaaattcactactagtctgcagtttttcactccacttcccaaaaactccataccatcatcaacttcataccaacatattattatctgctgcatactacagtacgacattttgcatactaaaatattggtaagtattatctagtccgcattatataaataaccattcaaagcctcaatcttttgacaagtagattgacgatcttataatatatttttatacaacattgatgaaccacactattgcaagatataactttaaaaatcatcgcttgccagtgttataccattaccctttggcacgttttcgaaatgtaacaatgtcttgtccccatattttttatacaacattgatgaaccacactatcacaagatataattttttaaacctttattctctgcacgtcttcgaagtgaaacaatttctttgccaatgtcttgtccccatatttacgtataaatatgcattttacgggcactaattaaccatttcatcaccaaaacttaaaactaaacacaatccaaaagtatttttaagctttcacatacgagagaaaacttagaaaatgagggcaatcgcagcttggtttttcattttctgttaccttgttccctctgtttttgcgcagctccggcatgggttttacgagggtacatgccctcccgctgaatctatcgtgggtagagttgttttcaaccattgggaccgtaaccgaacggttactgcagcattgcttcgtatgcagtttcatgattgtgttgtcaaagttagtaacctagcttctccttgtgtgtttttatatgtatcatgtatgtatggtatatcgtaaactagctaatattttgaattcttgtgtagggttgtgatgcttccctcttgatcgacccaacaaccgaaagaccatcagagaaaagcgtcgggcgaaatgcaggggtgagaggtttcgagatcatagatgaagctaagaaagaactcgagcttgtttgcccgaaaacagtctcttgcgcagacattgtaactatagccaccagagactcgattgcattagcgggtggtccaaagttcaaagtacgaacaggaagacgcgatggattaagatcaaaccctagtgatgttaaattgctaggaccaacagtttccgtggctacatcaatcaaagcatttaaatctataggttttaatgtaagcaccatggttgcacttattggtggtggccacactgtcggtgttgcacattgtagtctttttcaggataggattaaggatcctaaaatggacagcaaactgagagctaagttaaagaagtcatgtcgtggcccgaacgacccatcagtgttcatggaccaaaatacgccatttagagtagacaatgaaatctatagacagatgatacagcaacgagcaatccttagaattgatgacaacttgattcgcgatggatcaaccaggtcgattgtgtcagattttgcatacaacaataaattattcaaagagagttttgccgaagcgatgcagaaaatgggtgaaataggagttcttacgggagattctggagagatcaggacaaactgcagagccttcaacaactgaagatctctattctacatacattttgttggaactatgatcaaatctcgcttctgcgtattcgtctttttcttaaccgtttttaaataatcgaccgaagatttccgctattatttcatttctgtttttacatttggccagtgtgttgcattttgtacttatgtgattcttcttcttattctattgtgtgtattttttatatgtacatttgttcgttgctttttttattatgcaattcctgatggtgatagcttttagatttaacaatatggtctctgatcataagattagataatgtgtatatatatagggattgataccaaaatcttaagattttgcaacaaaaattatgaggctacaaccattgtttcaagggtattatcattatctatatttcaaaaacttcaaaattaagtccattatttttctactgtttatcttacactgtttatgtggcaaatactataatacccctatattatattactaatcttattcgatattactgtacatgcgaagattacgacaatggtagattttgttcaaattcaaatttgttgacaatcaaattatcgaattaactaatattttatctagagatagtgataataataatcttattggataaaattcatacttttcacgttgtaacaactcgttaattttttatatgatataataaatgagttcagacggtaaatataaatatatcacataacttataacttatcacaatacaaaatgacttagcatgatataattataaacttcttgatataaattttttttatcatgttaacctaataaatattaccgagatatttgttatcatgttatcctgataatacgttatctgctaactattctgatgcatgtatttttttacatgattattcggtcacaagtcaacttttttgctattcatgctaaatattttgttactttttaataatagtgttattgtgttcgcatatatatcagtctttaaaatctaatcattggtttaataactgaaaatttatttatatcgtcaaatatattattaacatattaagttggtttataccccatatcatttcatccatatatcaaaccccatccatatttcgctaacgatattatctcgataatgcgttatctcctattttagcatgctaacaatatagttatacgctaacatcataaaatatttaagctaacgtttttttctgttatataggagcacatttgtcatattaactttgcaaggaaaaactcacctaaataaaaaatctttaggtatagattcttaaatatttagtcttccaaatacatatttttaactcacccttgtttcaattggctgtgttgagggcagtggcggacccatgatgtttttcgagtcaaataatttattttaccaaaaaattttatacatatatatagtatatatataaacatttttcgctaacatattgttgaacaatctaaaaaaatattcaaaacatatatataacctccatgaactaactcttaaaccaagttgtgtaattcactcgaacctagtttacgaatgtgtttcgtgttatattatccgaagacattcctttatatgtatctctccaattcccacttaagtttcatagtttccaactcaaaacaaattggcaataagtaaataaatctatatcccttatatactatttaagtcccactcatctttccaatgtagatctttctccacattacggatattttttccttccgagagagaactatactgagctcaaccaataatgatgttggaatcattaacgactacacgctatcaaatatgaaaggtgataatattgattttgctaataattgttgataatgagccgtgcaaatctgcaatggttgttttttgatttttaagtctatcggcattttatagatcgacatgtcaagaaaggatataacttatttcatatagcatcgaggtgttgatcctcagcaaaaaaaaaggatggtttatacaccaaaattttatgaataacgtaaaaaatgtctggattgtcaaacaatagactagtattgaagatcggtgctcctattatgttgctccagaacatcgatcctaaaagttgtgcaattgtacaagggtgcagatcgatcaactagcaaatcatttatcgaggataaatcataattggtactaggattggagagataattctaatacataggatgttcctaaccccatccaaagcaaagtttccatttaggatgcggcatagacaattctcaatcgccattgtattcatgatgactattaattaataaaagtcaaggccataacttacccaaagttgggttgtaccctcctaggccaatttttttttcatggacatagttatatgtgactctttcaagggtgacgtttagagatggtttgaaaatcctattaacaaataaagatggaaaacatcagacaactactgtaaatgttgtttatatagagaaattttcccaaaatttctgttaatttacgtattttcttttattgtgtattagagaagggtttttatttattcttgatgtattgctgtggattttatacattcatcgtgttgaggtactagatatgttaccaattcaatttaatatgttcttgaatcaaaaattattatttatttattttttgaaaaaatgtaaaattatattcaacaaaaaaagacgttttttacaatgaatgcatcatgagtttagagaattcaaaattgtcgaatagattgaaaaagagaacttcctaacatcgggtatgaaaccaatactgcaacccaccatggagtcttgtattccctgtcctttgaatcgtgctgaaccggttttgaatagttttgtcaatgaacttagcaagtttcgcagccggaatagcagtttccccgtgtcgcctgcagttacattctcgccaaagactatggatcgaagcttggaatgcatagggaagagtgaagactatggatcgaagctcataagataagcaacaaattatattattgttgtaaatcctaacaatcaaaatctatattcaagacaagaatcttagttcaaaacaaattggttttatctactccgtattatttcattatgtacttttaaattttcattagtcgataaatttacattttcttaaaaacatcccaaagcgaattatcaaatccagagatacaattaacaataaacaatattagtataccctttaaacattgagaaacgagagattcgcgatcagtagtttacgacctagaaaatggaaaacttgcgcttcacgaaatcaaggaagaacaaggtctcattggcgcgtctctccatcatgccgctccgtataaacagaggaaaaaacagcaaaccaccggtgacaactacaaatcccatcgtgagaagccgtgacactgacgatctcactggccaccaccgctgtaaaaacgctgtcctcttcacagccacctctgtccccgtgcaaaccccatttagcacaaagaacaaagtgacctcccatgtaggagtctcacgagttatataaaagtatacaagctcgtgaaacagaccggagacaaggaacgttaccaaataccccatgaacctagcccaaccagaattcattgggcgttggcaagcgcaccgcacaggattgtagatgcctgaccggaggacagacgagaccatgaggttccaacggcgaccccaaaagtcttgaagtgaggtggctaagtacggtttgttgaattgtggctcgagatcacacccaagagccatacttagcagaactttgaggggacctaagagaatctcaagctccacgtatagatgcaggaaacagagactcaatagcacagtctgaggcagaaaatgactgtagttgtacacatgtaacacaacaccaaatatcatgattttaatggcgaaagctcgtttgtggaaatggttttgtgatggctgagatttagggtttctctgaagcttgatggggaagcaagtgaagcagacaaattggatgagattaggagcaactgggaaaagaggtccttgatcaaatgcaaacaggataagctttaaactggccatctcggagaggtaaaatgctgtggagctagagaaatgcacagaggagaagaacaaaggaagtacaaagaacagaccacatatcggaagaacagagaataatcgaagaacaccggttttgatattggcagatatgtagtaacagtatgatactgagattattgcagaaatccacactatgatgaaattcttgagttcttcctccatctctcaaatcttttttttttttttttgggttgaattttgctttaaataaaaaaaaatgagagtaaactaaggcatgtgcttcttacagctatacggtgaaaaagattcgaacaacgaaacaactttggtttctacgttcttcctatttcaaaattgtggaatttctgcttctcacttcattgaatttgaaagcaataatgaaacatgctaactcgaaattaatttagaagatcggcaacttggtattagagataataatatctcacattcttttatgatagatgggttaatccacttattgctaattgattttgaattgtaagtccatgttctaatatggtaacatagcactccacgccagaacattacagagatcaatggctagagtcatcatcttgagagagtgtattaggtataacaacaccatatatacatggaaaagccaagatatcttgactaatatataagatagataggccaatccactcataaccatttcccactacccagcgtgcatgaggtcatcagttcaataccggatggatgtattttttccaaattattttctaacaaaacgacatcgtattatggctcataaaacgacgtcgttttgatttaacaaaaaattctaacggaaagttaaatccgtttacgaaaattttacggcatgtccgaaatgcccccgtttacgaaaattttacggcatgctggaaatgacacagtcaacaaaacttgacaatgttatcaaaaattcaaagaaaactttatgaattaaatgacatttcgaaagttcatgtttttttcgtcccaaatttgaaagttagcgcttttttcagacatttttccccatttgtatttgttgtgttatttttttaatgtaaagctttttgtaaccaaaaatacaaatcaaaatacaattgttagtggagttgatatatattgggttacaaagaatttgttgtcttttacagtaatttgatctaaatattgtatacaaaattatttctgataattataatctgattaccaaacaattatataacatgcgattgacatggaatatatgttgttgtttattctgatttaaattatgcagtgtaattgacaacaatattttttcttatataataaataacttggttttacgaaacagtgtaattgaaaaccttgcgttttacgaaatcaatgaacagcgaggcttcattggcgcgtctctccaacatgttgctcctttcaatctgtccgaaaaacagcaaatcacctgtgacaaccaaaaaacccacggtgatcaaccgtaacaacatcggactcaacgaccattgcatcttcctcttgacggctatttccatcgccgtgcaaaccccatgtaatacaaagaaccaagtaacttccaaagtaggcttctcacggtttatgtagaagtataccagctcgtgaatcaaaccagaaacgaaaaatgtcgtcatacaccccatgaaccttgcccaatcagacctcatttggtgctggcataccgaacgcaccggagagtagacccctggccggtaaatagccgagaccatgaggttccaacggtgaccccagaagtcttgaagagacgtggctaagtatggttcgttgaaatgtggctcaaggtcgcacctaagaatgatggttagcaaagcgttgacaatggttaaaagaacgtcaagcacaatgtatagatgcaatggatagagacctagtagaagaattggaggcaacaaaattttatagctacgaatgtttaacaacagcacaaaaattgcaactttactaggtaaaacccatttgggtagatgattttgagagttaggttttgtttgaagcttgatgggcaagcaagtaaagcatatgaatcggaagagattagtgggaagtggtaaaagaggacctttgtcgaaggcaaataggatgagcttaaaattggcaagtatagagaggcaaaacgcagtggtggaagagaaaatcgtaaagacgaaaaacaaaggaagaacaagaaacagaacacagacaggaagaaccgagagtaatcgatgaacacctcttttgatcttcgatggtatatagtaacagtaagagacagagattattgcagaaccccatactttgacgaagctcttgagttcttcctccatttttgtgttattttcttttgctttgctcagtttttgcagtaaccttaggtagttaagttttaaacttggttgtttggcgtgttaaaaaagtaatctaattgaagagaaaactaggaacatggttcacaggtcaacaaaggtttgcttctacgtgatctgtcttctgatttctgagtttgcttctgatttgtttctctaagtgctggctcttatgttattcgtactctgtctcgtttgatcagtgcacactatctatgaccttggaacaaatagctaaatgtttaaaatggaattcaagacctcatagagttgattccagagggaataacatttaatcgttgtaataattacatcatatatttataattagattatattcatacatatttgattagattcataaagtaattgatcgtttattaaaaatataagaactaaacatttgatatagacattccatagaacaacatattgtctcgtcggaatttttgtatactattccgttttgacaacgtttattacacttcttgcatatgtatcgcgtgagacgattactgcgaagaatatctttttcttctccaccatatataatcatctctttacctggtaacatatacatctccttcccaagtaagcattgaatatggagtgtgatgtcgcattcactgcacatataaattccattcttgagatatatttttctttcacagacatcacaccagtgctcactactcgcatcttgttcatacgaaaaagtgagaagatgttcgtcatgcttgtacctaaatttcattggtatagtagcgcagtaaaaacacaaaacaaagtcacattttccacaatcgaaacgggtttgtgagcgtactttgcaaatcgaacagattcttgtagatccaaaatcagacggtagaaacaaaagatgtggatgaaaatgatggttaagtggctcagacgtggatgcacaaattacgtctaaacggaaattacaattggtcattagacacatgtatgtgaaactattgctttgacgctggcaagctgaacaactgaacatatgtcccacttgtaagaagagggcgtgaggatgtattacatgttctttttgcagtgaaagatttgcacatactgtatggaggatgaactcacattccatgcaactaaaaatatcacaattataaaccggaagtgcacatgcttgacaatgtttgttatcctcaatctttttatcaatatatttgtggagtctcatttgatgtttatgactaaaatgttgtataatcccaccagctatctctttaaatggcaaaatatctttatatatttcatctggttcttcctcgagttcttttccatcccatacatctttatgtaaagcacatcgagaatgagaaacataataacaacctttcacgcaagaatatcctccatagttctcatcaacctttttgcgacaaaccccgcaaaaccatttccgaggaagaaacgatgaagcaaatgataggcggtgttgatgccgagatatttttatgatgcacggcgaatatatacattctttatggactacaaaatcacattgatggcaaatatatagaaaataccttcgctcgtccaaagcacaaacattgcaagtaatggaagcttctctaggaaaataagacaacatatgttcgtgcctttttttgtggtctatcgtaaggagtggtggttttgcttcacagttagcacaaatgcaaaaattgcatatagagcaatagaaattcaattctttacgacgacaacaacaatagcatattgtgtttagctttaaataatcagatacgagaacttggagcggatgtttacgatgataaggattatttgttatcggttcgatacactctttatgaaaaaagatacgctccttctgacccaagtcttcgcgtaggaaataatagccaatgtcgtcatctaacagataagagcaaactctgcacctggactcccgtttgcagtatttatctttgttttctccgttgttgcaccagacaaggggatgtgaactgcttgtatgtgtagaccgaagaacttttctttcatcgagaggatataaaactaggacaggtgaatctttgaaatgttcggaacgaaagtcttctttttgatcaaaatcatgtcttagacgacaaacagtaatattagcagcattttcaattttcagaggatccatagttgatacgagagaggacggttatgatgatttgagagtgaatattgctaggttaaagcctacaggctacatataacataatatataggcgtggttatgaatgtatacgattttttaattgttgtaatgcaattttttataacctactactcaagtaaagtactgattctgttaacaactttacccgaagcaaccaaactatacattctcacgaaaagtatcactacctaaaagggaagattcagatgctaaccaaagattcttagactaatgttatgataaatgaaacatgctttgctaaaacgtgacgacggaaaccaattactatacttatatgtgtttatataacagttaaatcaatctgtcagacacattttcacatctctagagaaagcataacaaatgaatatgtgaaaaattccctatgcaatttgtaccaataatctatcttctctttttcttcatgctgtctctgaagccgcgtggtttacatatattgaatctactttgtatctccttacacagcttcaggaccgtcttgcggtagaatgaattgacgcattggccttggcgacttggtacactcgtggcgtctgagagtgagtgggatcccttcttgctcaaacccattactatcttccaattgtttaggaaggcgaagagccaaatttcccaaggacgaagaacctacaatcggacccttgttaattgcagaaacattctctcatttttcattttatacacattcctaaagaaagagctcacccaccatcaaccatatcctttgttttgtgaagcaaaaaggttcctgaaaggattgtcacaaacccacacaactccgtcactatctgagttccgtcctgtcgatcccagtcctgttccacataaattaacaattgttgttatctctagttaccaaaacaaattagagaaaacaccaagagttattatattatactttcaccttaaacatgatgacactagctaggatggtcaatgatgtgaacataacatagtatataggtgaaactacagccgtgttgaaagtgtcaagcgcctgtaatcaagaaaacaaaaagagaagccgaatgaaatttcatgatatgttaacagatatcaacatgaaactgatgctacctctataccttgtttagatagttcatttgggttatcacgcaggtgagaactatcagcgtgaagacccatgtctgagggtaaattaactgattcattcctgaaaacgtaagctttaatgctatcccgagcgctttgacgctcatgacctgctcaaatcgttcaagttattaggactcaaaacaaagctaatgaataaaaatgttaaatcataagttttgggtacttaccgacaatgatccaacaagagaacaaaccccgatatataccatgacatgtgactgaccgtactgtggtacaaactgaactatgagtataatggctgctcctactactgctgcagcgtagagaagaaaagctgcacaggacatatcaccatgtcttagacagattaatcaaacatcaattagacgggataaaacaagatttgaaaagagatcaaatggtaccaggttctgtcgcaagattccatacttgtaacacagaatcaatctcttgttcttgaggagcatgtaagacaatagttatcgaaccaacaacacataagacacaaccaagaagcccgaaagtatgcaacttttcgtgtaggatgacatgagcaagagcagcactgcaaaattcacatccgaaatgttctatttcaattactccagtgcacaactcctaatggttcaacaatactatcattgtgaatcaaaaaatttagactaggccacattgtatattccttatatagacaacactaaaagttgattgtgattccacagctagatcaatacataataaatctgacttaatactatccaaacctgataattatgctgagagcaccaagaggagttactaaaatggcaggcgcaaaggcataagcagcaaaattggcaatttcccctacaatcactgcaaaacaatgaaacattgtctatcccatcaacatcactgaaacgccaataactacttataccctcaccatcttccaataacaacaaacaaaaccaatctgcagtactaacaacaagtaaaccaagaccccaaaaaaggagcaaacctttaaatatgaagggaactcactcgttatcatgcctacccaccagagaggctcaagcaggtaagaataacctccagaacctacacaacaccatcaccagaatcatcaacgagaatcaaaagagcaacatctatctgatttgtgatatacttttactacatctgtaatcattaacataacacttaattagccattggcgctgcttcacttcactctcacaaaaacacaacaaatgatcaactagaatttgaaactaccctgaagcagaaatctaaaactggcagaataaatttccaatctttgcatagtgaaacaaacacaaatctcctccaaatcagtaaagagaatggaaataacctgctctgagaccagaagcaccagctctcttgagacctttcttcttaacaatgaaactagcaccaatgaataagcttgaagataaagccaatactaaaccctttatattatccgatgacattcctttatacgcatctctccaactcccactcaaactcgccatgcttttctacaatacacttaacccctaaatacccagaagaaaaaaaccgagctttaggcttgaatcaggcgattgggagagaaaagacaaaaactttttcagatcttgggtttgtccatttgcgaaaggatataggagacgatttagggatttgagagggaacgaggtagatcggatataaagacaagagcgtagaagaagagagtgacaggagagaaattgtagtgatgaagaagcatctaaatttacgaaaaaggtaaaagatttctctagcactcaatttttttttgcctatctaattgatgcaacctctaaattgttttaaaataaaatctatttctggtgacataataaaacgatgcaagtattctcgatttttactaattgcgaaataattagaaaatattaaaaatagcaacacaaaaataatagttcatgttatgtaaaaaatgaacagtattaatatttactattgcaataagaaaataaattaaaagagttttgtatgaagtaattacgagtctaaagttcaaaaccgattggatgcaaattttcataaattgttatttaatttgtgcggaagtgttagcggaacatatagtataaccggtttaatgataaatattaaatagatatggtatggtaaatattatggtgaaattttttataaaaaacatcaattaatttttatttagacgtttcatacccaattgtttttggttggaagaaaaatacacgaaataatgtaatttaatatctaaacaattaaatattattattttcatacttacgatctcacaactaaaataaaattccaattttctctttatcatctcaattaactattaagttttagatgatatgaaattaattttattaacatttattttattgtgtctaaaaatttaaaatttcagttttactataactatttaattttaaaatttaatataaaaattagaagaaaatcaaaaatattttaaaatggtcacgtcgtcctctttttataaacttcttttacgtaatgagagactctttcacggatctagatttaaatctttgaaaactgttgacttttaacttgacttggtggcgttgaatgtgtcgaaggttcgattcctggagtttcatttggagaaataaagtttcagattaagcttggagtgcctcattctctttaccagcagctggatttggagaatgttaagtccatcttcccatagtaagttccacaggtaacctcctcgatcatagaatttctaaacaaagttgttgtcttcccagaagaaacttgagttctttgtttcaagtattattgtggaaaatttgagttcgaaattttggctttgtactagatataagttactgtgaaattggattaagattggtgttgtgaaaagtagacagaaacgagcattaccatttacttatttgatccagtattgtttgtgcgaaaacatctctcattgtgttacttagtcttggagtcagctttatctaccatgttatcacaatcattacttccttctttgtttgaagtggagattgtgaatgtggaggtagtggatggaggactgatttgctcaagcggcgttctagttgaagaaatgggtgatacaaatgaagattgctatatagtgtatgccgcagtctacggtggctaatggctactaagtctccgagtttaacaatgtcattctcgttgataggagagaaaaaacgagaacaattgcagtcactagcttttagttgtatatctttatttaagaaccaatttggtttgtaggaatcaataccacaatttcagttaaaaagtaagtttgattcacactccatatttcagttagagactcatcaaatggttgcagcgttcggtacggtataaaaataatcgcgttcaaaagctcagattatggtggtcaaggatgtagagagacaagcgcagacatgcgatggcgatattaccatattacgaaaagattgaacatgaataattcatctctctaatgacgagaaaaaataatgacttgactctttattctaattgatatgtaaatgaaatatctgaattcaaaaaaacctttacaaaccaaaaaataatatgcagacgtaaaaacaatgtaaaaattgatcacacgatattttacaggttcactgtgacactcaaaattatattagcaagagaatattgaaacaaggattgagttaaaattagtgctgctcaaaaagaatctaaattgaaaatgtgtttgagagaaagcaaacttaggcatgaccaaaaaaaaataaaaaaataagttatgtttaattgatgattacgatacgagtaatatcagaggcaaaatttaacaaattatccgaccgtttatactgtttttaataagataaaaatatatattgtagatcaacttttcttaattacaacatagttgtttttttttaacatagattttttcatatgcactatcattaaaacaaaaaaattatctgaacattcgatccttgtcttttgcattatacacacttacaatatatttgtaaggttttaaccatatggttaattaacagttaaggttttaaccgtatggttaaccatacctatatatttttacggttaatggttaaggtttttaaccgcttgatatggttacagaccaaaatatggttacgtgatcatgaagttgtggaatttatttttgcatttttattgtatttttatgtttacttgttgcgtgtgttttaaagataatgttttttgtttgtttataattaatttatgtgatcatgaagatgtggagtttattttagcattttcttgtatctttgagtgtgtttaaaattaatgtttttttgtttatgattgatttacttgatcatgaatttgtcgaatttatgttatcgtaatttgtggaatttacaaagttgtggaatttatttttgcatttttattctatatttttttttacttgttgcgtgtggtttaaaataatgttttttttgtttgtttatgattagtttatgtgatcgtgaagttatggagtttattttaagtatttttattgtatttttgtgtttgattaatatttttttgtttatgattaatctacgtgatcgtgaatttctcgaatttatgttatcgtgattttgtgtaatttacttgatcgtgagttgtggagtttatttttgcattttaagtctaattttttttttttttgtggtgttttacgtcttcgtgcgtttagtgttttttttttttcgagtgtaaggaacatttttggctgtgtttattttttttatgagagagagagcaagagagagttaacattttgttatttactctgagcatagtgaaacatatcaaaaaagataatcacaagataaaattgatacaacaaaattagagccgagaaataattaatgaaacttactatatactcagctaaggttgcttctcattcgtacttttaacctggacaaaagtaatgcaaagtaaactaaaaatactaaagaaacaagttaccttaacatgaaaaatggttggctctcccatattcacaagacttttaatttttcactgacgtctttaagtgttgctagtcctaatataatttagcgaataatgttatacggatattaaacaatacagaacacagtcgctataatctttggccaacattctaagaaactactctacgaaacaaaagcttaccttcttcaagtctctttaccaactccttaatagatacatcaacaggctcacactaagttatattcctgcaatacaactccttaataatgaacaatgtctacatcaaacggacaaaaccacacaacttaatttgagaaaacatgcaataaaacactaacagtctctctaatcttgaggcagaaccggtgggagctatcctctcaaaatagaagattataactacacccctgaatacttggaatatagattaaactcacattggttctattaagaagagtataaaatgatgggaataggtttaacatgattaccttatcattcatgagtacgttgaaacgcatctgagacatttcctctttctcatgaaaccatttaccaagaaataagttaatagaagctattctaaggcaatatattaaaaaagagttcgagatgaggaacagtcacaaagcaagttcttgacatcaaatatgattatccacacttttggttaaagaatttttgtaaaagtttgttttctgttttggaagttgtttggacgttctgtgctatgttttggttttgtgtgtttgaatttcgctgtgtcttagtgagtttaagttgtgtttgtgtttcatttttttgtgtgcatttgagcgtgtgttttcgtgaatttatgttctgtttttgagacagtgcaagagatgtgataagtgagagagagaaagattgagagagagagagagagagagagctacttcatcaatcaccatacctttgaatagtcttcagatcttctttgcagctaaacactccttcatcttgaaaccctttatcaagagttctttgcagcttgagaaatctcttgacaccaaagaacccttgttaaaaataaaacgaatatttaacaggaagaaacatgttaccgtcaaatcgaattaccttaacatgatgcactaaaagaatgcttggtcatcttatcactgaggctcaagattaggggattctgttactgtcatccacaaccagagcctttttctgtgtgtattatgttgattcccctgatcagaaagtaattaattacccaatagaaccgaaaatacaatgaaaaaacagaaaccataactcttaaagagccttaaacattataaaatcaagtacctggtaaccaaatttcgtagcaccctggggaccagaacaagatcttttctactactttgacctggacagacgcataggcttttattttccagaaacttatccatatccgcaagcatcagaggccgtgtactcaaacaccaccttcaagcactattcaccatcacaaacaaacacatcataatctgatccataaaaagtaccacaaaagatggcaccatcataaacaaacacatcataatctgatccataaaagtaccacaggagatggcaaaaatgggttatcgaagtagctaagaaaatcattaatatgtttgaggcactttgagctttgcgggcattctttagttagctaccttttcctggtaattgtttagcgactgcataccttgagagatatgcggagtttcagctgcaaggcaatatctcaattgagaattcaaaattaaagtttgtgatagtggaggaaggtgcaaacctttgtctcaggatccttgagtttggtgacagtctcgcgccaagcctcgcagtttcctagatggaattctgaagcaggggccgtcacttcttgacagaggttaaactttttgcagaattggtctgatttgactatagacttgtgtgaagaaaagctcggtaaaatgatctaccatggaaaacattgcattatacacataatggcagagttaacatgtaatcactaatcaaaagaaacagaaccgaagagctgagaacaatcgagaaagaacccacaaatgtcaatgtttaatcttactaactagttcgagaacaatcgagtttctagcatcacaagaccatgtcaaccccaagcggggttaggagtaggactccaatctaccgtccatggttcctccataaactataaccttttaataatcaaaactgattcagaggtcatcaaatttaaaaagccttaaacattatggagataaccagaataaacaagtacctgggaattaatagaggactctttcctgcaagttacacatcaattcgtggaatgtgaagttttttgttcctattgttgagttttactgtttgagttagaatttttctacgattgagcgtgaattgtgtttttttttcttcttctttcttttgaatatgcatgcgtttggaagtgtgtttgtgttaagttttcgtgtgtttaaatttcgtttgagcgtgaattttgttgtgattgagcgttatttgtgtttttgccatctttgatctatttctgggataaaacaacatggaaaaaaatacatgatgaacaagccacaggccagaggactagtctgtggccagtttgtggtaagagagagagatacttacctcaacacttgtatgctgaaacttttggtctttgaagcttgaagatttttcttttgaacgtgaagtacctgatcaataaaatccaacaaacacagagattataaaactaactagaccaacaaaaataacagaaccttctggctagataactatgttcacgagatactccaagaatatagtttaattttttttttttttttgtcatcatatagtttaaaatttatatccgactctttcgaataattaagtgttgctaacaattgaaatggagatatgaaaaacatccattagagaatcacgtaacatcttatggattggacactaaaacatcttatgagtactgtagttatctctaagctttggtactatcaagtctaagaactgaaccacgaaactgaaccaatctacattgtaataacaaaaaaactgaactttaagcaaaaatgtactcacttctggatcagatatcgaagctttgatgaagcagaaaaggaagacgtattgagtcgggattgtcaaataccattcgaggtttccaagaattgccttcttcatcactagaatctgtctgctactgtaagcattgtccgtgacatacaccagatcgttaacctgcacatcacatgaacaataatcatcagctcacagtcacatacaaaaacacaatcaaattattgacatcaaacagtaagtacctgaggtggccagatttcttcatatttggaaggcactgattcccactacctgcaactctctcttgggaacagctttcacatagaggaatcgatcaatgatgttaacagtgaggtacagagtttcaaggttaagctcaaacttgatgtgaacttctagtaaccaatcaatcaagatcgctctcatcttctcattcatctcagtttgaatgtgcatgtacatcttaggctgactctccttctcaacttctttatagaacgagtacatatcatcaacatactccactgcagccacatgattatctttgtcagattcatcaatatcaagaatctttggtttgttgactataccacaagcagctttgctttgagcactaagtacatacgagtacgtcactttcttattcttaggtgacatcgctacttcctcttcgtctcgatcacttcaacaggcttcgtctgttgcttaaccactagattcttcttctgaaccgccctttgagcttctgggtttcttgcagcaagaggctgactctttggaccaagagctggaaccttgttgtctccattgattggctttctttcgagttgggcattcgctaataactgggcacgaaaactaagagtaatgggtcgattaatcggaggttgagcctttcctccttgaactccgggaacagaaacaagatttccgatgtcaccgagggcacgccgattcttcacagcaccgtttttgttctgaatcttcaaaccatcaacgagaggagcacctgtttcacagaattcaaaagaaacccatcaagatcttatctttgtttctaaagattcacaagattaacaaaaaatcgatcccaaagaaagaccgttacaagatacttcatattcaaattggatctgtatcgtcgacgagtaatcataacaatgcccaaatcagaccgagttagggcaaacgagttatattcaaacccagattttagatcggcgaaatacaaaaagcaatgatttcacacgcgtatcgttacatatcaaacacaacccagagaaataaatcatatcgatataaagaaatcaaaacaacgataacctactgaaactcaaatcgattcatagaattaagaacaaacctctgacttgttcaggtatgtttgccctcgtcgccatgatcgctcaaaacgcacaaaacagttttcaaagttttgaattagcaaaagtgattatgagatagagagacaaaactgaaccacgaaacgtttataattgcatcggctgtggcacatgatgatagttgaaacaaacagagacaaatcatctcaaatagttgtgattttcataatcaaagaaacaacgatcaaatcaaaacacatgtaactgatgttattcaaaaccataaaacgttgatcatatatctatttaatctttcaaaaactagcaataaacaagattaacagagatgatacgaagatcatcatcacactgattcttctagatcgctaagaatagggtttatacctgagagatttgtgcgtttgtgttcaacgatcgaagcaacagacccagattcaatcacacgcttctgttctggaataatcggaagagaattttgaagtgaatgaaatgatcgatgaatcaaaaacaaaattaaaatcttggagagaaatgaaatgaatagtttgcggagagaaaaggaaaaagcttggtatatgtaattacgaaatgcccttgtttattccgttaaacaatttggattcaaaattgaaaatgagaattttccccctgatctggatattttgtgtccgttaaacttaaaacactccacaaaattcaaaaatacatttcgaatcacatgggctaatatatgatttctcaataccgtgttgtgtagtgtggtttccgatttgtttttgtaaaccgcaatttcaaataaaactctgttctctctcacataactttcagagagagaaagtttttgatgtttacagaccggaaattttccggtgaatcgctgtcccaagtgttttggactgttgcccgatatcttccagttctgttagtggagatagccggttatcgtccggcaaatccagcttctatgagtggttttggccggcttctatcttttctgccgtcgatcggttttataaccgattacttttcaagttttttcatgttttctttcaataatttctatagatttgagttgataattagtttttaagtacttattacttaaaactaatgtctccggcttgtctttagaaacctcaatttgcaggaaatcattcaagcaatttcatcttggtttaaaggattgcagaatattctgatgcatatgatgattctctcatgttgtgtctcttttagagctccgttcagatatatttcggtggtaaacaaggaaatttcgtgcgaagtttcgacgatgttttactcaccggattcggtgcttctcgatggcagaggctgatgtcggtaaacttctgttgactcatcagaacgtgttgctgttgtaatattaggtcaacacttgtctttagatagagtccaatatcaaacagtcttttgccatagatgttaatgtaatgggccattgttgggtatcactgttaccctgcttatttacccttttgtggtttagtaaatttcacttgagacaaaaaaaaaactctgttttttactcaataataaactgtgttcctaagaactactacaagaagtgtttaaacaaggaattacaagaaggaataaaccctaagagcatttacatgtcttaactataatttattggccaaatgaagagagagaaatttgttggcaaaatgaagagaaataaatttgttggccaaataaaagaaaaaaataaaaaacaatagcaccaaccaataacatgatgacatattcgtgtcttccagtatcaaaaaatatcttcccacagacatcaaagccaccttgtctctcctgttaagcgcattaattctcatttttctatttttttattctgttaaaatttgaagataccctctaaatttgtccgatggggatggtctaaaaagataaataaaaaataaaaagtacttaagcccaagttatgtttaaaacaaagcccacgaactaaataagatgagaaacaaagtaaagatgtgttgaatcaaaagtttatagtgttttataatttaaaagaaaacatattctatatttaacataatatattttatatatctatttaatacattgattattatacttagatagtttttttttaatttcaatagtaaaataaagtgaataaaaataattaagcaaattgattctttttacattgtcaataaaaaactaacgtattattgtacaagtgcttttgctaaaatcgttatcgtcaattttctatatattaaaaaaacattaggacatttttttgtttagactaaagagtatgtaaaattttctatactttttcactatgaattctgatttaattttcgcaaaaaaactttctatttttttaccatgtaaattttagattaaagagtcatctacttcaataatttctaatgaaattaataaattaataatatttattttcatttcccttttaatttagtgttgaaattgaaaaaataagtaataataagaatcatacaaaatatattttctgttaaatatagattgtgtttatttattctataataccataaactattcaatagaataacttcttaagaatattaaaataaaaaaaaaatcatttttcgaatatttttgttggtcaatgctgatcaacattggtcaatactggatttcaacaatttgtataccggaaaaagatgttcattgatcacatgccgtcatgtagttggtatatgtggggatgaaatacatctagttcgtgtagttgattgtacatttctaaacttggcatgtgtggctatgtattccactatacttggtgtagctatgtattccactatacttggtgtagctgattatattttttcctatgtattaactcggttcactgtagatttctaataagagattggttttaaaactaaccaatcttaaaataacctctcacgatttgggatttgttgataataataatgggaatgttccactattaggcacttttaaaagaatgtttttccgtttgaggcgctttatagggaatagacaccttttctactaattcatttttttatagacttttttaccctcaattcaatatttatgtttttaattctcaatttctctttattgttatacatcttccacgatccttatcgaaaataaataaaatatctgtctcttttttttttctctctctctctctctctctctctctctctatgatttgtagcgcctctctctctccacgtctccataacttttggagaagtttcttaaacaattcgatctcgattatctcaggaatttggtaaaagttctatgtccataaggtcttggaggtggaggtctctgcaaactgtaacaaaatcaacaaacaatgttttggtgtccataataacgagtccatttaaatatatcccttcggaaacctttttactgctctatatccattctgtataccatgtccatgataacaagaaattcgattaaccggaatctcgatgctacatagatgaaacgagtttgacacatgagagagagagcaaaaatcaaatcaagccgccattgttgaagaagaagaagtttcttagataactgaatctcaaatttaagtcaaaacaaatatttaaatttcaaaataaatcacaatcttataagaaaccaagacctcgtattctccaattagtctagagagaagagaaagccatcgcgtagtgtggatttggagattaattgcagatttggaattgaagatattctggaaaaggtttttttcttcgataaagtgagaaaaaagaaaaaaaaagagaagagatgggaaaaggagagagaagagatggccgatggaaaaaatgtagttaaagggtaaataagtaaaataatttatctaaattaccttctccatttaaagtgcctaattaggaactaactttaaaaaaagtctctaattacgtaatattctcaataataattgaaatcataatttagatataaaaataaaattagcaatacttacccatataagattgggttcttgaaaatcattgctcaagagatctgttcaaacaaaaaaaatcatagattggaatttcaatcgaaacatttggaaaaactaaagtctaaatctgaatcaataataaccttacctctttgtaaaattccagcttagctgctagaaacaggaatatcactctcatcctcaagctaatttttccagcctcattgtacttcatttggcgggagaggaaccaacgtcttcactccgctacttcacgtcctactacttctatcattaaggaaatcaagatgatagttaggacaaggcttgatcctctttctagggctcagagatccacccctcctgccttgaccctcctcgccacttggttctccttatcccaatgacattttcagttgttgtttcttttgtaggcttggtttcattgggttcactttgtgtttggaccttcctcttgctgcgggggctgcgtcctcttgtttcgggcctcggccttgtttgtttctgtttcaggtttgcgtaccccttctcggcatttatcatatatgttatgtttttctagtaaaaatttaaaaaaaaaaaaaaaaaaaatttcagattagcgattaacagatgataaacggtgtcatagtgtattgattatcaaaacaaattgcaagtgattcatactacgaacaaccgtttgattttattttggtgtgtgtttgtttagagaagaagaaaagacaaggtttcttctagaattatctattcaggtaaataaacatttatcttttcaataaaatacaaaaatcaatcaatatgtgaaatgatctgaagaaagttttgtgggtttcggcccaaaacaaaattgtcatgttattcattaatggactcctaaattattcgttgaagcaaacaatttttggcattttattagatattcgataaataatcataaataatagacttatttgtctaaaaaaccacaaaaacaaataaaaattgtatgacttttttgtgttgtcgtcgtcgtcgttatcaaccctcatcatcatcatcaccaacgtaaccaccgacgccatcatcatcgccattaacaactggatctgtctccgtttccatcaaatctctttctctctctgcagatcaattgattttttacaacgtgattgaagcggggctagctccggtgacgatagttgattggttttgtcccttaagatgagctccttcaatggtaacgaacggcgtcggcggccgtgaatcatgagagagatggctcagtttctttttcttttctctgatcttcctctttatcatcagattctatctcagaaacttatcaatgtgcgtttgattttttttgcttgggttccctttacaataatcattagggtttagtttttgaatggaattctcttccaataaacaaaatatcattaatggtgaatagtgaggacgcaaatgattattgaaaagctttgatttcgaatactcgattgcagatctgccacaaatctgaaactctgtttttactattcaccttcttcttcatttgcaagatgatttcatttcgttcgtttaattttttgctttggtttcataaatactatcatctttagggtttaattattgtgaatcaatgaatgtttttagttagaatagattttaagaatatgagatttggaaaaaaaattggatttaaaagaagaggagcgtgcaagaagatgatgagagaagatgatgagattattcaggggtaaaatgatcaaatcgccctatcaaaactactctttttcaaagatcatacacaaaagcctcaaaatcaaaatttttatcaaaaaacatcctcttttgacaataacccctaaataatattataagtattatacactaatattctgcaactgtccagattatttatcatttaccaaagaaatatattaaaaattatatttatctttaaattcaatatttataatggatcaaacatcaaacaaatttgtataccgaaatttttttaaaacacaaaatataagtttctccttaattttcttttatgaaattttcttctaaaaatagaataacatataaaataatacataagagagaaatcatgctttattttacagagaaaaatagagatttacattggagataatcttatatgaaaactgtaaaaaactataaaatcagggcgaaaaatgtgtatggtaaaaaaacttaacatgtggttaaaggttttaaaaagattacagaatagttctctattgggccttcgaaaaaagcccaatacccaacaacaaaaacgcgcgtgtatcacaccttcaatacactagtaagagtcacacagtgatcgtcaccggtaaattagttggcaaactccgcctgctcttcgataattccgaggagcttcttcactcttcttatatctcatttctctctatctctctctctctctcgcattgcgattaacgaaattcgaaaaatgtctcgtcttctccaaacacccttcttaccttcagtttccctccccacaaaaacacgatcttccgttacgggtttccgggtaaagcccagaatcatcccaattcaagcaaagatccgagaaatcttcatgcctgcactaagttccacgatgaccgaaggcaaaatcgtctcttgggttaaatcagaaggcgataaactcaacaaaggagagagtgttgttgttgttgaatctgataaagctgatatggatgttgagactttctatgatggttatctagctgcaatcatggttgaagaaggtggtgttgctcctgttggttctgctattgctttgttagctgaaactgaagatgagattgctgatgctaaagctaaagcttctggtggtggtggtggtggtgattctaaggctcctccggcttctcctcccacggctgcagttgaagcacctgtgagtgttgagaagaaggttgcagctgctccggtgtccattaaggcggtggcggcgtctgcggtgcatccggcgtctgaaggagggaagaggattgtggcgtctccttatgctaagaagttagctaaggagttgaaggttgaattggctggtttagttggaagtggaccgatgggaaggattgtggctaaagatgttgaggcggttgctgctggaggaggagttcaagctgctgttgctgttaaggaggtagtggcagctcctggtgtggagttgggatcggtggttccttttacgacaatgcagggggctgtgagtaggaatatggtggagagtcttggtgttcctacttttagagtcggttacacgattagtacggatgctcttgatgctctctacaagaaggtgagtgtgttttgaaatccgtttggttggtatgatagagtagactggagattccattgattgtgataatagttgcttgatgaagttttgaactttgggatgagattatgagagatagctagttgaattataaatgatagtatcttatgatgtgcatcagaagcatacactagttacaaactgtaagtgtaaatgttgatttggttcacattttgtgtttggtttgtttagattaagtcgaaaggtgtgacaatgacggcacttttagcaaaggcaactgcacttgcactggcgaaacatccagttgtaaactcgtcttgtagagatggtaacagttttgtgtataatagtagcatcaacgttgctgttgctgttgctattgatggtggtttgatcactccggtgcttcagaacgctgataaggttcttttcttttgtatgctttataagagattttgagtttactctgtattcaaaaccggtatcagtgggttgttctatcttttgtaaacaggttgacatttattcgttatctagaaaatggaaagaattggttgataaggctcgagccaagcagctgcagcctcaggagtacaacactggtaatcctactactagaatattgaagtgatttgagtttgagtaatccttcaactagattgtttgagtcttgttgtttttatttcccttccgggtaattgcaggtaccttcactctctctaacctaggaatgtttggcgttgatcggtttgatgctattctaccccctggaacagttagtgcttttacctttatgcgtgtattttagtttgtatcttggttatgtcttttagcctaataattatgctaaggataacagctcattggttttcttgtctttgatcaatgaagggagcgattatggctgtcggagcatctcaaccttcagtggttgcaactaaagacggccgcattggcatgaaaaaccagatgcaggtaaatgttattatcaaccatcgttagaacttgttcctcttctcctttttgtcttcatgaaaacgtctcgagttttcctgggaacttgttaatgatgactggtcacttgcaaacccacaggtgaatgtgacggcagatcatcgtgtcatctatggtgctgatcttgcacagttcttgcaaacattggcaagcattattgaggacccaaaggaccttacattctaggccaaattactgcttttcgcatcccagtcttctctgcttttgattccatgggagcttgtatttctgcggtaatcagtttctttgatagaacaaaccttttaagattaaacataatcatttctttgtttgagatatatcttctgcaacattttctgcatggaaaggccgtcccacatgattttgctactgacttcatatatatccacttcatgcgatgaatcttatatgaactgataactttagcatgattaataacatgaatcttatatggactgataattttcaaactacaactgtgaatgcattacatctttcctgtttctctcagcatctcaaaaatggagatgcagatgatagtctgtcagaggaaagaaacctctctaatctctatgctgcttatacatacagatacagtaacaagcaaaaatttacatatcatgcatctgacacttttaattagagtcttgtgagcatccgtagaacagtcttcatctttggtcttgccccaggagagatgtttatgcaggcaagagcaacaccgagggcacggagcatctgctttgttgctacagttgatgttttgctcactctgagatcaagaatgttgttctgctgctcttgatggctcgaatggctctgcacccacttagccaaatctcttccttcacttacagctggccttccagttaacaactctaaaagaatcaccccaaagctgtagacgttcccagccattgtcaccctcatcgtgtaagcatactctgatgaagtgatcaaaagtgaaagattaagagagctgttgtttctcagacaagcccatataagttttgtataatgtgttcacctggtggaatgtagccgatggtgcctgcaactgctgagaggctgctgttgcttttggaaggatcgattaccttgaacagttcaatgtcccctactagaggctcagtgagcgacttgagtagtatttttttactagacagatctggtagaaggattggatcacgaccgctggattcggatccatgcaagtaagagattccctgagctatgccaaccgcaatactatacctgcttgtccaatcaaccacaccactgctatggttgtgtagaatctcgtaaagtgtacatgtgtgagaaaagtcatagatgagtaagcatccttctgaatagaggacataagctagtggaaccattacgtttgtgtgatgtagcttgcccaacatctctagctctacctctagttgctcactactcgcttgctggaaaaccctgtctcttgtgttaagttttttgatgaagtaactcgaaccagagggcatgacaactctgtagtaactccagaacattgtctgatgcagaccatgttctggatgcgcaacagcttccacagctttggcgaagttgatgtttgatctatgtagagcgtttgaagtgagaagctttccatgaattacctcagggagaacagttgacccttcttcatctgggtcgacctgcatgttgttaatccccttgcagcgccttgaaaatttcagcacggtgacagttatgatccctgtaagcagagcaagaactccaagggagacaaatattacaatcataactagtttgcttttccctgatggatttctctggatagagacttcgttctcagttttcaacttaaccccagggtttcctctgacatcgactgaaacattatgggtgaaccttggaatatttccggtaagctgattgttggagagtatgagctgtgtaagggacattaatctgctcaggaaattaggtatttcgccggagaagttgttatttgacagatcaagaacttccaagcggtcaagttcagacaatgtagtagggatagatccttcaaacaagttgtagctgagatttaaggaaatttgcaactttcgtggcattactgggatcctccctcgtagctggttttgtcccagctgaagttctatcaaatcctccagattttgaatgttatcaggtatggtaccattcagattgttgccttgcaagttcatgttggaaagcctctttagctgagaaagcgaaggcggtatggatccacttagagaattgcagctgatgttaagaatcaagaggttactcaaaaatgcgattgtatctggtatttctcccgtaagcttgttttgctgtagttttatcacttgaagcctgctaaggtttccaaatgcaggaggtaagatcccggtgaactcgttcatagccaagttcaggagattcaagctcacaagatttccaaatgaaggaggtatgaagccagttaaactgttgttgtccatctccagatacgttaggagctgcagcgattcaaacgcaacagagggtactgaccctgttagcttattgcttcctagtcttagcctaaccaggctagacgaaatgctttgtggtatccatccaacaagttgattagatgacagatccacagagacgagtttaagctgcgacaaaaggtcacctggaatcgaccccgctaaactgttgaaactgagatctaagttctcgaggtgttttgtgagccctgatggaatttctcccgtgaatcggttacggttcgctgcaaaccgacgcaatgtctggatgcttgaaagtgattctgggattagtccactaagatagttgttggagagaagtaaactttctaacttggagaggtttcccaacgaactcgggatagagccgttaagctgattatcactgagatctatcagcgttagttcttgataatctttgatgccttcgggaatagtaccgctcaaactattatctgaaacctcaagcttctctagacttttggtcaaatgaaccggaacagaaccagttaatctgttgaagctaagattcaaactcctcaactgaaccaacccatcaaaaccatagtctccaacgttcccactcaacacgttgtgagagaaatcaagaaccgccaatttggagaaaccgcggaaaccaggggaagtagaaaacttgttcgtgctgaagttcagatgcttcagagcaatgagtctttcgcaatttgtaacgaacccttctgggattgagctcaatctgttgttggagacatcaagagactccaaagtctggagattgcagacaagtggtaagaaggaagaattggagagatcaaagttagagagagacaggctaatcacagagctattgtctggtaagctgcagagaacaccgttccatgaacatggattcctctcagaaccaggaagattccaatccgagatattaaggaaactagagagttcgatcattgtgtttgtctggttcaacgacaactcagagaaacatacatggcaacaagataagaagctgaagaagagacagaacatgaacttgcctgtttctggaggaacatgtatcttcttcatctttttgaccccagtgaacattgctttcaagcaaaaaagatgaaaagcttaacgagtagagagtgctgagaaaatggaaaaagagaggtcacggaaagtgaagagaaattactacagtgaatagtgtgtcgtgttgattgggtcgaaggagttgacttgactgatacgtttttcatgtgttttgagattttctgttctgccacgtcatcactctttgtttttaactcttttttttccatcctttttttttaataataaaagtgggttctcttttgttgaccataatacaagttttgttttgttctctatatagaaagaaaatcatggagaactctaaagtctctctaatcattcaattgttcagaaaaaatgaaaaaataagccttggaaatttcaaagaaaatgtttaaataattcttattgattataatatataaattttaggagttttaaaggctagagatataaaaaaattgtcaagcatgtttcagaaaatatattatattgactaatcatgcaagtttagttattagtagtattttctagaaataaacctactggtatttgtttgaagtaaaaaatatgtaatactcacgtatccttaaaataaaaaaaacgagtatatgtgatatgttctttatctataacataactaattgatacgtttcgtggcttatgaaatacttgaaaaccatgatattgaaaaagagcataaaaatgattcaatatcaccactaacaattgaagaaatatttgaaatcatataatattctcaaaactgaagataagaaagacttaaaagatgaaaagattgtttcttatgtaaagaaaatgaaaaaaaactaaaaagacacttcaattactaacattttctactttccaactaatatatagtttttaaatatatatgtttttgtgcactaactttttgatttaaactagaaagatacaagaagatagtttatattcgaagaaacccaaatagcaagcttggaaaataaagtacatgaagatatataaataaaaaatagaaacacaagctcagtgaaactagatagagcatcaaaagaaatgacgaaaacaaactaacacgagcaaatatatgataaaaacacacattaaacaaataatcaccaactgggtaagtagatagtcaccataccttgtgacgttttgttacatgtgttttcaattatcagttaaaaaatataaataattgtttaagcacaagatgaaattttgagatgaacgccgataacttataaactgttatgttggtatatgaaaagaaaaagaattaataactaatgcataatcaagaaagaaaacgatactgaaagtgtgatgagaaaatgcaaatcagagttgatggacgagtaagactcgaccctataaatagatatgaatgaaaatttttttttggggggaggaggggggaagagggagagaaatgagagtaagctgctgagagccctcattgttacaaagaaggaagccgacaaagaagaaggtaagagggacactgaaccacctccaatgattctcgaattcttgctatggagttcgtgaatgttcatacattggtttgtggtagagtgttagatgagtaaatcagcaatttacgtaatcatatgggttggggtattttcacggatgtaaactagccctgggagttcggtagagtcgggttattcgggtcgggttaatcggttttgagaaaattcggtttttgaaaaattctcctgaattgaaccgaaattaacttcggttcgggtcaatcggtactcgggtaattcggttcggtttaagggtataaaattaattccgaattaaattgtttattttttctatttcgggtaatttgacccgaattacaaataaaatatggataataggcttaaataaagcccaaactcattattattaaactgcatttacatacccaacaaaacatttacaaagcccaaacccattaacatttacatacccaataaaaagtttacaaagcccaaacccattaacaattagggttttcgatacatttgttgacggtgaggcagcgacggacggcgacggccaatctctctaacctcaaaaaaaactaccaccaacgagatcataatcataaccacatgcaatctatcatttaaattgagaaaattagaaaaataaaactataaaaattgaaaatccgatgaaaatcaataggatctagagaattaccaatgaatccatgattttggtgataaggaaagcttagcgagcaatcatcaaagaatcagacgaagatacgattaacgagaatagagaagagctaacaaagattgagatttgagagaatgaaagagcaagttgaagatgatgaattcatgatggagaagaaacgttaggctggttatggactgattatggatttggtaaaggaagaagaagaactctctatttgagtttcgtaagaggcagcgcagatccaaaaaattgagactaaattagggttaatgacccataatctttatatatggctgcagattctcggtttaggtaaaaccgatcgcttccggttaccgaaccgacccgaaccgaaatccgattacccaaattaattttgccgatcggttacgtggattctgttcggtttacgccgataaccgaaaatttcggtttgatcggttcggttttctcggttatttccgaactcccaggcctaatgtaaacatatgattaaggtggtagttaactcattgatgtcttcgtagtagatgactactgttgagggctagaactgctcgatggttgcttgatgaatcagaaataccactataaaagaaattgatagtataaacgaaatagtcttatccttgttttagatctttcataaaacttggtgaatagactactcgacagctatactcaccgtaaacagtttagtcaaatggtaaatgctcatattatctacggttatcaaaacgttactggaaaataaattaatatatggaaaaaatatgtaaaattagatgacgatgctgttttaaaaacaatcacatagtagtatcttattccttaatctcccaaaaaacaatctacattgattgttttaatacaattcaagcatgtgaaatgaagaaaaaactctttaccaaaatttgaatactcgtgatgccgttacacccgatctatgataacttttatatctttttctgcctctacttatttatttatgaatttttccccaatcatgatagttgaagtatttattcacacaatactttagtttatgtataatttcgacttagtagttttatttgaatatgaattggccaaactccctagttttccatcattatatattaactagttatgagtggtgacacaattgtagtgatagatttaaggaaatatttactaaaagtataacatatttaacagtatcatttgtttatgtctccaaaatatccggttttgcaagtataataataggtagaagataatctttaatttattgaatgactatatacttcttgttacacaattttcttttcaaaatatcataaaataaatattacactcaaatttttagaatgtagatgtgatatgtagattgtataaattagaaagaaagcttaatatcacgacaacaaggggattttattttatttatggacgatggaaacaaaagtgcataatacaaatgcatgcaacaacaaataagagaaaaataaaaatagaacgagacaccggtaacatttttgacccctttttattaaatatgttttgattcttaattcaacttgagagactcttactggacttcaggtttttgacctcctcttttgaatatatcaatatcttcttcaccattttgcagaattcactccatgcaaacaacacaaaaatgaaatatcaatgtctctcaagattttaactaatctttcaatcaatagaaataaaaaggaaactcacggccatggatcgtctccaacaagcatctcatacccgtcactatctgtgaaagctattttccattggttgcgagtttgtaattggcctttgatatcaaagagcttctccaattctagtattagctgatcatatccattaagaacacttaaatccacagctcttcctattgttacaccttgcatttgaacctgttccatataaagattgtgtgagttgagtacaatgagaaaaagtttcatatataaggaataagaatatattgatcttatacttactttggtacaagtcctagaagaactgaactgcttgctttggatctctattggtgatctcaaagtttggctttgaccaaacttttttctttcagtaagtttcgaaatatccgagccaatttgtttaatgggatctttgatcatcggaggagtgtccagagtgactccaaacagcctaaaattagtgcctgccttggttgttatattttcttctatttgtgtaaccatttggttattgtaatttagtttgggcattggttggacagggtagctcattagcaatctagaaggattcatagcagcttcagttgtatcacgataacgaagagaaatattcatcggggaggccacgcttagttgtccaatttcttgtccttgtgtcaatataggaggcaagagatgtgatgatgaagaacctgtatataaaacatgaatattgagaaggaatttaagaatctcaaattcattaaatagaagattaattctttaaataaaagattataagagtctctttttataccgaattcattaacttctcgtaaacgcttgttcttgagcaaagatgatcgcggaacatttaacgcaggcactaaatgttcgatctcccagggtgacactttattaggtctcgaaaatgatgcaaattcatcccactgcacctgcaaaattaaagttaattagtgatatgttatttattgcactcaaaaacgtattcctaaaagaatgttataaagtgtgaatgaaattttacttctaagctgcgccactctgaacacttccaatgaggagagaaatcactaactccaataattgtcccaaaatatcttaatcaattgaacaaaatgtgttatcataaataatattagacattataaatatatttatgcagaaaataaatttcatctaatgttaccttctttcagagaaatcatcaccctcaaaccgcattgtaaatcttgaaccgacattaaacttattgttcacagcgtctaagaatttgtcataactgacaataaattgacttgacctgatacttataaagacacaaaatataaacctatatgttgaagggactaatctattgatatatcaatataatctaaaatgtgagttcaaatggttctttcaattaccttggcttgtaaaccacaatgaatatacattggttatcaaaagcatgctttgcggaagcaattaccccatgtctcatacaatctattgatactattgatgaaggtatattcccttgttgatgtcttgctcgtctgataccaactcgtaactctccagtctctcccctaaaatcacaagtaaatagtttaaagtccaaaactcaagaatcaaaagatatataacaagaaccaatattatacctaacgaatacaataacatctcctttaaccaatttctttgatgttatgaattcattccaaccagttgttaacgaatgtctttgcggtgtaccttcatggaataagaagattattagttacttctataggatttattacctcaatagttgtgtttgaattatttgaataaaatgaattattacctctatagttgtgtctgaatctccattgattatcatggagatctatagcaagaatttcttgtgccggtagaggctgagacatatcctaaaccaaaatttaatatgtaatgtctaatgaaagcttaaaattcaaattcgtttaaaaaaactataacattaaataccagcggagggagacattcaatggcatgttttttcggaacagagaatccaccataagcgcttgtatctgaggccgttaaaacctttgtaaaggaattaactaatggcctaaatcgattttcactctgagtagggattacaacttgctaagaatttaacaaaatcagaaaaaatcagaaaatcaatgagatataataggagaaaaatacaattgactgaaaataaaagagaaaaatactaaattttcacttacagttgtatctggcatcaaagtgatctcagcataaatctcatcactattgttttccacctataatcaaacatcaaacatcaaacaattaaccaattacttctttttacaataaaatcaaatatagatatcatgcgtattcgctaaaacataatagagatataccttaagatgaattgcaataacacgacattgaagcttagaaggaagatcacaaattggttgtaactcattcaactcttctcttgtagatgcctgaacctgaaaaggccgtcaaaaggtttcatacacgagagaaagatagagagaaagaagagagagagagaagaaagggagagagaaagacgagagagagaagagagaaagagaagagagagagaagagagggagagagagagagagagagagagagagagagagaaacaaaaagagagagaactcacaagctctatattgccttgaggaaagtaataaacattttctccaagttttggaatatcacacaaaggccctgcacagagtttccataactgctcgtacatatagctcttggatccatcaactgccgaacaaaaactaaaacattataaccaaaacaagttttcaataaaataaaataaaaagtcaaaatttcttacttatgcctgataatttaggttgtgcattcacaatgttgccactttccataagctcgtatctaaagatcggtataccaaaatatgttatctcaacaattattatacaactttctccttttcctcaacttctctcgcgaccatgagagtacaaaatatcacatttataggtaacaagtatcaaaatacattaaaatacttccttagatttgaatacacaatttaataaggttaccaaaaattaataaaggtaatttagagaaatgtcattaatattttgactacacataagaaaatcaattttcttatatgtttattgattaacttaccaaaattaacatatgcattattcatatataagttgagtaatataatacagttttaatacttacaatgaaattttttttatgaattttgtttatagatagccatataaatttaaataggagtttttgctagctttttcttttcaacatatgcattattcatatataagttgagtaatataggaaaattttagtacttacaacaaaacatttttttctatgaaatttgtttaaaagtagccatataaatattaaatatgagtttttgcttgattctgattgtatgaataggaattctctagcaccgtgatgagacctatcatatgggatctatggtacatctcatgttagcttttttttttgcttcctctttaagtttttaaggatcccttataaccggttttctcatatatcgtccctctttggagaaatctccaaggacatattcccttttccatttagctttccctttccaattagctatgatgtgaatttgcatgtatcccatggctattgggatgtccttggcatcaggggtggatcaatggtggtggtgatggtttgaccttacaaggggatgtggcttatagtatgataaattccatcaaaaatgtacaagggcttctcgctccctctaaacctgaatgtcatttaagcatttttgctctatgttttatattgatgattataatagttattaatgatattatttagcttatagaatttgttttttattaaattattaattgaataaatttatttaattcattaattcaataatttaaatgactaatcgttttctccaaaccatttgctaaatgaattagattgactcattatccattagaaactaaatttgtatggatatagattggtttgatttggtttaaccaacttgacatccgtaaatataacacccacaaaaaaaaacttataacactcctgtccgacagtcggtgcgccacgtccgggaggctttaaagacttgttaccgaccctaaaaattaccacatgatctttctccatgctttgtcctcactcgcatggttccgacagttactttccgaaaggtcatccatcctgaaactactccagcccaagcacgcttaacagtggaattc

SEQ ID NO: 1168 - DNA, 110619 bp, Arabidopsis thaliana
gaattccattaaaccaatttcatatacaaatatatagtgaataattttcaaacggacatttctctttggacttgttctcctggacagaacatatatttagcataacaattacagataaataactcgactataaaccactgcagacgaattatatatctaatattacaaccaccaccaaatcaatacgtaatattctcaaataaatatgtcatagagcataacgacaacggatcgttcaagtaagcaccccttggatgttaaaagttacatcttttcctcgcagacgaacttacaccgttttggcttcaatcagaggaacactttcacttgctataaatacctctcctattcttgactctaccaagacaacccaatcgcaaaagaaaaacaatatcctctgttttcgtttctataattctctgtttttcgttactcttcacttctccttttcacgatggttaaacatcaccatttgtacgagttgtctccgatggttactggttggacgatttgtgtcatggttttgaggatttacaaaaaaattctcaacccgaacgctttcgaactacgtcttgttttggccgatgaatgggtaaacaattttcctcaatttgttttgcaatttgcagaatttttcgttttccagtgtatccctcacccctaaaatgttgttttcacagggcacccaaatagaagcaacaatcggtcctcgtttctctgccttctactttgacaggatcaaagagaatcaatggaaaacaataactacgtttctcgttcgacctaactgcgaagcaataaaaacaactcctcatcagtttcgcattctattcatggatcacaccattgtcacttcttccacaccaagagaaacaggtttactgaacaagttcactccattcgactacattgtggatgatgttgttggcaacgataccttggttggtaagtaaattcttctttataaactccattcacttttttcaaaacattactttttttaaaagatatctccaacatatctcttatagatgttatcggggcactcgttaatgttgggatcatgactaataccgcaagtaacgagaatgatatggccggattcaaattgccgttcacgatcatggataaaaagtacatttcttaaaacctcaatttacagtttttttcaaacatatcatgtttatacattattatagtaagtatataaccacatatttttacatattttcagcaaggatacattggtatgtgaggcttatggagaaattgcagtggacttggagaaaagatttcgagcatttcgcaagaacaatgttgttattgctcttgcttggtggaaaattattagattttatccaggttgtaactggtttaagattgttagccatgcacctatatcaaccatgtatccagaacctgatgttgaggaagttgaagaaatcaaaatggttgtcgactaatagaagatgattagaactatctcatcttcttttattttttttcaaagttgtaatatttttataaatgataagatatattaataaaaaaagttatttctttgttcaaaatttctcatttgtaataattgtaacaaatattttattaagtagtacaataggaatacggtgtataaattaagtgcaccttactaaggaacggttatatcaagattacaatctttttatcagaaattagcaaattgcttgagttttaaaaggaataaaattggtgatctgaaaatattgtttcccaacatatctaatttctcaacatatatttgtttacatgactgatagggtggattgttgaaacttttagttgaaatccataagaaattactatcgtggattgttgtttatggataggttaataaattactttcctgacttttataccctaattataaacgatgtattctcttactttttttcgcatctgattttagttccctcctcaacattgagaaactgatttataccgggacaatttaccacctattataaattgtttaatataaccgcagaaaaacttaaactactctttccttaataatctatataaacacccaacattcattaatgtttttcccattacccatttcttcagttaaaaccaaaaaacagagaaattatgcagaagtttacgaagataagcaacaatgaaacatcatctgcctcagatgtgaaaatggttgttcgtccaaacccaaagtacttagtattctacagttttaactactactttaataaaaatactaacaatctctttcgttttttttccaacaggttgctgctatccaagaagtttacttgccggccccgctgcttgctaaaattgttagctacgttgcagaatctggtgttgattctttgaaatcctttgttaaggctggtccgttatttaaagcggctgtctattccaaggaaacactaagttgtgtccgccttgacagatctcggtattttatgtggtggtcaatgcctcattccatctattatcatttctttacaaaatgtcttgaagccaacaatccacatgctttaactgctgtattatacaaaagaatagcatacgagaatttggttgttgaatgctatagatctagtttatggatggaaccttatggagaggacggaggatgggtacaaatagatggagcttactgggctcaaccccgagttcgagagagtattccacgttgctcccgttgcaaatctcgggcacacaaaagatctaattgtccaaaatattgaaagacaatgttttaatactgtgttatccatcattatctgtctatctacatgtttctatttttctaaaacttgtttttctgtttttaagcttctgttagtctgtctttttaatgttatattctcgtttgctattcaatcttcgtttatatatttgctaaggcttatccatcttattttgtggttggtgtttcatgattacagtctatgtatgtattacctgattgtttatggagaacctgttcccccataaatgagtccctgttcgattgcatgttaaaagacatccacgtctatattttatataccataaagttgtgtctatttggacaacaaactttggacacacaatgatttattttggacatgagaaaacttactcacatgtctaattttttaaaaattttgtaggacccacgacgtcgctactaacccatctcaccaccacaccccaccctcttcaatgtgacaaagtattagggttcccattctatcacgatctcaaagttacaaaaattttcattaatagatcgctatttgtacaccttcagtactatacgaatcgataatccaaaatgcccaaaatcgtctgcgaaaaaagcaaatgtatccaccctcaaccaatggcacctaccagacatttctggcgacccccaagtgcccttgcatctattaggggaaatcaatttgccgtccatcctcctcgtcaagctttggttcaattccacctacaggtaatgtttaactactaatctttgctatctgaacaatcacccgaatttaggtttatcatttggaattattttatatcagcctcctccgttctctgatttccacatgcctgaacacgtagctgctaaaatagtaagcttagtttcagaggacggtgttgatatgttaaaggcttggattcaatcaggaccagatggcaaagccgctgttttttccagggaaactctttcttctgttcgactagataagtcccctgtattcattcacatggctcatgaatcttctagttatcacatgttttacacaaaatgcctagccttcaaaaatccctatgcactatatcttcagagtttagtgttggcgtttcatatgtgtgagctccaggaagcaattgctattttggatggtattaaagacgtgttcccacatgctggtctactttacatcatgctccatagttgcgctggatcaatcccatgggaattttatagtatgtacaagcgaaggtactacaaatttagtgaagtcgacttattcgcagataagctaatgttccatatcaacgaggttggtccacgtcgccaagggacatacaaaaattcctgggagtttgaggattacggtgagtgttggtcggaccatcagaacctcaatgagtatgagggacagtggtgtaacacatgtatttacttttacctctcccaagaagtagcccttatttcataagtacatttcagttcagttcttctttttgttcttcacatttgcggcaaacttaagaatctatgattttttttatgggattttatatatgaagttattatgtgtgaagttaccttacgatattaaggtaagtagtacttctccactattttcacaattataaagagaacaagtcctcgaccgttacctcgtctcaaacagtttatggaactgattttataactgcacctattctccccacaaagctttatccctctcgaatatctatattttatagaaactttcatttcctttctccctttataacccgttctgcgcaatacaaacattagagattctccaaaccccgccgatcaagatcttcctcctcagtaatacatccatccaccttccgctgccatcgttgttgtaccaaatcgtggacacactgcaaaacaggttttagttcgcaactaaacaaacaaatatgattcctttacttattcctaaaattaatcattcctctaacttatcattggcccttttagcagaaaatgaagaattccaggttatatattccggaaccaatacttgctctaatcgttagctacgtttcggaacaaggaatagacgctttgaaaaattggattaaagatggtcatgttgggaaattagcagctttctctgacgaaacgctaacccgagtgcgtctagacaaaagcccatacttcatctacatgtcttcctataactctctttatttctctttctactccaaatgtctagaaaaaagcaacccctacgcattgtatctccatagcttgagtctcggattccgctgcctcgacctgtgtggagccatttcaattttgagtacctgtaaagagagatttcctttagccaaactactctacattgctctaaaccgttgcgcaggtatcgaactcattgatgatttcaatagtttcaatcgcgagaacaagtgtttctttgatgtatccttgatggcaaacaaacttatcggccacatttctgcttcggaacctaaatgtttcggatcttactccgagacctttctttacgaggaatatcctgactgctggctaatacatgagcttaacaatgaatttaacggagaaagatgttcacaatgcctctacttctacctcttccgagacatccttctgctttcctagtttagtgagatacacatcctgttccagctttattatgttttcatctttcacgtttatctttcgtttagtctaatgtgtttggttattcgtaatctctactaattctaatccgagtttaatcacacgtaattaagactccttgtaattattcacatgttagtaaaacccattttaccagtttctgatacaactccttctcttacatagtagacaaaagataatagaaaattggatagttctatctgtatacaattacgttgaatagagatttgtatcataaaatatattaataattggcgcaatcaagctttactttgattcaaatcaacaaaaatacctttaatcattacatatagtaatggctttacaaaaaataatctaaaaaaacaactacaattactaaaaatggattataactacttttcatgttaaaacatcatctccatatggataagagtttatggatagttaaacgggattgcacagatttgcggtttatcaagatatgctaattatagactattttaacacaataaataaacatatatacttatatttggtacatcaagaactaggtttacagaaacggaaaaacatttatgggaatgtcttacaataagaaatgaaatattttacaaataaaatttctcattgtattagatcaacttgtcctgttatgacccaatctaaaaaaaacaactacacgtactaaaaatggattagaactactttacctgtttaaaaaacatctccatatggatatggctttatggataagaaaacggtattgcagaggattgcgatacaatcaggatataaaatcagcaataactaattataagaactgaaatattttacaaaaaacatagcaactagttttacaataagaactgaaatattttacaaaaacatggcaactagttatagatcatacatttattaacaacttaaattcaaaaatacaattttttatttgattagatcaacttgtcctgttatgacccaatctaaaaaaaacaaatacaagtactcaaaatggattagaactactttaactgttaaaaaaacatctccatatggatacggctttatggagaagcaaacggtattacagatgtttgcgatacaatcaggatatgtttcagcaataactaattataagaactgaaatattttacacataagataatagaaaattggatagttctatctgtatacaattacgttgaatagagatttgtatcataaaatatattaataattggtgcaatcaagctttactttgaatcaaatcaacaaaaatacctttaatcattacatatagtaatggctttacaaaaaataatctaaaaaaacaattacaattactaaaaatgaattataactacttttcctgttaaaacatcatctccatatggataagagtttgtggatagttaaacgggattgcacagatttgcggtttagcaagatatgctaattatagactattttaacacaataaataaacatatatacttatatttggtacatcaagaactaggtttacagaaacgaaaaaacatttatgggaatatcttacaataagaaatgaaatattttacaaaaacatggaaactagttacagatcatacattaattaacaacttaaattcaaaaataaaatttctcattggattagatcaacttgtcctgttatgacccaatctaaaaaaatcaactacaagtactcaaaatggattagaactacattacctattaaaaagcatctccatatggatacggctttatggataagcaaacggtattgcagaggtttgcgatacaatcaagatatgtttcagcaataactaattataagaactgaaatattttacaaaaaacatagcaactagttttacaataagaactgaaatattttacaaaaaaaaatagcaactagttaatcatcatacatatattaacaactaaaattcgaaaacacagtttctcaaattggattagaacaacttgtcctgttatgacccaatcctttgcagcgtgagcacctgttctgctgcgtccttcctgttttaggtttctacgtttaccatgttaaccaacatgttgcattagtttggttagtttttcaaaagattagacaatgtacgagatttacaaaatatttatctaaccttatattcccctgttgatggtattcttgctaccttaggcctccctgatggtctccgagtatatggtggaagcatggaacggtgtgggagctcttcgggtatgtcttcttctttgccatttgcttcagggaatactgctcctttgtaactcgcaacccatgagtgtggtttgaaataatcatcaactaaagccttgtacgagaggttaatgctattggcagccaccaaagcatgaccgcatggtatcttcagtttatcatatctcttgcaggtgcactgcttcttttctagatcaacaacattgctaccacctagcttcccaactacctcgtagctccagctggttaccctaccaaccttgcttccacttgatgttgtcaagttttttgaaatttgcttgtcaacctccggaggtactggacctgaatgtgcttgtgacttcttccgatgcgcgttgaaccaacgtgtcaacatagacctaataaatcttagcaattccacaatatgtgacgatctccccttgaacaacgccttgtttaacgtttcagcaatattgctagtcatcagattgaaacgctggccagggaaatatagccttgtccaatgagccatccctacatcgtgtagatactttatgcaaagggggttaatggcattaatctgattataaagcgttttaaactttccactcgtaaactcatatccagcgtttttcactaactgcgtcaatcctctgttcttgaaccttgcttgtatattcctacataggtgaataatacatgcaccatgatgtgcttgcggaaataccttcttcacccctacctttatcgattcgtgcctatctgataatatagtgagtgtgttgttatcagctattatcctctccaactttgtaaagaaccaagtccatgcatcatcgttctcgctatccaccacagcaaatgcgagtggatacacttggaagtttgcatcttgaccacttgctgtgagtaaaacccccttgtattttcctttcaaatgtgttccatccacaaccaaaacccttctcagatgcttaaaaccttgtattgaagccccaaaagctaaaaacatatataaaaacctctctttcctttcatcttcaatatcaggttcggtttctatatgtgttatcgtccctggatttgttaacttcagaagatgcaaatattcagccaaattgctataagactcttcatcactcccgccaacatctgttaaagctgattccctagctctccaacactttttgtatgacgcagaaaccctcaaatcttctagtacaagttgctgaagatccattggaacaggaccagcagaagcttcactgtattttgccttaaatacagatgcaatcacctttgacgttgctttcttcatgtactgccttctagtatcaaccgaacatgtgtgttgaagctgcgctttcttaatttcatagtaacctgtgccattcattacagtggccaatattctccaatcacatttctcatctgagcaactgagaacaaaataattctattttgttcttgtttgcttgaaatgaaactgattctttatcgcaaatatagccaatcctatttggcaatcttctttgctcgcatacacttttccctggtatatacctttaccatcatcatcaatgtccaaatcaggtaagttatcaacttcatactcgatgtcctcaaacaaaggtgggatgtcaaactcctcgtcatccacttcctccaactttttgacctcattactcgtttcctgagagcttccaactccaccgaccatctttcctttcataacttgtggggtcttttttgtatgctctgtctttatactttcgccagccccattcacatatatagcgtgatcaaagactccgctgccagtacagaaaaccacttcatccagattggagcccacaaccttattgttagacccgtaccttacatctaaacctcctgttgccatcaactcattagcattggagccaccataatcatctgttaagaaatttgaccaaaactccttatcataaccgccacagggcatactatcttcaggtttttccgtgactgcttcaacttcctctgtatcgttatcaacgaaaaacaacttttcaacatcattgttaaaaccttcgttatcagtatcattccgtgacgatttatgcccactgttacttcctatgtttgcttctgcttgttccaattcctccatgaattcgtcatcacgaggggtcaacacaattgtaggagtttttgaacccacagacgatatatcgcgaacagatgtgacaccacttttaggcgtttttgaaccacactcttcctccaaactgctttgacgcggtcgtttagtgctactatctcctcgtgtatcaaaactttgtaaatcttcctccatttcttcaaacttcacaaacaaattaagacctctgttttctctaagtgcacttagatagtacagaaggccaacctcgcttgtaaccaaaactggaggagtcttctcctttgttgtgaacatatccttatccggtgcagcataactcaacaaaggatttacaccaatcattccgaactctttcgaaatcgctgacttaaacgctcccagtgtcattccctcaaaaattggaacaaccctagaaaacagtttgttacagatctccagtttccactctccattcgacgaacaaacccaatctccacaaattaccatacaaaactcatccatcaatccctaaccaaaacaaaacagagcattcacgttaattacctaatagcgtaattgagtatcgtaaacgtgttacgatttttaaggatattttttcatggtaccttcgtggacatcgaaataatgactgcattacaaccgtctgtaatcgtcaaataactcctttctttgtgtgaagatctcaaccgtctctttatgcactgagtggatacgttttttttagataccgctacaaacctaagcaagataaccggttaactaattgattgatcatattggacactcaacaatacacaagtatgaaacactcatcaattttacattttgttttggatttattggacattatattgtggacataatattgtggatatatagaacacaatcagtataatggaaagttaaaaatcagcaaacaaaaaataaatcaaacaaaaacacataaaacattgtgggaaaaattttaaataatcaaataaaatcttcaattcattttttgcatgtatacactcaagtagagctgaacattttgggagaagcattaatatgatagaagaccaaattattaggaatcctcttttccctacaacaaaaacagatacatcactaaccaatataaatcatggttttcttttttatattttttgggtttgtctaaaaaagtccaagaaggaactaaggtcaaaaacatgaaagatataatttacatccctttacatcaaacataatcaatataacagtttaaacattcgacgatactggacaattatcagtgaacaaatatgataaaatagttggacatacagaagtggacattaatattttgcagtttatcttttattggacttgatatgttggatactagtttttttgccgaaacaatttctaaaattttttccatacgagtttcttgtttaatggtgctcaagtcaaacctccagcaccaacctatagtaaatgcagttatcgatggagatgatatcatttacagagactacgtggatatcagtatcgctgttggtaccctccactctagttattctaaacctttcagataactacaacttccatcatattaagattttcaaagtctgtaaaaaaatggctattgcaggccgatactaattcagggggagattcctaatcgacgcaaataggcctctccaacaaatctctctttctctctgtcacactctttatcactctctactatcgtagatcggagaatctcctctgagagctctaatctctcagtaatcttcaccgcatgtccggatctaattttcctgtaagtaatctcattttcaagatttatctgcgatttcttctcttgatgctaattttcctaattttccccgaagaatcgagaccattatgtggaggagaatcgtttcatcgcatcttaaatccatctccgccgtcgggtcctgcgcggctccgtcagatttgattttcgatatagcctttagctatcagtgttacaatcaattatcacagtgagaattaacaaccatcgacattgagataatttcactcggcgaaggtaacttcctttttctataaatatcaactgtggatttattagaggatttattagaagggaaccaaacatttctaaccggttaagtaaatttttggcttagatgagtggggatataattgtccatttatttttcaaaaacaaggaaaagtgccttgtacgtgagaagtgcctcaaaaagaataaaagtttgtagaagtgcctaaacatgtccaattcccattaaaatatagtggcccatgagtgaatcagaattaattttgttttggccgaaatacatatataaccaattaataactcttgaaatcgatccaactattcatttgttttattttatttttttactgaattttttattttctttttggacaaataattgtacgaaacaaattaatgtcttatcggtgcaaaataaacaacactctagaaatctcaaacgatagttcgatctaagaatcaataacacaattgtcctcaagctttaagaaaaaaagaaaatcatatggcaagctctcacgataacttgtaccctcatgaacagacaagcctctccacaagatgaaagcacggcaagaacacaatggactgagccaaatgcactggtaattctgcagaaatctaatgcattccactcctcagaatctatgcattgcaaatttccaacgtctccaattgcatcaaacacaaacactcctttacaatgtgcagcttcttgtttatccactccatttgtttttattcttctttgtacttgaacatccaagtctttttacactttgtgcttctgcatttgttgtagatgaatatgcagtatatttcttttagtgttaatccaaagatttatcctgaaacaatgcatttcaggactagatacagaagctgtcttccaatcaaacgtcgtatgtaaatgaatgcagtctcttggatcgccatttgtgcttcatgtagagagcagtccgcttaaatcatatctcatcctcatgtggcacatcagtcttgaaaagaaagattgtctcctccgtctcataggtttacatctccatagcattgttaagcaatctccatactcccgaagatccattccatgtttgagttgtaacattatgtacttgtagaatctgatctaacccaacctttatcacatgacctgcatccaactctctcccttgtatatctccttgtaacgttgctgaaatcactgtaactttgggcaacagaatttcagacaacacacaaataactcccagccaactcgcagtcttggactcccaaagagaaccaagtaaacattttatcttgtatatggcggggcttatacgcttcaagatctcaaaatgaccaaaccatctaaaaatgaccatactatattagatttagagagagaagtaaaagtttgttatttctcattaactgcaactgtaactacactttctgtttatatactatataagattacatgtataaaactatatacaagtattagtatacactatatcgtaatatactattaagtatcaaaccagatttgaacttaaaccaccaatttttggtaactgtttgctttatgtttttcagcaactttcttatcttcaaatacttgtcaacaagctcttgacattcactcgctctcaagaagacataaatatgttctaaaagctcaagaatggcatgcttgtctgcagtagaatctccaaattgagcaagtggtcgacgcttccttttgcacttaaacatctagaccttagagtaacactattttagaagaggatttatttccaatgtatctctctattttctactcttaaaagaaacattcttagaaatattacatttctattttatataataatactttttattaatagaatttaaaatttaactccacatattatagttttgcaaaatttctataaaatatgatattatttaaattaaacactcattacacattaaaaaaacattacatcatataacaataataaaacataacaaattttattttaaacaacaccattagtgttataaaagattaaagtaagaaaaaataatgaagactagagagaataaaactcgaaacaagagttttcttattgctttctctttctcttctattttctctgtgttttctctgtaacttacaaatgaatgaaatgagctatatatagtagagcttacttagcgaagaagtaattgataaacatcatccatatcttagagaagaaataatggataaacatcatccatatcttagagaagaagtaatggataaacataatccatatattagggatagagatgagtgatgaataatcacatccatacttatccggttaataacactcccccttgagtatccatcacttttgatgagttacgtactgcctcgttaaaaacattatcatggaaaaacccattgggataaaaaccatgacaaggaaaaaagagtacagtgacgtgaactccccctcgaagacacttcacaggtctcgtagatgacgcattccaatgctttgaacatgctttctaaatgtagaagttggaagcgcctttatgaatagatctgctgcattgtcacttgaacgaacgtattgcacttctacttccttgttcttctcgagtttttgagtgtaggagaagaatcgtggagggatatgcttcgttctgtcgctcttgatataaccttctttgatttgagcaacacatgcatcattatcttcatatatccttgttggctctcttttgatgactaatccacttgcttcttgaatatgattagtcatggatctaagccaaacacattctctataccaaactcggggtttctaggataatataatccaaaatcaatagtaccttgaagataacaaaagatgtgttttatcccattccaatgccttcgtgtaggggatgaattgtaccttgcaagcaaattagtagcaaaagcaatatctggtctagtacaatttgcaagatacataagtccaccgatagcactcatataaggtactttgggacccagaaaatcttcgttatcctcacaaggtctaaatggatcattttcaacatttaaagatctattgaccattggagtacttaaaggattcgctttatccatattaaagcgctttaaaatcttttttgtataattggattgatgcacaaatataccatcttggaaatgctcaatttggagcccgagacaaaattttgtctttccaagatctttcatttcaaactcttctttcatatgagttcgtgcatcatcaatctcctttggagttccaattatatttaggtcatcaacataaacaacaatgagcacaaatcccgaaggggatttctaaatgaagacgcaagggcagattttattattcacataccctttcttaagtagataatcgcttaaacgattataccacatgcatctggattgtttcaatccgtaaagtgatcgctgtaatttgaccacatatatatctttagactttgatgagtctaatgcctcaggaagttttaatccttccgagattttcatatatatatatcattatcaagagatccatataaataagctgtcactacatccataaggtacatatctaaattattagataccgaaaggctcattaagtacctgaatgtaattgcatccatgacccgagaatatgtttcttcataatcaactcctggtctttgagagaaaacttgtgcaacaagtcgagctttatatcgtgtgatctcatctttttcatttctttttcgcacgaatacccacttgtatccaacaggttttacactctcagatgcagtgacaatacgtccaaagacatttcttttattaagggagtgcaactcaacttgcatggcatttttccatttctctcaatccggccttttcgggcactcggataatgtctttggatctggatcatcattctcttgatcgatctctttagataaagaaaaggagaatattccattatcatcatcaatatcatctctatcccatatgatatcatcatgggcatagttaatagaaatctcatacttttctctatcgtcccgaggacttggttcttcttgaagaaccttttcattttcttctcccaatttctttttcttttggggatttttatcttttgagtcaataggcctcccacgctttaattgaaccttaggttcattaattttgctcccatctaattccagctcactaggaatttcaactcttgatggggcatttgcagcggggatatatgactttgtcacctttcttgtatcggtgaacgaatctggtaattgatttgccatactttgtaaatgtacaatcttttgtacttccagctcacgatacttcgtggggggatcaaaatattttaaagatggtgtgcaccattctatatctttatgcatatgcatttgatgaattcctcccccctaaagctaggaattcatcttcattaaaatggcaatcggcaaaacgtaccgtaaacaaatcaccagtttgtggttcaagatatcttattatactcggtgatacataaccgacgtatattatactcgtgctgataatatgttataaaggattaaagtaagaaagaataatgaagactagagagaataaaactcgaaacaagagttttcttattgctttctatttctcttctcttttttctgtaacttacaaatgaatgaaatgagctatatatagtagagcttacttagctaggaagtaaattacttagcgaagaagtaatggataaacatcatccatatcttagagaagaagtaatggataaacatcattcatatcttagagaagaagtaatggataaacataatccatatcttagggatagagatgagtgatggataatcacatccatacttatccggtttataacaattagaataattttcccatatatgatccattaacacatttcgtaatgcgaaattagattctttatctttgattttttttaaatcaaccaagaaactcttgaaagaggatattaacgtttcatattatctcgacaaaaggaattttgattttgtgatatgaattccattcaaaacaaaatgttcagacatattttaagactaaataagcacggattttacacaaacgatgtgtctaacaacaagatcaagatcaacaaactcctcctccatctatttcatttggacaatattttaactatcttggcggatctacaaacagtttaccagaatattaaaactagttttatgttttaattttcttatgttgttaattttatatttagtacttgtttgcttgttaaatttataaaactatgatccatttgtatgtattgaatttagtacttgtttgcttgataatatgtattaaatataaaaaaattaaatttgagagactagagtataaataaaaaagttctgcagatttctctattttagatttcaatatagagtagggttggagaagaatttagagtttttactctaaaataaaataaggttggaaatgcccttaggaaatatacttctcttcccaccttgatgtttgtgtcttctaagggacagcttatctaacacccggtgtgcctcttgcttctcattgagaatttgatgaacaaatagtggacatacccgattgttctttacaaatgcacattgccatatctcaaaaacaaccaatgactcaatcaattccttctctgaacttgagtgatctcttgagtcggtgaatctttgtctatcaagtcacctgcacccaacaattatgtatcctgaattgcttcaacacttttgttcgaaaatatctccgaaattgatgcgcttacaacaatagcctctgattcaagtaatttatgtggctccctcttgcaatcaaaatctttgatccattgcttcatttcaagatcgagtttcataagtactcactttttgtcccgattgtttccaaacgttaacaataaaccatccttcacctgactccaactattgaacggaatccacgattgttccttgtggaaccaacattttgcttggctaccgagaaaaccggaaacacacgccaacttgtctttctcactatactcaccaccaagaaattgagcttcagtcattgtaatccactcttcggattacctttaatgaaaatggggagatccaactgtttacagtcatctgaaatcgattgagattcaattctctccactgcacaaaccactcgcttcaaggtttcctccatcaaagtcaacatctccgaaaattgcacctccgattggcatagtaccttgaatccacccatgagaaactctaattgattcttcgcaacatcattatccatcatagcgtttgaccggaacaagtttcactacaccaatgttaagttgttgatatcccaaactccaattttaaatacaatactcaaatataaagatgatccaactgattataaaaaaaataatcaatacaaatccagaaacacaatcgtttgcctgaccattcaagctcacgataacatagagatcaacattgatctctcctcaagcacatcgcttggccaaagtctaacagaaaaactctcacaacatcaaaagcatagtccctctatattgacaactctccctaattatactagaacagagtctgttaaagatatttgtagatcctaaaaatatcttcttattcaagcaagcttccttcccacttgcacgtggcgtgtctcaaaaaatggtgtctaggagagaaaatagaggcttttggaaccgttactgtattcatattcacatatattactaaaccatttaatagatttaatctaatagatctatgctgctctacaaataaatattcgtaacaactagtaacaacatgtgattacaaaataaaaccaaaatggcatatgggtatatctgcaagctatgatttgttttcatagcaataatttgtttggacaactaaaaaagtaaagcacaacgaaactctacagaatttgtttgctacagagagaaacaagaaacatattaaaaacaattgctaaaaatggacaacattagtttcactatataaatcaacaagactaacccaacattacccaccaaatcatcttcttcacaaatataaacaaggagtaaaacattttgtaatactcatttgtattaaatcatcactaatacttaaaaacgatacgttatggcgattcaaacacgcagtgttttaatgattgtagctatattgacgatgatgttttcagcacaccttgctcaatcaaacagtataacaatgtgtgtgaaatcttgcgcacagaacaagtgcttgaaagcggcgaaaaaacctactcctaaaatttgtgatgaaacttgcaagaaaatctgcaacaatcaattattcggtgatgaaaaaatgtttgttcctgctccaaagggaagctcccgaatctgtagatggatgcctcagtattgccaattttgaattatgaaaaatcctaatgatttgttttttccatgactataacataaaaatataaaaatatgtatgtacgtgatcaattcattatttttataaaataatttcttccttttttctttgatgcatattaaaacaagcgtttatgtcaacaaaacattggtctagagagtatttcgatttacccaaactagatagatcaacccaaatacatacattggctatatattaggtctttcgaccaacatatatatcaaatatttggtcttgaatttaaaagaataaaaatatgacttatcatgttgcacaacttatttacaaactcaaatttttaatgtaagaaaaaacaactgtagttcagtaacaaactaacaatcatacaatgtatcagcaaaaaaaaaaaaaaaagtgaaatgttgaattatataagataaatacaaacaaaaatagcaatatatttgtttatttctctattaaattcaagaagaaaaaatacacaattagatcagttgattttccaattttccaattagaataaaaaaaatttaggggttttattattgacatatattaaatagttctcttttggttggaattttcccaaagcttttcttgaatgagattacactataaagaaattagaatatttaagtgcataggcatggtcaattttgtattgacctatttttcatatttgataaattcaaaccctattctatctttaacgagacaattaatgataattatctctgaattacatttgtagtaattattataaacaatgaaggccattttctcatttatacctttgtgttattaactaatactagatttaacccgcggtataccacgggactattttaaagaataaaaatttaatttgtttagtcgattaagaatatatatgatttaatgttttgtattttttgaatgtacaacttttatatctgtatattatttagtatacatttactatgtttgatttgtactgtttaaatcttaagacttttgaaatagttatttaattttatagatttcatagattatatttattctaaacgttttttcgttaaatattctaaacattttataaactttaaataactataatatttatctttaataaagtataatattaataaagttttaagatttctctttttaaaagtaattagaattgatgaagatatattagataaagaaatgctaataattaggaatattaattaaatgataataatttatgacaatggcattctttgtaaataaatcccaactccaagatttatttgctaaaatggctacaaaaatgtatatgtagatagtgatgaaaaatgtaatggtagactttgtgttcctaatttggaacaattagataccgcattgtattattattctaaagtaaatagaaactccataagcgaagagaaaaagatgcccaaatttaaaagaacaaagtctgggagatagataaattaaaagcctgctattgaaaaaaactagtcgaataaggtccatgaccaggcccaaacgtttgtgtttaaaatcagaaccctaatcacaaacggcaaaccctacatttcccacagttcttctcatgtgttcaccaatcgcccttaacagccaaaagctcaccgcaaatgcgacacgagaagggtgataaggttcatcaaacgtatgtgagaaaacggattcaacattcttcagaggaagcgaaggatgacgtggatgatgatgtggcagagaacagaaggaaagtcaaagaagagaaggacgattaaaattaaattaaatttgaaggactaaagtataaataaataagttcaactctaaaacataggagaaaatatagtcattctatagataaaacaattctgctgatttctctattttagagttctatatagagaagggttggataagaatttggagtttttactctaaaataaaatagagttggaaatgcccttaggagatatgcttctcttcccactttgatgtttgtgtcttgtaagggacagtttatctaacacatggtttgcctcttgcttctcattgagaatttgatgaacaaatggtggatatacccgattgttctttacaaatgcacattgcaatttctcaaaaacaaccaataactcaatcaattctttctctgaacttgagtgatgtcctgaatcggtgaatctttttcaatcaagtcacctccacccgacaattcagtatcctgaattgcttcaacacttttgttcgaaactatctcctaacttgatgcgcttacaacgatagcttctgattcaagaaatttatgtggctccctcttgcgatcaaaatctttgatccattgcttcatttcatgatcgagttccacaagtactcgctttttgtcccgattgtttccaaacgttaacaataaaccatccttcacctggctccaactattgaacggaatcgacgatagttccttgtggaaccaagattttgcttggccaacgagaaaaccggaaacacatgccaacttgtctttctcactatactcatcaccaagaaattgagcttcagtcatcgcaatccactcttcggattacctttagtgaacatcgggaggtccagctgtctaccgtcatctgaaatcgatcgagattcaatcctctccactgcgcaaaccattcgcttcaaggttttctccatcgaagtcaacatctccaaaaattgcacctccgattggcatagtagcttgaatccgcccatgaggaactccaattgtttcttcgcagcatcattatccatcatagcgtttgaccgaaaccagtttcactgcaccaatgttaagttgtttatatcccaaactccaatttcaaatacaatactcaaatagaaagatgatccgacagattatcaaaacaataaccaatgcaaatcaagaaacataatcattcgcctgaacattcaacctcactataacatagagatcaacattgatctctcctcaagcacatcgcttggccaaattctaacaaaaaaactctcacaatatcaaaagcatagtccctctaaatcgatctctttccttatttataatagaacagagtctgttaaagatatttttagatcctaaaaatatctttttcttcaagcaagcttccttcccacttgcatgtggcgtgtcttgaaaatggtgtctaggagagaaaatagaggctattggaaccgttactgtattcatattcacatatatcactgaaccatttaatagatttaatctaatatatctatgctgctctacaaataaatattcgtaacaactcgtaacaacatgtgactacaaaataaaaccaaaatggcatatgggtaatctgcaagctatgatttgttttcatagcaataatttgtttggacaactaaaaaagtgaagcacaacgaaactctacagaatttgtttgctagagagagaaacaagaatcatatttaaaacaattggtaaatatggacaacattagtttcactatataaatcatcaagactaacccaacattacccaccaaatcatcttcttcacaaatataaacaaggagtaaaacattttgtaatactcatttgtattaaatcatcactaatacttaaaaacgatacgttatggggattcaaacaaacagtgttttaataatcgtatctatattgacgatgatgttttcagcacacattgctcaaccaaacggtataacaatgtgtgtgaaacattgtgcacaaaacgagtgcttgaaagcggcgaaaaaacctactcctgaaatttgtgatgaagcttgcaagaaaatctgcaacaatcaattattcggtgatgaaaaatggtttgttcctgctccaaagggaagctcccgaatctgtagatgggcgcctaagtattgccaattatgaattatgaaaactcctaatgatttattttttcatgactataacataaaaatataaaaatatgtaaatatgtgatcaattcattattcttataaaataatttctttctttaatttttgatgcatattaaaacaagcgtttatgtcaacaaaacattggtctagagagtatttcgatttacccaaactagctagatcaacccaaatacatacattggctatatattaagtctttcgaccaacatatatatcaaatatttggccttgaatttaaaagaataaaaatatggcctatcatcaacaactgttgcaaaacttatttacaaactcaaatttttaatgtaagaaaaaacaactgcaattcagtaacaaactaacattcatacaatgtaccagtaaaaaaaaaaaaatgttaaatgttgaattatataagataaatacaaacaaatagcaacatattagttaatttctcaattaaattcaagaagaaaaatacacaaatagatcagttgattttccaattttccaattagaataaaaaaaattcaggggtttaattattgacagatataaaatagttcttttttgttggaatttttccaaagcttttcttgaatgagattaaactataaataaatcagaatatttaagtgcatatgtatggtcaattttgtattgatctgtttttcatatttgataaattcaaaccctattctatcttaaacgagacaattaatgataattttctctgaattacatttgtagtaattattataaacaatgaaggccattttctcatttatacctttgtgttattaactaatatagagatgaaaaatgtaatggtagacttcgtgttcctaatttggaacaataagataccacattgtattattattctaaagtaaatagatactgcataagcgaagagaaaaagatgcccaaatttaaaagaacaaagttttggagacaaataaattagaagtctgctattaaaaaaaccagtcggataaggcccacaaccaggcccaaacgtttgtgtttaaaatcagaaccctaatcgcaaacggcaaacccaatatttcccacagttcttctcatgtgttcaccaatcgccctttacagccaaaagctcaccgcaaatgccacacgagaagggtgataaggttcatcagacgtatgtgagaaaacggattcagcattctttagaggaagcgaaggatgacgtggatgataacgtggcagagaagagaaagaaagtcaaagaagagaaggacggttcaattaaattaaatttgaaggactaaagtataaataaaacaatcaactctaaaacataggagaaaatatagtcactctatatataaaacaattctgctgatttctctattttagagttctatatagagtagggttggagaaaaatttagagttttatttctaaaataaagtagggttggaaatgtccttaggagatatacttctcttctcactttgatgtttgtgtcttctaagggacagtttatctaacacatggttagcctcttgcttctcattgagaatttgatgaacaaatggtggatatacccgattgttctttacaaatgcacattgcaatttctcaaaaacaaccaatgactcaatcaattccttctttgaacttgagcgatctcctgaatcggtgaatctttgtcaatcaagtcacctccacccgacaattcagtatcctgaattgcttcaacatttttgttcgaaactatctcctaacttgatgcgcttacaacgatagcttatgattcaagaaatttatgtggctccctcttgcgatcaaaatctttgatccaatgcttcatttccagatcgagttccacaagtactcgctttttgtcccgattgtttccaaacgttaacaataaaccatccttcacctggctccaactattgaacggaatccacgatagttccttgtggaaccaaaattttgcttggccaccaaaaaaaccagaaacacacgccaacttgtctttctcactatagtcaccaccaagaaattgagcttcagtcatcgcaatccactcttcggattacctttagtgaagatcgggaggtccagctgtctaccgtcatctgaaatcgatcgagattcaatccgctctactgcgcaaaccactcgcttcaaggtttcctccatcgaagtcagcatctccaaaaattgcacctccggattggcatagtaacttgaatccgcccttgagaaactccaattgtttcttcgcagcatcattatccatcataacgtttgaccggaaccagtttcactgcaccaatgttaagttgttgatatcccaaactccaatttcaaatacaatactcaaatagaaagatgatccgactgattatcaaaacaataaccaatgcaaatccagaaacataatcattcgcctgaacattcaacctcactataacatagagatcaacattgatctctcctcaagcacatcgcttggccaaattctaacaaaaaaactctcacaatatcaaaagcatagtccctctaaatcgatctctttccttatttataaaagaacagaatctgttaaagatatttttagatcctaaaaatatcttcttcttcaagcaagcttccttcccacttgcacgtggcgtgtcttgaaaatggtgtctaggagagaaaatagaggctattggaaccgttactgtattcatattcacatatatcactgaaccatttaatagatttaatctaatagatctatgctgctctacaaataaatattcgtaacaactcgtaacaacatgtgactacaaaataaaaccaaaatggcatatgagtacatctgcaagctacgatctcttttcatagcaataatttgtttggacaactaaaaaagtaaagcacaacgaaactctacagaatttgtttgctagagagagaaacaagaaacatatttaaaacaattgctaaaaatggacaacattagtttcactatataaatcaccaagactaacccaacattacccactaaatcatcttcttcacaaatataaacaaggagtaaaacattttgtaatactcatttgtattaaatcatcactaatacttaaaaacaatacgttatggggattcaaacacgcagtgttttaataatcgtagctatattgacgatgatgttttcagcacacattgctcaatcaaacagtataacaatgtgtgtgaaacattgtgcacaaaacgagtgcttgaaagcggcgaaaaaacctactcctaaaatttgtgatgaagcttgcaagaaaatctgcaacaatcaattattcggtgatgaaaagtggtttgttcctgctccaaagggaagctcccgaatctgtagatgggcgcctaagtattgccaattctgaattatgaaaactcctaatgatatgtttttttcatgattataacataacaatataaaaatatgtaagtacgtaatcaattcattattcttataaaataatttcttcctttaatttttgatgcatattaaaacaagcgtttatgtcaacaaaacattggtctagagagtatttcgatttaaccaaactagctagatcaacccaaatacatacattggctatatattaagtctttcgaccaacatatatatcaaatatttggccttgaatttaaaagaataaaaatatgacttatcatcaacatctgttgcaaaacttatttacaaactaaaatttttaatgtaagaaaaaacaactgcaattcagtaacaaactaacaatcatacaatgtaccagtaaaaacaaaaaaatattaaatgttgaattatataggataaatacaaacaaatagcaacatcttagttaatttctcaattaattcaagaagaaaaatacacaaatagatcagttgattttccaattttccaattagaataaaaaaaattcaggggtttaattattgacagatataaaatagttctttttttgttggaatttttctaaagcttttcttgaatgagattaaactataaataaatcagaatatttaagtgcatatgtatggtcaattttgtattgatctgtttttcatatttgataaattcaaaccctattctatcttaaacgagacaattaatgataattttctctgaattacatttgtagtaattattataaacaatgaaggccattttctcatttatacctttgtgttattaactaatatagagatgaaaaatgtaatggtagacttcgtgttcctaatttggaacaattagataccacattgtattattattctaaagtaaatagatactccataagcgaagagcaaaagatgcccaaatttaaaagaacaaagttttggagacagataaattagaagtctgctattaaaaaaaccagtcggataaggcccacaaccaggcccaaacgtttgtgtttaaaatcagaaccctaatcgcaaacggcaaacccaatatttcccacagttcttctcatgtgttcaccaatcgccctttacagccaaaagctcaccgcaaatgccacacgagaagggtgataaggttcatcagacgtatgtgagaaaacggattcagcattctttagaggaagcgaaggatgacgtggatgataacgtggcagagaagagaaggaaagttaaagaagagaaggacggttcaattaaattaaatttgaaggactaaagtataaataaaacaatcaactctaaaacataggagaaaatatagtcactctatatataaaacaattctgctgatttctctattttagagttctatatagagtagggttggagaaaaatttagagttttatttctaaaataaagtagggttggaaatgtccttaggagatatacttctcttctcactttgatgtttgtgtcttctaagggacagtttatctaacacatggttagcctcttgcttctcattgagaatttgatgaacaaatggtggatatacccgattgttctttacaaatgcacattgcaatttctcaaaaacaaccaatgactcaatcaattccttctttgaacttgagcgatctcctgaatcggtgaatctttgtcaatcaagtcacctccacccgacaattcagtatcctgaattgcttcaacatttttgttcgaaactatctcctaacttgatgcgcttacaacgatagcttctgattcaagaaatttatgtgcctccctcttgcgatcaaaatctttgatccaatgtttcatttcaagatcgagttccataagtactcgctttttgtcccgattgtttccaaacgttaacaataaaccatccttcacctggctccaactatggaacggaatccacgatagttccttgtggaaccaaaattttgcttgaccaccaaaaaaaccagaaacacacgccaacttgtctttctcactatagtcaccaccaagaaattgagcttcagtcatcgcaatcccctcttcggattacctttagtgaagatccggaggtccagctgtctaatgtcatctgaaatcgatcgagattcaatcctctctactgcgcaaaccacttgcttcaaggtttcctccatcgaagtcaacatctccaaaaattgcacctccggattggcatagtaacttgaatccgccctagagaaactccaattgtttttttgcagcatcattatccatcataacgtttgaccaaaaccagtttcactgcaccaatgtcaagttgttgatatcccaaactccaatttcaaatacaatactcaaatagaaagatgatccgactgattatcaaaacaataaccaatgcaaatccagaaacattatcattcacctgaacattcaacctcacgataacatagagatcaacattaatctctcctcaagcacatcgcttggccaaagtctaacaaaaaaaactctcacaacatcaaaagcataatccctctaaatcgatctctctccttatttataatagaacagagtctgttaaagatatttatagatcctaaaaatatcttcttcttcaagcaatcttccttcccacttgcacttggcgtgtcttgaaaatggtgtctaagagagaaaatagaggcgattggaactgttactgtattcatattcacatatatcactgaaccatttaatagatttaatctaatagatctatgctgctctacaaataaatattcgtaacaactcttaacaacatgtgactacaaaagaaaaccaaaatggcatatgggtacatctgcaagctacgatctcttttcatagcaataatttgtttggacaactaaagaagtaaagcacaacgaaactctacagaatttgtttgctagagagagaaacaagaaacatatttaaaacaattgctaaaaatggacaacattagtttcactatataaatcaccaagactaacccaacattacccaccaaatcatcttcttcacaaatataaacaaggagtaaaacattttgtaatactcatttgtattaaatcatcactaatacttaaaaacgatacgttatggggattcaaacatgcagtgttttaataatcgtaattatatttgcacacattgctcaatcaaacagtataacaatgtgtgtgaaacattgtgcacaaaacgagtgcttgaaagcggcgaaaaaaactactcctgaaatttgtgatgaagcttgcaagaaaatctgcaacaatcaattattcagtgatgaaaagtggtttgttccttctccaaagggaagctcacgaatctgtagatgggcgcctaagtattgccaattctgaattatgaaaactcctaatgatttgtttttttcatgattataacataacaatataaaaatatgtaagtacgtgatcaattcattattcttataaaataatttcttcctttaatttttgatgcatattaaaacaagcgtttatgtcaacaaaacattggtctagagagtatttcgatttaaccaaactagctagatcaacccaaatacatacgttggctatatattaagtctttcgaccaacatatatatcaaatatttggccttgaatttaaaagaataaaaatatgacttatcatcaacaactgttgcaaaacttatttacaaactcaaatttttaatgtaagaaaaaacaactgcaattcagtaacaaactaacaatcatacaatgtaccagttaaaaaaaaaaaatgttaaatgttgaattatataagataaatacaaacaaataacaacatattagttaatttctcaattaattcaagaagaaaaatacacaaatagatcagttgattttccaattttccaaagcttttcttgaatgagattacactataagaaatcagaatatttaagtgcatatgtatggtcaattttgtattcatctgtttttcatatttgataaattcaaaccctattctatcttaaacgagacaattaataataattttctctgaattacatttctagtaattattataaacaatgaaggccattttctcatttatacatttgtgttattaactaatatagagatgaaaaatgtaatggtagactttgtgttcctaatttagaacaattagataccacattgtattattattctaaagtaaatagatactccataagcgaagagaaaaagatgcccaaatttaaaagaacaaagtctgggagacagataaattagaagtctgctattaaaaaaactagtctgataaggcccacaaccaggcccaaacgtttgtgtttaaaatcagaaccgcaaccgcaaacggcaaacccaatatttcccacagttcttctcatgtgttcaccaatcgccctttacagccaaaagctcaccgcaaatgcgacatgagaagggtgataaggttcatcagacgtatgtgagaaaacggattcagcattctttagaggaagcgaaggatgacgtggatgatgacgtggcagagaagagaaggaaagtcaaagaagagaaggacgattcaattaaattaaatttgaaggactaaagtataaataaaacaatcaactctaaaacatagaagaaaatatagtcactctatatataaaacaattctgctgatttctctattttagaattctatatagagtagggttggagaagaatttagagttttttctctaaaataaagtagggttggaaatgtccttaggagatatacttctcttcccactttgatgtttgtgtcttctaagggacagtttatctaacacatggtttgcctcttgcttctcattgagaatttgatgaacaaatggtggatatacccgattgttctttacaaatgcaccttgcaatttctcaaaaacaaccaatgactcaatcaattccttctttgaacttgagcgatctcctgaatcggtgaatctttgtcaatcaagtcacctccacccgacaactctgtatcttgaattgcttcaacatttttgttcgaaactatctcctaacttgatgcgcttacaacgatagcttctgattcaagaaatttatgtgcctccctcttgcgatcaaaatctttgatccaatgtttcatttcaagatcgagttccataagtactcgctttttgtcccgattgtttccaaacgttaacaataaaccatccttcacctggctccaactatggaacggaatccacgatagttccttgtggaaccaaaattttgcttgaccaccaaaaaaaccagaaacacacgccaacttgtctttctcactatagtcaccaccaagaaattgagcttcagtcatcgcaatcccctcttcggattacctttagtgaagatccggaggtccagctgtctaatgtcatctgaaatcgatcgagattcaatcctctctactgcgcaaaccacttgcttcaaggtttcctccatcgaagtcaacatctccaaaaattgcacctccggattggcatagtaacttgaatccgccctagagaaactccaattgtttttttgcagcatcattatccatcataacgtttgaccaaaaccagtttcactgcaccaatgtcaagttgttgatatcccaaactccaatttcaaatacaatactcaaatagaaagatgatccgactgattatcaaaacaataaccaatgcaaatccagaaacattatcattcacctgaacattcaacctcacgataacatagagatcaacattaatctctcctcaagcacatcgcttggccaaagtctaacaaaaaaaactctcacaacatcaaaagcataatccctctaaatcgatctctctccttatttataatagaacagagtctgttaaagatatttatagatcctaaaaatatcttcttcttcaagcaatcttccttcccacttgcacttggcgtgtcttgaaaatggtgtctaagagagaaaatagaggcgattggaactgttactgtattcatattcacatatatcactgaaccatttaatagatttaatctaatagatctatgctgctctacaaataaatattcgtaacaactcttaacaacatgtgactacaaaagaaaaccaaaatggcatatgggtacatctgcaagctacgatctcttttcatagcaataatttgtttggacaactaaagaagtaaagcacaacgaaactctacagaatttgtttgctagagagagaaacaagaaacatatttaaaacaattgctaaaaatggacaacattagtttcactatataaatcaccaagactaacccaacattacccaccaaatcatcttcttcacaaatataaacaaggagtaaaacattttgtaatactcatttgtattaaatcatcactaatacttaaaaacgatacgttatggggattcaaacatgcagtgttttaataatcgtaattatatttgcacacattgctcaatcaaacagtataacaatgtgtgtgaaacattgtgcacaaaacgagtgcttgaaagcggcgaaaaaaactactcctgaaatttgtgatgaagcttgcaagaaaatctgcaacaatcaattattcagtgatgaaaagtggtttgttccttctccaaagggaagctcacgaatctgtagatgggcgcctaagtattgccaattctgaattatgaaaactcctaatgatttgtttttttcatgattataacataacaatataaaaatatgtaagtacgtgatcaattcattattcttataaaataatttcttcctttaatttttgatgcatattaaaacaagcgtttatgtcaacaaaacattggtctagagagtatttcgatttaaccaaactagctagatcaacccaaatacatacgttggctatatattaagtctttcgaccaacatatatatcaaatatttggccttgaatttaaaagaataaaaatatgacttatcatcaacaactgttgcaaaacttatttacaaactcaaatttttaatgtaagaaaaaacaactgcaattcagtaacaaactaacaatcatacaatgtaccagttaaaaaaaaaaaatgttaaatgttgaattatataagataaatacaaacaaataacaacatattagttaatttctcaattaattcaagaagaaaaatacacaaatagatcagttgattttccaattttccaaagcttttcttgaatgagattacactataagaaatcagaatatttaagtgcatatgtatggtcaattttgtattcatctgtttttcatatttgataaattcaaaccctattctatcttaaacgagacaattaataataattttctctgaattacatttctagtaattattataaacaatgaaggccattttctcatttatacatttgtgttattaactaatatagagatgaaaaatgtaatggtagactttgtgttcctaatttagaacaattagataccacattgtattattattctaaagtaaatagatactccataagcgaagagaaaaagatgcccaaatttaaaagaacaaagtctgggagacagataaattagaagtctgctattaaaaaaactagtctgataaggcccacaaccaggcccaaacgtttgtgtttaaaatcagaaccgcaaccgcaaacggcaaacccaatatttcccacagttcttctcatgtgttcaccaatcgccctttacagccaaaagctcaccgcaaatgcgacatgagaagggtgataaggttcatcagacgtatgtgagaaaacggattcagcattctttagaggaagcgaaggatgacgtggatgatgacgtggcagagaagagaaggaaagtcaaagaagagaaggacgattcaattaaattaaatttgaaggactaaagtataaataaaacaatcaactctaaaacatagaagaaaatatagtcactctatatataaaacaattctgctgatttctctattttagaattctatatagagtagggttggagaagaatttagagttttttctctaaaataaagtagggttggaaatgtccttaggagatatacttctcttcccactttgatgtttgtgtcttctaagggacagtttatctaacacatggtttgcctcttgcttctcattgagaatttgatgaacaaatggtggatatacccgattgttctttacaaatgcaccttgcaatttctcaaaaacaaccaatgactcaatcaattccttctttgaacttgagcgatctcctgaatcggtgaatctttgtcaatcaagtcacctccacccgacaactctgtatcttgaattgcttcaacatttttgttcgaaactatctcctaacttgatgcgcttacaacgatagcttctgattcaagaaatttatgtgcctccctcttgcgatcaaaatctttgatccaatgtttcatttcaagatcgagttccataagtactcgctttttgtcccgattgtttccaaacgttaacaataaaccatccttcacctggctccaactatggaacggaatccacgatagttccttgtggaaccaaaattttgcttgaccaccaaaaaaaccagaaacacacgccaacttgtctttctcactatagtcaccaccaagaaattgagcttcagtcatcgcaatcccctcttcggattacctttagtgaagatccggaggtccagctgtctaatgtcatctgaaatcgatcgagattcaatcctctctactgcgcaaaccacttgcttcaaggtttcctccatcgaagtcaacaactccaaaaattgcacctccggattggcatagtaacttgaatccgccctagagaaactccaattgttttttcgcagcatcattatccatcataacgtttgaccaaaaccagtttcactgcaccaatgtcaagttgttgatatcccaaactccaatttcaaatacaatactcaaatagaaagatgatccgactgattatcaaaacaataaccaatgcaaatccagaaacattatcattcgcctgaacattcaacctcacgataacatagagatcaacattaatctctcctcaaacacatcgcttggccaaagtctaacaaaaaaaactctcacaacatcaaaagcataatccctctaaatcgatctctctccttatttataatagaacagagtctgttaaagatatttatagatcctaaaaatatcttcttcttcaagcaatcttccttcccacttgcacttggcgtgtcttgaaaatggtgtctaagagagaaaatagaggcgattggaaccgttactgtattcatattcacatatatcactgaaccatttaatagatttaatctaatagatctatgctgctctacaaataaatattcgtaacaactcttaacaacatgtgactacaaaagaaaaccaaaatggcatatgggtacatctgcaagctacgatctcttttcatagcaataatttgtttggacaactaaaaaagtaaagcacaacgaaactctacagaatttgtttgctagagagagaaacaagaaacatatttaaaacaattgctaaaaatggacaacattagtttcactatataaatcaccaagactaacccaacattacccaccaaatcatcttcttcacaaatataaacaaggagtaaaacattttgtaatactcatttgtattaaatcatcactaatacttaaaaacgatacgttatggggattcaaacatgcagtgttttaataatcgtaattatattgacgatgatgttttcagcacacattgctcaatcaaacagtataacaatgtgtgtgaaacattgtgcacaaaacgagtgcttgaaagcggcgaaaaaaactactcctgaaatttgtgatgaagcttgcaagaaaatctgcaacaatcaattattcagtgatgaaaagtggtttgttccttctccaaagggaagctcacgaatctgtagatgggcgcctaagtattgccaattctgaattatgaaaactcctaatgatttgtttttttcatgattataacataacaatataaaaatatgtaagtacgtgatcaattcattattcttataaaataatttcttcctttaatttttgatgcatattaaaacaaacgtttatgtcaacaaaacattggtctagagagtatttcgatttaaccaaactagctagatcaacccaaatacatacgttggctatatattaagtctttcgaccaacatatatatcaaatatttggccttgaatttaaaagaataaaaatatgacttatcatcaacaactgttgcaaaacttagtgacaaactcaaatttttaatgtaagaaaaaacaactacaattcagtaacaaactaacaatcatacaatgtaccagttaaaaaaaaaaaatgttaaatgttgaattatataagataaatacaaacaaataacaacatattagttaatttctcaattaattcaagaagaaaaatacacaaatagatcagttgattttccaattttccaattagaataaaaaaaattcaggggtttaattattcacagatataaaatagttttttttttgttggaatttttccaaagcttttcttgaatgagattacactataaagaaatcagaatatttaagtgcatatgtatggtcaattttgtattcatctgtttttcatatttgataaattcaaaccctattctatcttaaacgagacaattaataataattttctctgaattacatttctagtaattattataaacaatgaaggccattttctcatttatacatttgtgttattaactaatatagagatgaaaaatgtaatggtagactttgtgttcctaatttagaacaattagataccacattgtattattattctaaagtaaatagatactccataagcgaagagaaaaagatgcccaaatttaaaagaacaaagtctgggagacagataaattagaagtctgttattaaaaaaaccagtctgataaggcccacaaccaggcccaaacgtttgtgtttaaaatcagaaccgcaaccgcaaacggcaaacccaatatttcccacagttcttctcatgtgttcaccaatcgccctttacagccaaaagctcaccgcaaatgcgacatgagaagggtgataaggttcatcagacgtatgtgagaaaacggattcagcattctttagaggaagcgaaggatgacgtggatgatgacgtggcagagaagagaaggaaagtcaaagaagagaaggacgattcaattaaattaaatttgaaggattaaagtataaataaaacaatcaactctaaaacatagaagaaaatatagtcactctatatataaaacaattctgctgatttctctattttagagttctatatagagtagggttggagaagaatttagagttttttctctaaaataaagtagggttggaaatgtccttaggagatatacttctcttcccactttgatgtttgtgtcttctaagggacagtttatctaacacatggtttgcctcttgcttctcattgagaatttgatgaacaaatggtggatatacccgattgttctttacaaatgcaccttgcaatttctcaaaaacaaccaatgactcaatcaattccttctttgaacttgagcgatctcctgaatcggtgaatctttgtcaatcaagtcacctccacccgacaactctgtatcttgaattgcttcaacatttttgttcgaaactatctcctaacttgatgcgcttacaacgatagcttctgattcaagaaatttatgtgcctccctcttgcgatcaaaatctttgatccaatgtttcatttcaagatcgagttccataagtactcgctttttgtcccgattgtttccaaacgttaacaataaaccatccttcacctggctccaactatggaacggaatccacgatagttccttgtggaaccaaaattttgcttgaccaccaaaaaaaccagaaacacacgccaacttgtctttctcactatagtcaccaccaagaaattgagcttcagtcatcgcaatcccctcttcggattacctttagtgaagatccggaggtccagctgtctaatgtcatctgaaatcgatcgagattcaatcctctctactgcgcaaaccacttgcttcaaggtttcctccatcgaagtcaacaactccaaaaattgcacctccggattggcatagtaacttgaatccgccctagagaaactccaattgttttttcgcagcatcattatccatcataacgtttgaccaaaaccagtttcactgcaccaatgtcaagttgttgatatcccaaactccaatttcaaatacaatactcaaatagaaagatgatccgactgattatcaaaacaataaccaatgcaaatccagaaacattatcattcgcctgaacattcaacctcacgataacatagagatcaacattaatctctcctcaagcacatcgcttggccaaagtctaacaaaaaaactctcacaacatcaaaagcataatccctctaaatcgatctctctccttatttataatagaacagagtctgttaaagatatttatagatcctaaaaatatcttcttcttcaagcaatcttccttcccacttgaacttggcgtgtcttgaaaatggtgtctaagagagaaaatagaggcgattggaaccgttactgtagtcatattcacatatatcactgaaccatttaatagatttaatctaatagagctatgctgctctacaaataaatattcgtaacaactcttaacaacatgtgactacaaaagaaaaccaaaatggcatatgggtacatctgtaagctacgatctcttttcatagcaataatttgtttggacaactaaaaaagtaaagcacaacgaaactctacagaatttgtttgctagagagagaaacaagaaacatatttaaaacaattgctaaaaatggacaacattagtttcactatataaatcaccaagactaacccaacattacccaccaaatcatcttcttcacaaatataaacaaggagtaaaacattttgtaatactcatttgtattaaatcatcactaatacttaaaaacgatacgttatggggattcaaacatgcagtgttttaataatcgtagctatattgacgatgatgttttcagcacacattgctcaatcaaacagtataacaatgtgtgtgaaacattgtgcacaaaacgagtgcttgaaagcggcgaaaaaacctactcctgaaatttgtgatgaagcttgcaagaaaatctgcaacaatcaattattcggtgatgaaaagtggtttgttcctgctccaaagggaagctcccgaatctgtagatgggcgcctaagtattgccaattctgaattatgaaaactcctaatgatatgtttttttcatgattataacataacaatataaaaatatgtaagtacgtaatcaattcattattcttataaaataatttcttcctttaatttttgatgcatattaaaacaagcgtttatgtcaacaaaacattggtctatagagtatttcgatttaaccaaactagctagatcaacccaaatacatacattggctatatattaagtctttcgaccaacatatatatcaaatatttggccttgaatttaaaagaataaaaatatgacttatcatcaacaactgttgcaaaacttatttacaaactaaaatttttaatgtaagaaaaaacaactgcaattcagtaacaaactaacaatcatacaatgtaccagtaaaaacaaaaaaatattaaatgttgaattatataggataaatacaaacaaatagcaacatcttagttaatttctcaattaattcaagaagaaaaatacacaaatagatcagttgattttccaattttccaattagaataaaaaaaattcaggggtttaattattgacagatataaaatagttctttttttgttggaatttttctaaagcttttcttgaatgagattacactataaagaaatcagaatatttaagtgcatatgtatggtcaattttgtattgatctgtttttcatatttgataaattcaaaccctattctatcttaaacgagacaattaatgataattttctctgaattacatttgtagtaattattataaacaatgaaggccattttctcatttatacctttgtgttattaactaatatagagatgaaaaatgtaatggtagacttcgtgttcctaatttggaacaattagataccacattgtattattattctaaagtaaatagatactccataagcgaagagcaaaagatgcccaaatttaaaagaacaaagttttggagacagataaattagaagtctgctattaaaaaaaccagtcggataaggcccacaaccaggcccaaacgtttgtgtttaaaatcagaaccctaatcgcaaacggcaaacccaatatttcccacagttcttctcatgtgttcaccaatcgccctttacagccaaaagctcaccgcaaatgccacacgagaagggtgataaggttcatcagacgtatgtgagaaaacggattcagcattctttagaggaagcgaaggatgacgtggatgataacgtggcagagaagagaaggaaagtcaaagaagagaaggacggttcaattaaattaaatttgaaggactaaagtataaataaaacaatcaactctaaaacatagaagaaaatatagtcactctatatataaaacaattctgctgatttctctattttagagttctatatagagtagggttggagaaaaatttagagttttatttctaaaataaagtagggttggaaatgtccttaggagatatacttctcttctcactttgatgtttgtgtcttctaagggacagtttatctaacacatggttagcctcttgcttctcattgagaatttgatgaacaaatggtggatatacccgattgttctttacaaatgcacattgcaatttctcaaaaacaaccaatgactcaatcaattccttctttgaacttgagcgatctcctgaatcggtgaatctttgtcaatcaagtcacctccacccgacaattcagtatcctgaattgcttcaacatttttgttcgaaactatctcctaacttgatgcgcttacaacgatagcttctgattcaagaaatttatgtgcctccctcttgcgatcaaaatctttgatccaatgtttcatttcaagatcgagttccataagtactcgctttttgtcccgattgtttccaaacgttaacaataaaccatccttcacctggctccaactatggaacggaatccacgatagttccttgtggaaccaaaattttgcttgaccaccaaaaaaaccagaaacacacgccaacttgtctttctcactatagtcaccaccaagaaattgagcttcagtcatcgcaatcccctcttcggattacctttagtgaagatccggaggtccagctgtctaatgtcatctgaaatcgatcgagattcaatcctctctactgcgcaaaccacttgcttcaaggtttcctccatcgaagtcaacaactccaaaaattgcacctccggattggcatagtaacttgaatccgccctagagaaactccaattgttttttcgcagcatcattatccatcataacgtttgaccaaaaccagtttcactgcaccaatgtcaagttgttgatatcccaaactccaatttcaaatacaatactcaaatagaaagatgatccgactgattgtcaaaacaataaccaatgcaaatccagaaacattatcattcgcctgaacattcaacctcacgataacatagagatcaacattaatctctcctcaagcacatcgcttggccaaagtctaacaaaaaaactctcacaacatcaaaagcataatccctctaaatcgatctctctccttatttataatagaacagagtctgttaaagatatttatagatcctaaaaatatcttcttcttcaagcaatcttccttcccacttgaacttggcgtgtcttgaaaatggtgtctaagagagaaaatagaggcgattggaaccgttactgtagtcatattcacatatatcactgaaccatttaatagatttaatctaatagagctatgctgctctacaaataaatattcgtaacaactcttaacaacatgtgactacaaaagaaaaccaaaatggcatatgggtacatctgtaagctacgatctcttttcatagcaataatttgtttggacaactaaaaaagtaaagcacaacgaaactctacagaatttgtttgctagagagagaaacaagaaacatatttaaaacaattgctaaaaatggacaacattagtttcactatataaatcaccaagactaacccaacattacccaccaaatcatcttcttcacaaatataaacaaggagtaaaacattttgtaatactcatttgtattaaatcatcactaatacttaaaaacgatacgttatggggattcaaacatgcagtgttttaataatcgtagctatattgacgatgatgttttcagcacacattgctcaatcaaacagtataacaatgtgtgtgaaacattgtgcacaaaacgagtgcttgaaagcggcgaaaaaacctactcctgaaatttgtgatgaagcttgcaagaaaatctgcaacaatcaattattcggtgatgaaaagtggtttgttcctgctccaaagggaagctcccgaatctgtagatgggcgcctaagtattgccaattctgaattatgaaaactcctaatgatatgtttttttcatgattataacataacaatataaaaatatgtaagtacgtaatcaattcattattcttataaaataatttcttcctttaatttttgatgcatattaaaacaagcgtttatgtcaacaaaacattggtctatagagtatttcgatttaaccaaactagctagatcaacccaaatacatacattggctatatattaagtctttcgaccaacatatatatcaaatatttggccttgaatttaaaagaataaaaatatgacttatcatcaacaactgttgcaaaacttatttacaaactaaaatttttaatgtaagaaaaaacaactgcaattcagtaacaaactaacaatcatacaatgtaccagtaaaaacaaaaaaatattaaatgttgaattatataggataaatacaaacaaatagcaacatcttagttaatttctcaattaattcaagaagaaaaatacacaaatagatcagttgattttccaattttccaattagaataaaaaaaattcaggggtttaattattgacagatataaaatagttctttttttgttggaatttttccaaagcttttcttgaatgagattacactataaagaaatcagaatatttaagtgcatatgtatggtcaattttgtattgatctgtttttcatatttgataaattcaaaccctattctatcttaaacgaaacaattaatgataattttctttgaattacatttgtagtaattattataaacaatgaaggcaattttctcatttatacatttgtgttattaactaatatagagatgaaaaatgtaatggtagacttcgtgttcctaatttggaacaattagataccacattgtattattattctaaagtaaatagatactccataagcgaaaagaaaaagatgcccaaatttaaaagaacaaagtctgggagacagataaattagaagtctgctattaaaaaaaccagtcgggtaaggccaacaatcagacccaaacgtttgtgtttaaaatcagaaccgcgaccgcaaacggcaaacccaatatttcccacagttcttctcatgtgttcaccaatcgcccttgacagccaaaagctcaccgaaaatgcgacacgagaagggtgataaggttcatcagacgtatgtgagaaaacggattcagcattctttagaggaagcgaaggatgacgtggatgatgacgtggcagagaagagaaggaaagtcaaagaagagaaggacgattcaattaaattaaatttgaaggactaaagtataaataaaacaatcaactctaaaacatagaagaaaatatagtcactctatatataaaacaattctgctgatttttctattttagagttctatatagagtagggttggagaagaatttagagttttttctctaaaataaagtagggttggaaatgtccttaggagatatacttctcttcccactttgatgtttgtgtcttctaagggacagtttatctaacacatggtttgcctcttgcttctcattgagaatttgatgaacaaatggtggatatacccgattgttctttacaaatgcaccttgcaatttctcaaaaacaaccaatgactcaatcaattccttctttgaacttgagcgatctcctgaatcggtgaatctttgtcaatcaagtcacctccacccgacaattcagtatcctgaattgcttcaacatttttgttcgaaactatctcctaacttgatgcgcttacaacgatagcttctgattcaagaaatttatgtgcctccctcttgcgatcaaaatctttgatccaatgtttcatttcaagatcgagttccataagtactcgctttttgtcccgattgtttccaaacgttaacaataaaccatccttcacctggctccaactatggaacggaatccacgatagttccttgtggaaccaaaattttgcttgaccaccaaaaaaaccagaaacacacgccaacttgtctttctcactatagtcaccaccaagaaattgagcttcagtcatcgcaatcccctcttcggattacctttagtgaagatccggaggtccagctgtctaatgtcatctgaaatcgatcgagattcaatcctctctactgcgcaaaccacttgcttcaaggtttcctccatcgaagtcaacaactccaaaaattgcacctccggattggcatagtaacttgaatccgccctagagaaactccaattgttttttcgcagcatcattatccatcataacgtttgaccaaaaccagtttcactgcaccaatgtcaagttgttgatatcccaaactccaatttcaaatacaatactcaaatagaaagatgatccgactgattatcaaaacaataaccaatgcaaatccagaaacattatcattcgcctgaacattcaacctcacgataacatagagatcaacattaatctctcctcaagcacatcgcttggccaaagtctaacaaaaaaaactctcacaacatcaaaagcataatccctctaaatcgatctctctccttatttataatagaacagagtctgttaaagatatttatagatcctaaaaatatcttcttcttcaagcaatcttccttcccacttgcacttggcgtgtcttgaaaatggtgtctaagagagaaaatagaggcgattggaaccgttactgtattcatattcacatatatcactgaaccatttaatagatttaatctaatagatctatgctgctctacaaataaatattcgtaacaactcttaacaacatgtgactacaaaagaaaaccaaaatggcatatgggtacatctgcaagctacgatctcttttcatagcaataatttgtttggacaactaaaaaagtaaagcacaacgaaactctacagaatttgtttgctagagaaacaaaaaaaatatttaaaacaattgctaaaaatggacaacattagtttcactatataaatcaccaagactaacccaacattacccaccaaatcatcttcttcacaaatataaacaaggagtaaaacattttgtaatactcatttgtattaaatcatcactaatacttaaaaacgatacgttatggggattcaaacatgcagtgttttaataatcgtaattatattgacgatgatgttttcagcacacattgctcaatcaaacagtataacaatgtgtgtgaaacattgtgcacaaaacgagtgcttgaaagcggcgaaaaaaactactcctgaaatttgtgatgaagcttgcaagaaaatctgcaacaatcaattattcagtgatgaaaagtggtttgttccttctccaaagggaagctcacgaatctgtagatgggcgcctaagtattgccaattctgaattatgaaaactcctaatgatttgtttttttcatgattataacataacaatataaaaatatgtaagtacgtgatcaattcattattcttataaaataatttcttcctttaatttttgatgcatattaaaacaagcgtttatgtcaacaaaacattggtctatagagtatttcgatttaaccaaactagctagatcaacccaaatacatacgttggctatatattaagtctttcgaccaacatatatatcaaatatttggccttgaatttaaaagaataaaaatatgacttatcatcaacaactgttgcaaaacttagtgacaaactcaaatttttaatgtaagaaaaaacaactacaattcagtaacaaactaacaatcatacaatgtaccagttaaaaaaaaaaatgttaaatgttgaattatataagataaatacaaacaaataacaacatattagttaatttctcaattaattcaagaagaaaaatacacaaatagatcagttgattttccaattttccaattagaataaaaaaaattcaggggtttaattattaacagatataaaatagttttttttttgttggaatttttccaaagcttttcttgaatgagattacactataaagaaatcagaatatttaagtgcatatgtatggtcaattttgtattcatctgtttttcatatttgataaattcaaaccctattctatcttaaacgagacaattaataataattttctctgaattacatttctagtaattattataaacaatgaaggccattttctcatttatacatttgtgttattaactaatatagagatgaaaaatgtaatggtagactttgtgttcctaatttagaacaattagataccacattgtattattattctaaagtaaatagatactccataagcgaagagaaaaagatgcccaaatttaaaagaacaaagtctgggagacagataaattagaagtctgttattaaaaaaaccagtctgataaggcccacaaccaggcccaaacgtttgtgtttaaaatcagaaccgcaaccgcaaacggcaaacccaatatttcccacagttcttctcatgtgttcaccaatcgccctttacagccaaaagctcaccgcaaatgcgacatgagaagggtgataaggttcatcagacgtatgtgagaaaacggattcagcattctttagaggaagcgaaggatgacgtggatgatgacgtggcagagaagagaaggaaagtcaaagaagagaaggacgattcaattaaattaaatttgaaggactaaagtataaataaaacaatcaactctaaaacatagaagaaaatatagtcactctatatataaaacaattctgctgatttttctattttagagttctatatagagtagggttggagaagaatttagagttttttctctaaaataaagtagggttggaaatgtccttaggagatatacttctcttcccactttgatgtttgtgtcttctaagggacagtttatctaacacatggtttgcctcttgcttctcattgagaatttgatgaacaaatggtggatatacccgattgttctttacaaatgcaccttgcaatttctcaaaaacaaccaatgactcaatcaattccttctttgaacttgagcgatctcctgaatcggtgaatctttgtcaatcaagtcacctccacccgacaattcagtatcctgaattgcttcaacatttttgttcgaaactatctcctaacttgatgcgcttacaacgatagcttctgattcaagaaatttatgtgcctccctcttgcgatcaaaatctttgatccaatgtttcatttcaagatcgagttccataagtactcgctttttgtcccgattgtttccaaacgttaacaataaaccatccttcacctggctccaactatggaacggaatccacgatagttccttgtggaaccaaaattttgcttgaccaccaaaaaaaccagaaacacacgccaacttgtctttctcactatagtcaccaccaagaaattgagcttcagtcatcgcaatcccctcttcggattacctttagtgaagatccggaggtccagctgtctaatgtcatctgaaatcgatcgagattcaatcctctctactgcgcaaaccacttgcttcaaggtttcctccatcgaagtcaacaactccaaaaattgcacctccggattggcatagtaacttgaatccgccctagagaaactccaattgttttttcgcagcatcattatccatcataacgtttgaccaaaatcagtttcactgcaccaatgtcaagttgttgatatcccaaactccaatttcaaatacaatactcaaatagaaagatgatccgactgattatcaaaacaataaccaatgcaaatccagaaacattatcattcgcctgaacattcaacctcacgataacatagagatcaacattaatctctcctcaagcacatcgcttggccaaagtctaacaaaaaaaactctcacaacatcaaaagcataatccctctaaatcgatctctctccttatttataatagaacagagtctgttaaagatatttatagatcctaaaaatatcttcttcttcaagcaatcttccttcccacttgcacttggcgtgtcttgaaaatggtgtctaagagagaaaatagaggcgattggaaccgttactgtattcatattcacatatatcactgaaccatttaatagatttaatctaatagatctatgctgctctacaaataaatattcgtaacaactcttaacaacatgtgactacaaaagaaaaccaaaatggcatatgggtacatctgcaagctacgatctcttttcatagcaataatttgtttggacaactaaaaaagtaaagcacaacgaaactctacagaatttgtttgctagagagagaaacaagaaacatatttaaaacaattgctaaaaatggacaacattagtttcactatataaatcaccaagactaacccaacattacccaccaaatcatcttcttcacaaatataaacaaggagtaaaacattttgtaatactcatttgtattaaatcatcactaatacttaaaaacgatacgttatggggattcaaacatgcagtgttttaataatcgtaattatattgacgatgatgttttcagcacacattgctcaatcaaacagtataacaatgtgtgtgaaacattgtgcacaaaacgagtgcttgaaagcggcgaaaaaaactactcctgaaatttgtgatgaagcttgcaagaaaatctgcaacaatcaattattcagtgatgaaaagtggtttgttccttctccaaagggaagctcacgaatctgtagatgggcgcctaagtattgccaattctgaattatgaaaactcctaatgatttgtttttttcatgattataacataacaatataaaaatatgtaagtacgtgatcaattcattattcttataaaataatttcttcctttaatttttgatgcatattaaaacaaacgtttatgtcaacaaaacattggtctagagagtatttcgatttaaccaaactagctagatcaacccaaatacatacgttggctatatattaagtctttcgaccaacatatatatcaaatatttggccttgaatttaaaagaataaaaatatgacttatcatcaacaactgttgcaaaacttagtgacaaactcaaatttttaatgtaagaaaaaacaactacaattcagtaacaaactaacaatcatacaatgtaccagttaaaaaaaaaaaatgttaaatgttgaattatataagataaatacaaacaaataacaacatattagttaatttctcaattaattcaagaagaaaaatacacaaatagatcagttgattttccaattttccaattagaataaaaaaaattcaggggtttaattattcacagatataaaatagttttttttttgttggaatttttccaaagcttttcttgaatgagattacactataaagaaatcagaatatttaagtgcatatgtatggtcaattttgtattcatctgtttttcatatttgataaattcaaaccctattctatcttaaacgagacaattaataataattttctctgaattacatttctagtaattattataaacaatgaaggccattttctcatttatacatttgtgttattaactaatatagagatgaaaaatgtaatggtagactttgtgttcctaatttagaacaattagataccacattgtattattattctaaagtaaatagatactccataagcgaagagaaaaagatgcccaaatttaaaagaacaaagtctgggagacagataaattagaagtctgttattaaaaaaaccagtctgataaggcccacaaccaggcccaaacgtttgtgtttaaaatcagaaccgcaaccgcaaacggcaaacccaatatttcccacagttcttctcatgtgttcaccaatcgccctttacagccaaaagctcaccgcaaatgcgacatgagaagggtgataaggttcatcagacgtatgtgagaaaacggattcagcattctttagaggaagcgaaggatgacgtggatgatgacgtggcagagaagagaaggaaagtcaaagaagagaaggacgattcaattaaattaaatttgaaggattaaagtataaataaaacaatcaactctaaaacatagaagaaaatatagtcactctatatataaaacaattctgctgatttctctattttagagttctatatagagtagggttggagaagaatttagagttttttctctaaaataaagtagggttggaaatgtccttaggagatatacttctcttcccactttgatgtttgtgtcttctaagggacagtttatctaacacatggtttgcctcttgcttctcattgagaatttgatgaacaaatggtggatatacccgattgttctttacaaatgcaccttgcaatttctcaaaaacaaccaatgactcaatcaattccttctttgaacttgagcgatctcctgaatcggtgaatctttgtcaatcaagtcacctccacccgacaactctgtatcttgaattgcttcaacatttttgttcgaaactatctcctaacttgatgcgcttacaacgatagcttctgattcaagaaatttatgtgcctccctcttgcgatcaaaatctttgatccaatgtttcatttcaagatcgagttccataagtactcgctttttgtcccgattgtttccaaacgttaacaataaaccatccttcacctggctccaactatggaacggaatccacgatagttccttgtggaaccaaaattttgcttgaccaccaaaaaaaccagaaacacacgccaacttgtctttctcactatagtcaccaccaagaaattgagcttcagtcatcgcaatcccctcttcggattacctttagtgaagatccggaggtccagctgtctaatgtcatctgaaatcgatcgagattcaatcctctctactgcgcaaaccacttgcttcaaggtttcctccatcgaagtcaacaactccaaaaattgcacctccggattggcatagtaacttgaatccgccctagagaaactccaattgttttttcgcagcatcattatccatcataacgtttgaccaaaaccagtttcactgcaccaatgtcaagttgttgatatcccaaactccaatttcaaatacaatactcaaatagaaagatgatccgactgattatcaaaacaataaccaatgcaaatccagaaacattatcattcgcctgaacattcaacctcacgataacatagagatcaacattaatctctcctcaagcacatcgcttggccaaagtctaacaaaaaaactctcacaacatcaaaagcataatccctctaaatcgatctctctccttatttataatagaacagagtctgttaaagatatttatagatcctaaaaatatcttcttcttcaagcaatcttccttcccacttgaacttggcgtgtcttgaaaatggtgtctaagagagaaaatagaggcgattggaaccgttactgtagtcatattcacatatatcactgaaccatttaatagatttaatctaatagagctatgctgctctacaaataaatattcgtaacaactcttaacaacatgtgactacaaaagaaaaccaaaatggcatatgggtacatctgtaagctacgatctcttttcatagcaataatttgtttggacaactaaaaaagtaaagcacaacgaaactctacagaatttgtttgctagagagagaaacaagaaacatatttaaaacaattgctaaaaatggacaacattagtttcactatataaatcaccaagactaacccaacattacccaccaaatcatcttcttcacaaatataaacaaggagtaaaacattttgtaatactcatttgtattaaatcatcactaatacttaaaaacgatacgttatggggattcaaacatgcagtgttttaataatcgtagctatattgacgatgatgttttcagcacacattgctcaatcaaacagtataacaatgtgtgtgaaacattgtgcacaaaacgagtgcttgaaagcggcgaaaaaacctactcctgaaatttgtgatgaagcttgcaagaaaatctgcaacaatcaattattcggtgatgaaaagtggtttgttcctgctccaaagggaagctcccgaatctgtagatgggcgcctaagtattgccaattctgaattatgaaaactcctaatgatatgtttttttcatgattataacataacaatataaaaatatgtaagtacgtaatcaattcattattcttataaaataatttcttcctttaatttttgatgcatattaaaacaagcgtttatgtcaacaaaacattggtctatagagtatttcgatttaaccaaactagctagatcaacccaaatacatacattggctatatattaagtctttcgaccaacatatatatcaaatatttggccttgaatttaaaagaataaaaatatgacttatcatcaacaactgttgcaaaacttatttacaaactaaaatttttaatgtaagaaaaaacaactgcaattcagtaacaaactaacaatcatacaatgtaccagtaaaaacaaaaaaatattaaatgttgaattatataggataaatacaaacaaatagcaacatcttagttaatttctcaattaattcaagaagaaaaatacacaaatagatcagttgattttccaattttccaattagaataaaaaaaattcaggggtttaattattgacagatataaaatagttctttttttgttggaatttttctaaagcttttcttgaatgagattacactataaagaaatcagaatatttaagtgcatatgtatggtcaattttgtattgatctgtttttcatatttgataaattcaaaccctattctatcttaaacgagacaattaatgataattttctctgaattacatttgtagtaattattataaacaatgaaggccattttctcatttatacctttgtgttattaactaatatagagatgaaaaatgtaatggtagacttcgtgttcctaatttggaacaattagataccacattgtattattattctaaagtaaatagatactccataagcgaagagcaaaagatgcccaaatttaaaagaacaaagttttggagacagataaattagaagtctgctattaaaaaaaccagtcggataaggcccacaaccaggcccaaacgtttgtgtttaaaatcagaaccctaatcgcaaacggcaaacccaatatttcccacagttcttctcatgtgttcaccaatcgccctttacagccaaaagctcaccgcaaatgccacacgagaagggtgataaggttcatcagacgtatgtgagaaaacggattcagcattctttagaggaagcgaaggatgacgtggatgataacgtggcagagaagagaaggaaagtcaaagaagagaaggacggttcaattaaattaaatttgaaggactaaagtataaataaaacaatcaactctaaaacatagaagaaaatatagtcactctatatataaaacaattctgctgatttctctattttagagttctatatagagtagggttggagaaaaatttagagttttatttctaaaataaagtagggttggaaatgtccttaggagatatacttctcttctcactttgatgtttgtgtcttctaagggacagtttatctaacacatggttagcctcttgcttctcattgagaatttgatgaacaaatggtggatatacccgattgttctttacaaatgcacattgcaatttctcaaaaacaaccaatgactcaatcaattccttctttgaacttgagcgatctcctgaatcggtgaatctttgtcaatcaagtcacctccacccgacaattcagtatcctgaattgcttcaacatttttgttcgaaactatctcctaacttgatgcgcttacaacgatagcttctgattcaagaaatttatgtgcctccctcttgcgatcaaaatctttgatccaatgtttcatttcaagatcgagttccataagtactcgctttttgtcccgattgtttccaaacgttaacaataaaccatccttcacctggctccaactatggaacggaatccacgatagttccttgtggaaccaaaattttgcttgaccaccaaaaaaaccagaaacacacgccaacttgtctttctcactatagtcaccaccaagaaattgagcttcagtcatcgcaatcccctcttcggattacctttagtgaagatccggaggtccagctgtctaatgtcatctgaaatcgatcgagattcaatcctctctactgcgcaaaccacttgcttcaaggtttcctccatcgaagtcaacaactccaaaaattgcacctccggattggcatagtaacttgaatccgccctagagaaactccaattgttttttcgcagcatcattatccatcataacgtttgaccaaaaccagtttcactgcaccaatgtcaagttgttgatatcccaaactccaatttcaaatacaatactcaaatagaaagatgatccgactgattgtcaaaacaataaccaatgcaaatccagaaacattatcattcgcctgaacattcaacctcacgataacatagagatcaacattaatctctcctcaagcacatcgcttggccaaagtctaacaaaaaaactctcacaacatcaaaagcataatccctctaaatcgatctctctccttatttataatagaacagagtctgttaaagatatttatagatcctaaaaatatcttcttcttcaagcaatcttccttcccacttgaacttggcgtgtcttgaaaatggtgtctaagagagaaaatagaggcgattggaaccgttactgtagtcatattcacatatatcactgaaccatttaatagatttaatctaatagagctatgctgctctacaaataaatattcgtaacaactcttaacaacatgtgactacaaaagaaaaccaaaatggcatatgggtacatctgtaagctacgatctcttttcatagcaataatttgtttggacaactaaaaaagtaaagcacaacgaaactctacagaatttgtttgctagagagagaaacaagaaacatatttaaaacaattgctaaaaatggacaacattagtttcactatataaatcaccaagactaacccaacattacccaccaaatcatcttcttcacaaatataaacaaggagtaaaacattttgtaatactcatttgtattaaatcatcactaatacttaaaaacgatacgttatggggattcaaacatgcagtgttttaataatcgtagctatattgacgatgatgttttcagcacacattgctcaatcaaacagtataacaatgtgtgtgaaacattgtgcacaaaacgagtgcttgaaagcggcgaaaaaacctactcctgaaatttgtgatgaagcttgcaagaaaatctgcaacaatcaattattcggtgatgaaaagtggtttgttcctgctccaaagggaagctcccgaatctgtagatgggcgcctaagtattgccaattctgaattatgaaaactcctaatgatatgtttttttcatgattataacataacaatataaaaatatgtaagtacgtaatcaattcattattcttataaaataatttcttcctttaatttttgatgcatattaaaacaagcgtttatgtcaacaaaacattggtctatagagtatttcgatttaaccaaactagctagatcaacccaaatacatacattggctatatattaagtctttcgaccaacatatatatcaaatatttggccttgaatttaaaagaataaaaatatgacttatcatcaacaactgttgcaaaacttatttacaaactaaaatttttaatgtaagaaaaaacaactgcaattcagtaacaaactaacaatcatacaatgtaccagtaaaaacaaaaaaatattaaatgttgaattatataggataaatacaaacaaatagcaacatcttagttaatttctcaattaattcaagaagaaaaatacacaaatagatcagttgattttccaattttccaattagaataaaaaaaattcaggggtttaattattgacagatataaaatagttctttttttgttggaatttttccaaagcttttcttgaatgagattacactataaagaaatcagaatatttaagtgcatatgtatggtcaattttgtattgatctgtttttcatatttgataaattcaaaccctattctatcttaaacgaaacaattaatgataattttctttgaattacatttgtagtaattattataaacaatgaaggcaattttctcatttatacatttgtgttattaactaatatagagatgaaaaatgtaatggtagacttcgtgttcctaatttggaacaattagataccacattgtattattattctaaagtaaatagatactccataagcgaaaagaaaaagatgcccaaatttaaaagaacaaagtctgggagacagataaattagaagtctgctattaaaaaaaccagtcgggtaaggccaacaatcagacccaaacgtttgtgtttaaaatcagaaccgcgaccgcaaacggcaaacccaatatttcccacagttcttctcatgtgttcaccaatcgcccttgacagccaaaagctcaccgaaaatgcgacacgagaagggtgataaggttcatcagacgtatgtgagaaaacggattcagcattctttagaggaagcgaaggatgacgtggatgatgacgtggcagagaagagaaggaaagtcaaagaagagaaggacgattcaattaaattaaatttgaaggactaaagtataaataaaacaatcaactctaaaacatagaagaaaatatagtcactctatatataaaacaattctgctgatttttctattttagagttctatatagagtagggttggagaagaatttagagttttttctctaaaataaagtagggttggaaatgtccttaggagatatacttctcttcccactttgatgtttgtgtcttctaagggacagtttatctaacacatggtttgcctcttgcttctcattgagaatttgatgaacaaatggtggatatacccgattgttctttacaaatgcaccttgcaatttctcaaaaacaaccaatgactcaatcaattccttctttgaacttgagcgatctcctgaatcggtgaatctttgtcaatcaagtcacctccacccgacaattcagtatcctgaattgcttcaacatttttgttcgaaactatctcctaacttgatgcgcttacaacgatagcttctgattcaagaaatttatgtgcctccctcttgcgatcaaaatctttgatccaatgtttcatttcaagatcgagttccataagtactcgctttttgtcccgattgtttccaaacgttaacaataaaccatccttcacctggctccaactatggaacggaatccacgatagttccttgtggaaccaaaattttgcttgaccaccaaaaaaaccagaaacacacgccaacttgtctttctcactatagtcaccaccaagaaattgagcttcagtcatcgcaatcccctcttcggattacctttagtgaagatccggaggtccagctgtctaatgtcatctgaaatcgatcgagattcaatcctctctactgcgcaaaccacttgcttcaaggtttcctccatcgaagtcaacaactccaaaaattgcacctccggattggcatagtaacttgaatccgccctagagaaactccaattgttttttcgcagcatcattatccatcataacgtttgaccaaaaccagtttcactgcaccaatgtcaagttgttgatatcccaaactccaatttcaaatacaatactcaaatagaaagatgatccgactgattatcaaaacaataaccaatgcaaatccagaaacattatcattcgcctgaacattcaacctcacgataacatagagatcaacattaatctctcctcaagcacatcgcttggccaaagtctaacaaaaaaaactctcacaacatcaaaagcataatccctctaaatcgatctctctccttatttataatagaacagagtctgttaaagatatttatagatcctaaaaatatcttcttcttcaagcaatcttccttcccacttgcacttggcgtgtcttgaaaatggtgtctaagagagaaaatagaggcgattggaaccgttactgtattcatattcacatatatcactgaaccatttaatagatttaatctaatagatctatgctgctctacaaataaatattcgtaacaactcttaacaacatgtgactacaaaagaaaaccaaaatggcatatgggtacatctgcaagctacgatctcttttcatagcaataatttgtttggacaactaaaaaagtaaagcacaacgaaactctacagaatttgtttgctagagaaacaaaaaaaatatttaaaacaattgctaaaaatggacaacattagtttcactatataaatcaccaagactaacccaacattacccaccaaatcatcttcttcacaaatataaacaaggagtaaaacattttgtaatactcatttgtattaaatcatcactaatacttaaaaacgatacgttatggggattcaaacatgcagtgttttaataatcgtaattatattgacgatgatgttttcagcacacattgctcaatcaaacagtataacaatgtgtgtgaaacattgtgcacaaaacgagtgcttgaaagcggcgaaaaaaactactcctgaaatttgtgatgaagcttgcaagaaaatctgcaacaatcaattattcagtgatgaaaagtggtttgttccttctccaaagggaagctcccgaatctgtagatgggcgcctaagtattgccaattctgaattatgaaaactcctaatgatttgtttttttcatgattataacataacaatataaaaatatgtaagtacgtgatcaattcattattcttataaaataatttcttcctttaatttttgatgcatattaaaacaagtgtttatgtcaacaaaacattggtctagagagtatttcgatttaaccaaactagctagatcaacccaaatacgtacgttggctatatattaagtctttcgaccaacatatatatcaaatatttggccttgaatttaaaagaataaaaatatgacttatcatcaacaactgttgcaaaacttatttacaaactcaaatttttaatgtaagaaaaaacaactgcaattcagtaacaaactaacaatcatacaatgtaccagttaaaaaaaaaaaatgttaaatgttgaattatataagataaatacaaacaaataacaacatattagttaatttctcaattaattcaagaagaaaaatacacaaatagatcagttgattttccaattttccaattagaataaaaaaaattcaggggtttaattattcacagatataaaatagttttttttttgttggaatttttccaaagcttttcttgaatgagattacactataaagaaatcagaatatttaagtgcatatgtatggtcaattttgtattcatctgtttttcatatttgataaattcaaaccctattctatcttaaacgagacaattaataataattttctctgaattacatttctagtaattattataaacaatgaaggccattttctcatttatacatttgtgttattaactaatatagagatgaaaaatgtaatggtagactttgtgttcctaatttggaacaattagataccacattgtattattattctaaagtaaatagatactccataagcgaagagaaaaagatgcccaaatttaaaagaacaaagtctgggagacagataaattagaagtctgctattaaaaaaaccagtctgataaggcccacaaccaggcccaaacgtttgtgtttaaaatcagaaccgcaaccgcaaacggcaaacccaatatttcccacagttcttctcatgtgttcaccaatcgccctttacagccaaaagctcaccgcaaatgcgacatgagaagggtgataaggttcatcagacgtatgtgagaaaacggattcagcattctttagaggaagcgaaggatgacgtggatgatgacgtggcagagaagagaaggaaagtcaaagaagagaaggacgattcaattaaattaaatttgaaggactaaagtataaataaaacaatcaactctaaaacatagaagaaaatatagtcactctatatataaaacaattctgctgatttctctattttagagttctatatagagtagggttggagaagaatttagagttttttctctaaaataaattagggttggaaatgtccttaggagatatacttctcttcccactttgatgtttgtgtcttctaagggacagtttatctaacacatggtttgcctcttgcttctcattgagaatttgatgaacaaatggtggatatacccgattgttctttacaaatgcaccttgcaatttctcaaaaacaaccaatgactcaatcaattccttctttgaacttgagcgatctcctgaatcggtgaatctttgtcaatcaagtcacctccacccgacaactctatatcctgaattgcttcaacatttttgttcgaaactatctcctaacttgatgcgcttacaacgatagcttctgattcaagaaatttatgtgcctccctcttgcgatcaaaatctttgatccaatgcttcatttcaagatcgagttccataagtactcgctttttgtcccgattgtttccaaacgttaacaataaaccatccttcacctggctccaactattgaacggaatccacgatagttccttgtggaatcaaaattttgcttggccaccaaaaaaaccagaaacacatgccaacttgtctttctcactatagtcaccaccaagaaattgagcttcagtcatcgcaatccactcttcggattacctttagtgaagatccggaggtccagctgtctaccgtcatctgaaatcgatcgagattcaatcctctctactgcgcaaaccattcgcttcaaggtttcctccatcgaagtcaacatctccaaaaattgcacctccgattggcatagtagcttgaatccgcccatgaggaactccaattgtttcttcgcagcatcattatccaccaatgttaagttgttgatatcccaaactccaatttcaaatacaatactcaaatagaaagatgatccgactgattatcaaaacaataaccaatgcaaatccagaaacataatcattcgcctgaacattcaacctcacgataacatagagatcaacattgatctctcctcaagcacatcgcttggccaaattctgacaaaaaaaactctcacaacatcaaaagcataatccttctaaatcgatctctctccttatttataatagaacagagtctgttaaagatatttttagatcctaaaaatatcttcttcttcaagcaagcttccttcccacttgcacgtggcgtgtcttgaaaatggtgtctaggagagaaaatagaggctattggaaccgttactgtattcatattcacatatatcactgaaccatttaatagatttaatctaatagatctatgctgctctacaaataaatattcgtaataactcgtaacaacatgtgactacaaaataaaaccaaaattgcatatgggtacatctgcaagctacgatctcttttcatagcaaaaatttgtttggacaactaaaaaagtaaagcacaacgaaactctacagaatttgtttgctagatagagaaacaagaaacatatttaaaacaattgctaaaaatggacaacattagtttcactatataaatcaccaagactaaccaacattacccaccaaattatcttcttcacaaatataaacaaggagtaaaacattttgtaatactcatttgtattaaatcatcactaatacttaaaaacgatacgttatggggattcaaacatgcagtgttttaataatcgtagctatattgacgatgatgttttcagcacacattgctcaatcaaacagtataacaatgtgtgtgaaacattgtgcacaaaacgagtgcttgaaagcggcgaaaaaacctactcctgaaatttgtgatgaagcttgcaagaaaatctgcaacaatcaattattcggtgatgaaaagtggtttgttcctgctccaaaaggaagctcccgaatctgtagatgggcgcctgagtattgccaattctgaattatgaaaaattctaatgatttgtttttttccatgacaataacataaaaacataaaaatatgtaagtacgtgatcaattcattattcttataaaataatttcttctttttttctttgatgcatattaaaacaagcgtttatgtcaacaagacattgatctagaaagtatttcaatttaaccagactagctagatcaacccaaatacatacattggctatatattaggtctttcgaccaacatatatatcaaatatttggtcttaaatttaaaagaataaaaatatgacttggaatcatcatcaacaactgttgcaaaacttatttacaaactcaaatttttaatttaagaaaaacaactgcaattcaataacaaactaacaatcatacaatgtaccatcaaaaaaaatatttaaaatgttaaatgttaaattaaacaagataaatacaaacaaaaatagcaatagattagttgatttctcaattaaattcaagaataaaaatacacaatgagatcagttgattttccaattagaaaaaaaaaattcaggggttttattattgacaaatattaaatatttcttttttttgttgaaattttcccaaagcttttcttgaatgagattacatcataaagaaatcagaatattcaagtgcatatgcatggtcaattttgtattgatctgtttttaatatttgataaattcaaaccctattctatctttaacgagacaattaatgataattttctctgaataacatttgtagtgatgaaaaatataatggtacacttcgtgttcctaatttggaacaattagataccacattattatttttctaaagtaaatagatatttcataagcgaaagaaaaagatgcccaaatttaaaaaaacaaagtctcggagacagatgaattagaagcctgctcttcaaacaaaccagttggataaggcccatgaccagacccaaacgccttaacatggtccttaagagaacgtttgtgtttaaaatcagaaccgcaaacgcaaacccaacgttttccacaattcttctcatgtgttcgccaatcgcccttgacagccaaaagcttaccgcaaaggcgacacgagaagggtttgtgtccgtgtttgcgtttgtagtgcgtttggagcgtcctaaagtctttcagtggcttggaacgaggatggtcaatgtggttcctgcacccttcaacgcagcagtaacaagggatccctaacatggctcgtggctgtgtgcctttcagtgactccggtcctttcctgtattgtgaaccatgtccccacatgtgcatctatattcataatatttagagtcaacaaaaaacaaaaaggtttccttaagtaataaaatgaaataacatggttccttaaaatcatattattgaccgagcatagtaatgtttcattcaagaaatctgtgtatttaagtttgaatcaaatgttttgactactatgataatatatatatgagaaaagaaaactattaaaaactatagtcaatcaaatcttagtagataatttatttcaactttttcgaattcagctttagttaaggcattaaataaatgtaaagagttgtgatgaattattttcatgaaaacattaccataaaaatatatattaccaactcttcttacaaaaaaaagtaattaaatcacgattagttgacttgattaaatttgtaaattgtataataagatccaaaggtaaatcatctattaaatcctggttgtttagcttttatcaaataaattcagaattatatatatatatatatatatatatatatatatatgtatatatatagatatgaataaactcataacattagatccggagatataactctataagatgaatttattatatatgtttgtgcatggaaaagcaatgcgcatgagatatattgactcgtacctgaagattgttgtagcgattgaatgtcttgaagcatacatggcaagaaaaatgagtgaaccctatgagaatttgctccggcgccgggatccagtatgcctttccggaaagttcattctcgatgccttttccggcgtcatatgtggcgatctccttcccatttctcttcttcagctgtttagcatcattgcttggtttaccaaaaccaggaaggccgatgtgtaagtccacgtccacttcacggtcttcttcttcttcttcttcctcctcttgctctccttcttccgcatacaagggattagggtttaggtctaggtttgagttcaagtttatgcgatcaataagcggtaaaggctcaattagggtattgttgatacaagagttttggttgaggttagggaagagatcaagggattggaaatggtgtctaggtttttcagaagaagagcttgaggatatctcgtatagtggtggtgactccattgaatgtggtgaatagttgttggagagagatgaaatgttttgagaatcttttctttattcctttaaatcttgactatatataataaaattaaattaccttaatataatgattgctctctatgaaagtaatttaatgtttgcaataacttttataactaataatcatgcagatacgtaagtagatcccacgtatcaatcgtctcctttaacctacgagaataaagattgataaatatcgaatttaccgaataatattggatgaactatataggtttacgaaagtcgaaagcaagtgtgaacaaaacgaataatgtgtaaaataatttagaatcatattgtgtgacttacgtaccaaatagagaagtgagtaaatgggaatcttggggaatgtgaggagcagacacttgagaatgcatgtggttgagtgaaaacaacctttgttaagaagtaatttaatcttctctgtctcatctctttgcctataaatagagtggaaaaacaagaaccttaaattttgtggaccaaactcttcaagattttggcaactttgtcattgcagggttttgactatctttggcatttacgtaagcttttagcttttctacaatacaattgtattaattttaatcaatgaaatttcggatttgggtaatgaaatgaatgctaatgttgaattcatattattattattatggaagatgcattattattatttttttgggttatgttttgtatgtatgtaagttgtttaattctctctctaacggtcaacacctctggttttgtaaacactagatttgacataccaataagagaaaaggaataattaatagtatatacaagtcaagatttagtgttaaatctgtttttacaaatgtacacgtttcactaaaagaatttctttgcaaggttattaacttagtacatatcaataatttctgcctagtcaaatattatgccgggtctccacaattcaatattcatactagccaattattaccactatgtgtgaagattttatttcttttagttattttgattgaaagtagaattataatattcccaaaaactaacataatttttttattattttattattgtatgttatttttctgatcaagtattacttctaatatactgtatacatgctgattagattttctttattcaaatatttaacttcaatgtattgtatttaaaaaaaaacatttaaccaacgtagtcgtagtctagctagtggatttaagcgttttttttttttttttagctgagactttgattcaagataagaactacaaaatggtctaaagcaacgtggctaatttgtccgaaaaaacaaaacaaaaaaatataacccattattgttcacgaaagagattgtgtcaagtcagttgttagagtcctacagaatagcataatcatggtccatggagtaaccaaattagtagagtaaatgaatttttcaagtggatcaagtcgaatctctgtaggttcaaactctaattaattaattagtgttatttcacgttagaactcgttttgcaaataccttcatttctactatataaaactataaattcttcgatatttgcatatcaatacgataatacgcataaatttttagcgtacaagagaattgtgaaattagcagaattaacggtttacaaaatcaatgaatttgccaagttgaaatttatgcaaaattaatagggtcaattgtatatacatgaataattcatgttacatgatcaataaagataccgtattagttttattaatggattttagtactagctaccagaacaaaatctatgtacaatattaattctttgcaagacaacttttgtttcacacaatctttattgaatcagtaaagattagatatgtttaatatgtggtattaagaataataaattggtgatttaaccagtatttaagtattagattaataatattttaattgttattaatgtcgatttaaactcgtccgccatataaattgtcatgcacaataactcgatattcagtatatatatattttaacaaaaaaaaaaaataccaactctatgattggttatccaatttggaaaaaaaataatttacaaaaataactttagattattataatatagaatatcaagctaaacaatccgttttactgttgttacataaacgaaaaataaaggagattcgtagacaaataatatgttgttgcattatgccaccacatataatatgttattgcattatactaccacatataaaatgtttaataaatttttgtgattaaaatatttgattgtgtgataactaatagaaattcatataattaacgtaactataataagttataacctataataagttataatctatatggaatgttccaaaataaggcatttatggagaaagtttggacgtttatgacacttttgagggagtgggcacttttccaccttttttactgattttatgaccattttacccttataaaggtgagaaggaaaaaaaacaggagataaattaattttgttgccaattactaaaaaacaatatacgtgacattagatagagataacaagttaaaaattaatggtaagatctgttaaaatttagtttaatcaaataaaaatgtttaagtcaaatattatatcaaataaaaatatttaagcttaactaatattatatatttccaacaaatatcagatattaaactatgttcctaattatgtatccaatatatattgtccatgtaaacatattcaaacagttcacattatatgaaatgctttaattcaaataaaaatatttaagcgtaagtagaattatatattcccaacaaatatcaaatattaaactatgttcctaattatgtatcaaatatatattgtccacgtaaacttatccaaacagttcgcatcatatgaaatactatatatttaaacctaagtagtattatatattcccaacaaatatcagatattaaactatgtttctaattatgtatccaatatatattgtccacataaacttatccaaacagttcgctttatatatatcaatacaaggtccttcaacaaaatttttttgaaaatatgatacaatgttgttgacacaagcaaatggtttgtggtgtgtaaaccttaaacccttgagactctacactaaagcctaatttccttaccctaaactcaaaccctcaatccctaatctttatccattaaatccaaaatcgtaaaacaaaactctaaaccataaaatatattgtaagcataaacaagaaagtgataattatactgagagataaaacaaattcacagcaaatcaaagctaacatgtgtccattgatgattgtccaagaagtttagttcatgtggtcaactagtgactcatagggtcgttttatttcaatacacaagtttatgtatgaacgataatcaccagaatcagattagatggaaaaaaacaaaaacttttggaacaatttaaatcgtaaaaatgtgatctttactaaattcgaccaatatcaattgcagatctaaatgctaaacataaggacaatgtgaaagaatatgcggaattgtattaaagattaagagagttatgaagaacaagagagtttgtatgtgagagaatatgagaccaaatcatattgatagaattagatagtaacctttgtgtgtttacaatgcttttaaagacacacaaagagaatatggctgtttacaattaacgtaagactgaaagagacataagagaagaggttccttggtcttggtgatgagagtgactggtcattggttgaccttgttgctaaagacactcgtgagtcctcttcaacggctacaagagatatttgtgtgccttcacctcttctagaagctcttcatagacttctcatatgttcggcccactctcttgtagtacatatccaatactaggcctttcttatttgagtcttgatcaatactctccctcaagcgcaagacttatgcaagagtctaagcttggaacacatgattcatcacctcattaaaaaccttagtaaagaaaaccacatgggagaaaactttactaagggaaaaagagtgtgatgtccatggttagagaacatgagatcaagagtgagatagatccacaagtcctaatttgccatgtatgaagttgcaaactttgagacttgcggctttggtgaagatatccgccaattgatcttcacttcttgtataacacggtagtgtgactccttcgatgatcttctctcggactttatgacaatcgacttcaatatgcttggttctctcatgaaacaccgaatttgaggctatgtatattgctgccttgttgtcacaatgcatggtgataggcatgtgttgttcaatgccaagatctttaagaagagctttaagccaagtgagttcgttggtgagctttctcattgctctatactccgattctgcactggaacatgagaccaccttctgtttctttgtcttccaagttgcaaggttacctccaatgaacgtacaataaccagttttagatcttctatctcctctatcacccgcatagtccgcatcgcaatatcccactatctcggtgcttgagttctttcccatccatatgccttgtccggagctgcctttgagataccttagtattctctccaccatgttccaatgatacaccatcgggactttcatgtgttgactaacctgatttacagcaaaacaaatgtcaggtcttgtgtttgtcaaatagatcaacttacctacaagtttgcgatagagaggtgcatcgccaaacttctcatcttctttctccccctttcgattgaccttgtagccatcttcaagtggagtgcgagccggtttagcgtccataaaacctgtctcattcaacaagtcaagagtgtatttgcgttgtgatagaaagagtccagcattagagcgacacacttcaattcctaggaagtatttgagttcaccaagatctttaatatcaaaacaagatttaagaaaagtcttggtagagtctataccgtctttgttgtctccggtgatgataagatcatcaacatagatgagaacaacgacaataccttgaggactttgtaatgtaaacaaagtgtgatcggactcggacttcttgaatccatgatctttaagagttcggctgagcttgtggtaccatgcacgtggagattgtttaagaccatagatagctttgcgtagtctcaacactttatcacatggaatggtatcttctagaccgggtggaggcgtcatatacacatcatcttcaagttcgccttggagaaatgcattcttgacatccatttgccatagtccccatgataaatttgttgctaaggcaagaaccactctcaccgtgtgtagcttagccaccggagcaaaagtctccatgtagtcggagccatatgtttgcgtgaacccccgagccaccaagcgagttttatatctctcgatatctccattactcttatacttgattgtgaatacccaccttgagctcactgttttctttcctttaggtaagtcatcttcatcccaagtatgatttcgtttcatagcgtttatctcatcggctatcgcatccctccattccttgacttccattgcctcttcatatgtttgaggaatccaatgctcagaaatcttggagagaaacgcttgatgatctagaggtacaagggcaagagaacatgtcgcttggaaaggatgagctaccgcattagagttgaagaattccttcttgcgtcgaatgcgtgtactccttctaagaggtggtggaggtggaagaacttgtgtaggttcttcatcttcacttgagtcatcttggatttcttgaacatgttcagagtgttcttgtgtgtttggaggatcttcttgcacgtgtgtaagattttcttgatgttgtagggacacctcctcattctcttgatttaagtcttcttgatcttgtgtcatctccggttgatgttgagttgtcgaagttgagtcattgcccaaatgatccaatagaaactttagagtttcaacacgatcggaggtggaatgagtaagatcttttaggttctcccaatccttcttgttgttgtagtcttggttttcaagaaacttgacatctcgggatataaatgtgcggttcttggttggatcaaagcatttatatcctttttgagtagttgagtagccaagaaacatacacttagtgctcttcgcatctagcttgcttctttgttctccgggtatcaaaacaaaacatacacaaccaaacactcgtaagtgatcaatgaacggtttagtattgttaagtacctcgaagggagataagtcacttaagactttagttggtgttcgattgataaggtagcacgcggttaagaccgcatcaccccaaaatctctttggaacacttgtatgaaacatcattgaccgcgccacctccatgagatgtcggttctttctctccgccactccattttgttgtggtgtgtacgggcaacttgtttggtgtattattccacgtttggctagatgatctcgaaacttttggcttgtgtattctcctccattatcggtcctaaacactttaatctttgcattaaattgattagtgacataggtttcaaagttagtgaaagcttcaaacactctatcttttgagggtaatagtgttatccaagtgtactttgatttctcattaataaatgtgacaaaatatttgttgttgtctctagaaacacatggtgaggtccaaacatccgaatgaactagatcaaaacatttctcatagatagtaagagatttaggaaaaaccgatttgcaatgtttaccaagaatacaagcctcacaacttgtatgatcaaaagaaatatttggtaacatgagtttaagagctctagtatgaggatgacctagcctagcatgccacaaagtattaaaagagatgcctaaatgtgacttagaggaaaaacagctagaagagtttggtgacaagtcttcaagaacatagagttctccttttgaaccaccttctccaataacttttcccgtctcaatatcctgaaaatacacatcattagggccaaaaatcgcataacaatttaagtctctagtggtccttttcacggataataagttagatgtgaacttaggcataaaaaaagcttttgaatctttgttaaacaatttcaagtttcctatcccttcaattggaactttgtcaccattagcaataataacatgtcctagagccggttctatgttatcaagaagattagagttactaatcatatgatgagaagcacccgagtctatcacaattgaaccactagatgtttgtgatgagaaagtgataccggattctttgagtgaaacaatggacttgatgagtgcttccaagtccgacttcctcacatagtctccgaatgatgtggatgtctctcctttcgatgacccggcttgactttgctcctcatgagtttcttgagagaaatgagctcttgagtctttgaacttggcgggcttgaggtgtggatgtagcaaccaacatttgtctttggtgtggcccttcttcttacaatgatcacaagtcaacagttttctatcctcattcttgtacacacctttgttcgccactacttctcctttgttagccgtgatgagttcactttttccaccaaatagcccggttgatccttgctctttctgaatcttagaacacacctcatcaagacttggtaacttctccgatctaagcaagtgtttaattaggtcattgtaccctggatttaaggtgagaaggagtccaaacaccttgtcttgctcacgcctttcgtggagaatcttcgggtcaagcgttcccggcctcaagctcttaagttcagaccataaggacctgaacttaccaaagtgtttagtaaactctaagtcttcttgacttagttcgttaatcgccttcttcacttcaaacacgcgggtcaaattcgattcgttcccatacacgtttttaagtgtatcccacaactcttttgctgtctcacagtaagagtatccctctagaatagaggtttcaagagagttttgaagaagagcaaggacggcttgatcctcttggaaccatttttcttcctcgggagatatagtctccgtttcttcttcttctttgtcttcttttggagcttgagatgagattacatggctccaaagcccacgaccacacaacaccgtttttgttgttcttgaccaagttaggtagtttcccccttgaagtatcaccgtagtaatcaccttttgagaagtctccatgattcaagcacaaacggactgatgaataaagctattatctgttggttaaaagagatgaagctagagaatgatgaagagatttggagaaaatgaagaatagaatgagaatagaagatttataagcataaagacatgatcttaagctctgataccatgaaagaatatgcggaattgtattaaagattaagagagttatgaagaacaagagagtttgtatgtgagagaatatgagaccaaatcatattgatagaattagatagtaacctttgtgtgtttacaatgcttttaaagacacacaaagagaatatggctgtttacaattaacgtaagactgaaagagacataagagaagaggttccttggtcttggtgatgagagtgactggtcattggttgaccttgttgctaaagacactcgtgagtcctcttcaacggctacaagagatatttgtgtgccttcacctcttctagaagctcttcatagacttctcatatgttcggcccactctcttgtagtacatatccaatactaggcctttcttatttgagtcttgatcaatactccccctcaagcgcaagacttatgcaagagtctaagcttggaacacatgattcatcacctcattaaaaaccttagtaaagaaaaccacatgggagaaaactttactaagggaaaaagagtgtgatgtccatggttagagaacatgagatcaagagtgagatagatccacaagtcctaatttgccatgtatgaagttgcaaactttgagacttgcggctttggtgaagatatctgccaattgatcttcacttcttgtataacacggtagtgtgactccttcgatgatcttctctcggactttatgacaatcgacttcaatatgcttggttctctcatgaaacaccgaatttgaggctatgtatattgctgccttgttgtcacaatgcatggtgataggcatgtgttgttcaatgccaagatctttaagaagagctttaagccaagtgagttcgttggtgagctttctcattgctctatactccgattctgcactcgaacatgagaccaccttctgtttctttgtcttccaagttgcaaggttacctccaatgaacgtacaataaccagttgtagatcttctatctcctctatcacccgcatagtccgcatcgcaatatcccactatctcggtgcttgagttctttcccatccatatgccttgtccggagctgcctttgagataccttagtattctctccaccatgttccaatgatacaccatcgggactttcatgtgttgactaacctgatttacagcaaaacaaatgtcaggtcttgtgtttgtcaaatagatcaacttacctacaagtttgcgatagagaggtgcatcgccaaacttctcatcttctttctccccctttcgattgaccttgtagccatcttcaagtggagtgcgagccggtttagcgtccataaaacctgtctcattcaacaagtcaagagtgtatttgcgttgtgatagaaagagtccagtcgacacacttcaattcctaggaagtatttgagttcaccaagatctttaatatcaaaacaagatttaagaaaagtcttggtagagtctataccgtctttgttgtctccggtgatgataagatcatcaacatagatgagaacaacgacaataccttgaggactttgtaatgtaaacaaagtgtgatcggactcggacttcttgaatccatgatctttaagagttcggctgagcttgtggtaccatgcacgtggagattgtttaagaccatagatagctttgcgtagtctcaacactttatcacatggaatggtatcttctagaccgggtggaggcgtcatatacacatcatcttcaagttcgccttggagaaatgcattcttgacatccatttgccatagtccacatgataaatttgttgctaaggcaagaaccactctcaccgtgtgtagcttagccaccggagcaaaagtctccatgtagtcggagccatatgtttgcgtgaacccccgagccaccaagcgagttttatatctctcgatatctccattactcttatacttgattgtgaatacccgccttgtcattatgccacgtgatttcatcacatgtcacttctctaacaactgccgccttatcattatgccacgtagcttaagtctaaaattatgcacttttaccttctttttttactaatttacagatgaaatctttatctaataaatcacaagttacttttctctaaaaactgcagccttatcattataccatgtgtcttaagtctaaaattatacattttcacctttttcactaatttaaggattaaaataaaaataaaacaaaaaattaattgactttttcaacaacggtttttttacttcaattttaatgttcgtgattttgagtatgttgttactttgaaagttactttgaaggtgatcatattactcatcgacttaagttaatccaaaggtgagcaatcaaccctactttagcaaatcccagtttattccttttttatcaattaattattatagccctctttaatcttctttgtggggattcaaaaatagaggaacatacatgttgtggccttgaatgggaactccaagcaatgagagttgcaacatattgcaagccgagtatgttagcaaagctacatatttgatcgaaactaccaaaatttcgaattcggcacaaaaatcttactctacttgaaggtaatctttcacaaaatttgttcatataatcattgttcttggttaaaatgttacacaatcttcttaatatgtcttcttttgtgtctttagtattgctgaaataacaaaattattctcacaagtaaaatacatcgttggaaattagtgtcaaggtatgtgtcttttttatttagacctttgagcatgaacgaactaattttttcacacatacagcttcatcgatttctttacaattatgactctacttcagtattggtaatcctctcactttttttattaatcaatctaagattctgtaacaattttaatttgtttgaaaagccacgaagtgatcaatatgttttgtttaaacacttccgtttcggattcatgtctagttttataaatctatgctcttgatgctagtcccaactaggaagatcgattggttctggagctgataccctggtttggaatgcaccatggatctctctctcatcatccgtaaccccaatgggtcctcctactcaagagacacaactcatgactgttaaggacttaatatgtcctatttccaagtcttggaatagagaaaagattgcaacttacctccctcaataccaatcagagatctttcagttcagaccaagtaggtttgttgctagggataaatttatctggcttcccacgaaatctggtgattatagcaccaaaacaggctactacgcagctaagactttgcggaatcttcatacacaagttccacctcaacctgtgacctcaattggaactcagagatatggaaaaagaaatgctccccgaaaattaagtttctcttattgaaagtattgaagaatgctttacccctaggtgccaacttgaaagctcgaggcatcaaccctacaactgcttgcccacattgtagtgcagaggaatcaggtcttcatctgtttttcctttgtctatttgctgcacagatctgggagcaagccccattcaaaaataccctttcgaccttcacttttaccaatcttcagatgggttttgaagcggctaaacatctgatttgcttaccactggtggaaattggctcaaaccctcttttcccctggattatttggacaatctggacctgcagaaacaagaaaatatttgagtagaaacatctatctagtcgggatgtcatatctcaagcaatttcggctgcaaaagaatggttattggctcagcctttacctcagggacaccagactctgctttcaagaccaattgtgccggaatttgaatcggatgcaatcttgtgtttcacagatgcagcgtggcgagaggattcacatgatgcgggattgggatggatttttgtagataactcaaatcactctgagatccaggatcacgcagtggcgagagaggtatcttcccctttaatggcgaaggcgatcgctctcttctctgccatccaacaggcgtcaaatcgaggattcaaaaaacttgttgtagcttctgactcgcagcagcttgtcgaagcaatcgtgggggagcttcatccaaaggagcttcaagggattctacatgacatcctttttatctctctcagtttcgctgatattagctttcattttgtcaagagagaaaacaatcgtaaggcagatgcagctgctaaagctgctttactcgcaatcaattctgtaccggtttaacatttaatgaaaaccagaattttcgacaaaaaaaaaaatgctcttgatgctctgttttctttacttatattctaaaataaacatttctaattattacatggtaaaaatgtgactacaaaacatcgaaggtacattgaaacatatattcacttgatgtttttcttctaccttgagaggattccaactctaagtacacttcaggacttagacaatcaccacatcaacaaattgtatacaagaattactctttcattgggaaataaaaacaaagcatgatatggtgggaaaaaaaactgtatataaagactttgcggaaaaactgtattgaagaagacttgaactctgcaaaagggagagatattatcgtattgtgcataaggaaccaaccgaattgtgtttataatgctaatttattaagaccattatggtcaaatataaacagtgtcgataacttaatatgtttcaatgctcatattaataaaaacataaaaaaaaaaacaatctcaaataacaattaactgtattgagtaaacaatataatttttaattaaagaaacactagtagtcaataatactctttcttcccacgtgttgaaatatccaaatattagttgttcatatagtaatattttttataaagaaaagacctaaaccaaaatcgaaatcaaaatcgtattgaagcaaaaattctgagtttactaaaaaaaaactccggtttattaaaaattctggtttagatttttttttttttctaattttgtcatgactttgtaagattttttttttttgcttaattgctttgttcctacgagcaataacccagtacccagcagcaaccacaacctcttcttcttcttcaatatctccctcaaataacagattccattaccgctgcataaatatctcttcagtaaagaaacatcattgattcaattcccagaaacatcaacctctcacctgtttccaatttgtcggcaacaacaacaaatttctattctgggttctgtgaatttcgtagggagagaaatagagatagagagagagagagcttctgggtattttttaatggagaaggagatcttgttgttgctattggtcatcatgtttttaaccgttgccgacgtcgacgccgttagggttccgttttgtgctacgaaatctgctaaagattcaatctttgggcttcgagatcagacttgttctgtttctggtgttgaatcagacgagcgtcctcgttttgttgctgtcaccgaggtaatttaaattagagctcggatttcaatttctagggtttctgcttgataaagaatctatctttcgtttcttatgaatgtcatcaaatgttggtgaagggtgatgagcgttggttgcaaatagcattggatatgattcataagaacaagtgtgattatgtggctttgcttttctatgcatcatggtgtccattctcaaggtcatttagaccgagtttcgatgttatctcttctctctattcctccattcctcattttgccattaaggaatcatccattaagcctaggtgataatctttaaactggtctcaaacgaattccttttggttctgttttggtgatgatcttttggttatttgttgtgctgcagcaccctttccaagtatggagttcatgggtttcccactctcttacttttgaattcgacaatgcgggcacgataccgaggaacccgaatgcttgattctcttgttgctttctacagtgatgttaccggtaaggcttcatatatctagtcttctgttctgtatttaccctgatgtggatagtgtttttgtagtgaggttaggcatttagtagatactaaagagttggttttgtgtgatggtagtagttgtttatgatcaatagctcaactagtggaactaacaaggaatgttatgagattgtaggcattgagacattggataaaacttctctcgagagaagcgtatcagttcctcatctcggtaacgaaaacaacacagagccagaaaactgtccattcacgtgggcaagatcgcctgagaatatgcttcgacaagagacctatctagctcttgccattgtattcgtcctgttgagattgcttcacttgatatatcctacactcgtcgtgtttatgaagttcacttggagacggattgctcagaacatgagactagaaagcctgctagaacataccgtcgggtttctaagccgagctgtacaattatgcatgcatagaagaagcaatctgcagggaggggctatgaacgctagagcatgggcctctaagtctttggccactgtctcaattggggattcaagctcatcaaacagaagaagttcatcttctcagtgacttcataattctataattttagcaaatatggtcacagctaaaatgtgtttggctgtatcatgtttctgttacagcttttcaggttaaagttttaccctttgtcctgtataatcagcagtgttcctctagaccaacaactttggagagggcttaattcatagctgaacattttgtagtagaagtgtatatgtcatcagatggcaaaattataaaagtcaaattcatatttttttgtcaatattatatcagaattggtctattgcttatcttgttttctcaagaaacttcacatctcacattgcataatcaaggcaattttacaaaatacatgagtcaaagacatgcaccaatctgtttggttaagtctctaaggccaaatcttcctctaatcattaagctctacaactgctacatcattcttaaggatctgcatttcacataataccaaatcttagtcaaagctgaaaatagatgattaaaatcaacaaagaagaagtatgttctttatgtagtacctgtgaaatgtaatcttttactttctcgctaacttgaggatctagcgctctctctgcaagatcgtaaaacaaagtactaccctcagggccacttactttctccttctgcaagaacctgtaaaaaggacgaaaccttttgagaagaactatgaaaaccacctcagtcgtttattccttgcagagttatgcacaaggttaacgaaaggtctcacctttgttggactaatgtctccagggtctgcttgttgttcccaaacacaggattatgctcatcattttcatgcaatcccattcgcttcaaatgatgccaaagggtttctaaggatgttgagaaacatatagatgcaagaaaaaagacgtcaacaaacaaattcttaaatcaagtgtgtgactatcatatactcttgatttcactctaaaaactaattcatcatagagactttaggatctgaaacaaatctacataatgtacttttgacttccactctacaactttgctctctaactatgattcccagaactgtgagaacactacatcgaaaccaaaaaagatcgtaagagatcgaattaatgtacttttgacttccactctacaactttgctatctaactacaactttaggttcttaaacaaatctatataatgtacttttgacttccactttacaactttgctctctaactatgattcccagaactatgagaacactacaccgaaaccaaaaaagatcgtacgagatcgaattaatgtacttttgacttccactctacaactttaggttcttaaacaaatctatattatgtacttgtgactaccactctacaactttgctctctaactatgattcccagaattgtgagaacactacaccgaaaccaaaaaagatcgtaagagatcgaattaatgtacttttgacttctactctacaactttgctctctaactacaactttaggttcttaaacaaatctctataatgtacttttgacttccactctaccactttgcatagaacattacatcgaaaccataaaaaagatcgtcgtaagagaccgagtaacagcataccttcagggattttaccacctgcaagctgcacaatggcaagaaccacaaacgtaaagccagtcacaggactcgtggtttcatccacaacatgtttcttaaacacttccaacggcaattcactaacaagcacatacgatttcgagtcaacagaacctaaaaattgaacgaaaacaaacatttagctatatcgccgagacgcggtgcagccgcttcttaataaacaaatgccaaaatcttactctgtgactgaggaagcctagattgaccagtagaagaagaacgagcacgttgaagttctttcaaatcataaccaaagacattagagagcttcttcttcgcttcgttaatcacgtgtgtagcgagatttcgttgacgatagttcttagtaacaatctgagtcaaatcttctcttttaattggagttcctgagctttggtgaaacttgaacagtatgaatctaatcacctctgaaactaacttatccgtttcctgcattcaaatcaaactcaaaaatcaatctcaataccaaatcatattcggaaatcaaaattccgataaattcccaaaattgaatctgttacctctttggatatatcgaattgagagagagaatcttcttcgtcggccattctgaaatcaaattcgcgtcaaattaaacacatgaatcgatgaatttcaatgttttagagagatttttacctggaagaaattgggaaggagagacgattaaaagcttcgtaaaccctaatttcatggtattatcaattggcgggagaaacgagacagtctctggttcattgagacggttttaagagtgggtacaagtgttattcgactccgtatttcggtttagattcggtttggtttttgtgttatagattttttggtttatataaataatggtatcaaactaaaatagataatttggttgaattttgattttgattttgttaaatccttatttcaacgaaattttgatttaagatctgactattattcttcagtttggtttaaattttgttcggttttttatatatattccatttattctttggagattaatgacttttttttgtcaacaattaatggtttttttgttccacgaaaaataaatgttctatttttttaatgcattcattattattttagaaattgtaaattccaaaaaaaaatatgtgaaaatatttaaatattatgaattgttattagttagtgtagaaaataatatatgcataattaaacattaataacttttttaacagacatatgtgattttttttttaaaaaaaatcattgtataaggtacaaaggaaaattatattaaaaacaattcattgaaagtgtggttccgtttttggattgaataattcggttcagatcagatcggtttatccggattgaacccctagttattattataaccaatgaaaaaacaaagaagcatggggcacaccaaacatctaaatccaacggttgagattcgttgttatcactatttgaggctctccactatctagagacttaatctcagccgttgatttgcttctcctgtcttaaaccaaaccgccaaaattctttttatatcgtgacagcagtttttgatcagaacaaaagtctcaattcgagagagaagagagaaaggagaagctatggagaacgagagagcgaagcaagtgtacttggcgaaactcaacgagcaagctgagagatacgatggtaaacaaaagaccgtacttgtttcttttatgtttgaaatttctaagtaatctcttaaaactctgttagatctgtcctttcatacttttgtctgaaaatgtattgactgtaaaaaatggttacttagaaatcaagtaaataaagagtttgtgaacgactttggattattggaatctctatatagtttttctttgtttccttgcgtaaaatcggagattattcgattattatttacgcgatgaaaaaggtttaaaatgtaaatttcttgatatacctcatagtttggtaactaaaaaaatgggattgttgtactttatgatataagtcaaattcaaaaaatttacttttgttttatttggagttgatttgatgagtaatatgctttattgtgttgttcttgtaaatagagatggttgaagcaatgaagaaagttgcagctcttgatgtagagctcaccattgaagagaggaatcttttatctgttggttacaaaaatgtgattggtgctaggagagcatcgtggaggatcctttcttcgatcgagcagaaagaagaatcgaaaggaaacgaacaaaatgccaagaggattaaggattacaggacaaaagttgaagaagaactctccaagatttgttacgatattttggctgtcatcgataagcatcttgtcccattcgcaacttcgggagaatccaccgtcttctactacaaaatgttagtctcattcttgaattaaaaacttaaaatcaaaacaagaaagtatatgacacacacttgaattggtttttgattattttgtttgttgttgttaggaaaggagattatttcagatacttggctgaatttaagtccggtgctgatcgcgaggaagctgcggacctatcactcaaggcgtatgaagtatgtttgtcatattttctcttgatcaattagctgaatagctaggaaagaaagctgatatttctgtttaaatataggctgcaacgagttctgctagcacggaattgtctacaacacatccaataagactcggcttggctctcaacttttctgtcttctactacgagatcttgaattctccggaaaggtattgtccgttaagagcaagtaacctatcaggctaaactacatccaagttataaacatgttttgaaaatttcttgaatcccttagagcatgtcatttggcaaagcgagcgtttgatgaagcaatcgctgagcttgacagtcttaacgaagattcatacaaggacagcacacttatcatgcaacttctcagagataacctcactttatggacctctgatctagaggaaggaggtaagtaattaaacaatacacgagacacaacatctctttaaaactttataatagtactttgtattaaatgaatgctttattatatactttttcttttgtcttgcaggtgaacaatctaaaggccataatcaacaagatgaggtaaacaaaatctaaaagcaaagctttacactttcctaatatctttcttcttttttcatgaaatgttatgcatgacataaccttttgtagaactaatgaagtggagaacttagttacggagccatacattcatttggcaccgagcggtttcaacttctcttcttgcgaacgattgctttaaaccatcatttgttaccctctttttcttttggatttatgtttttttttttttaatcgaaatgaaaacttatgtgtcgtcctattgtcttgaccgattgctttaaaccggcacgagtgcgtaaatagtaatataacaaaagaaaagaaaagaaatatcctaaccggggaggagacgggacgtgagataacacctttggtttcatgaaacgagggcatgaagaagtttgtttctagaaatttaacttacatacataccatccaaaaataagttgcatacattcaatattgacgaagatactgttactggtttgtatgaaaccagggcataagaaattctaacatctctcaggagtgtgtgcatccctctacaatggaggaaacacatttttagtctgttcctagaaacttacacacataccgtccaaaaaatgaagagtctccgctaggtgcttgaatatagttcaggaaaagcctaaattgcaacataatctaaatttatagttttagtcattttgcttacataagtttttaatataaaaaaaaaaactagttaacaacccgcattatgtgcgaaataaaaggattattaattaattttagtttattgctaatattgaagttgttctatatatgtttatcaaattttcttacatatatattaatatttatgtttatcatgatttataatatatgtcttgatatattaatcgatacacaaaatataaggtgatccattttgtataggtttgtatcttttaattgcatattttatttgtattgttgttttaattaattgagtaaaataaaaacataaattaattgaaaaaataatcataagtacaacaaattacaaaatttataaatattctaataaatgttgggtgtttaattaaatggattgaggtttgcttttctgtccatggtcgtcccatgtactgcaggaggtttgttagtcagacgaggccaagaaacgccaatgcctaagtttgactgaaacccttttgttgtatcaacgaaagggtttcttgaataactttcgttgttgtttttaatttcgtgaataaagggagtgaactagcctctcatgtggtatgtaatcacctattttatctcatttcaaagatatttcaatgttgttgacaaaaactatgttgaagtaatctgttttgttttaagtggttgaaataaaaattaaatggattgaggagctatctgagaatgacacgttaacatgatatttttattaatcatacatagagataaggttattttttaaaagtacttcccattaatatataggggattgcataacaaatacaaatagttactagatatatagtttgtaaataataattgttttaattaattaaaattactatttacacattatgtgcggaacaaaaggattattaacataattgtgttataggaatttgagacgagacaaattaatctgacctattacataacaaatacaaataacataattagatcaaattttgtttatacttttttccatttttgctaaaattttgccttttcttttcttatgttttcagtttttttttttgttattcgagaaagttaaatatctatatatacaattaagctaaccacttacattaaatttaatactagagaaaagtttggcggctaattttcaaatatctaaattttttatgaaacaaaaattatcaaccttattattttcgacattttattttaattagaaaaaaacttgaaatgtggatactagtgcctatcctaggagcactcgtcattctctctatatccccatgcacattcacctactactacatttggaaacgaaaaccacataatggaagaaacacaaatcatgaaacaggagagaatatgtccatattaagcgttgatggcaaattcaaataccaagatatcatcgaatccacaaacgaattcgatccatggcaatctaagctttggctcttaccttcttaagtcgtaatacatcgtagagttgttatctccacatcagaaatccggtttagctagagaaagagaacataaagaaacaaatctatgaggttgtaaaatctcgaagtaccttgaggcttttaaaggttgattagtgttttgcctcggtttgcgtagctaaaaaccgcttgattaatttcttaatgttcttagtacttgttgataataagaaaaacaactcaaggtttgttattactttaagagatagataagaaacaaagtattctgttatggtttctgacctccacatacactatgaaaattacatcttctttgataaaatcatcttccttaagaaaattcaatgctagtaaaatagattatcctcttccttcgattgatggtttgattggacacatccacaatgaatttcttggagcatgggatcactacaccattcaagcaagagaagaatatctcagtatgaagtgttattttttcaaaagaaaggatctagaaaaacactatgagaggatgtcaaaaagattctacaccttgcgacactagaaaagttatgcaagtttttcaagcacctgcaagaggaaggaaaactattaggaagagcgtgtgatcgcccataactctctataaaatgcaaagagaggaagtgtggatgttcaacaagttatcggaaagaaaaaagattcaagaaaaaatggcagaagaagtatcctcatctgtccgacaaaaagaagtggaaattcttcaggaaaaagtcacaaagagtttcaagtaatcagacagatgttacatctgcaagaagaaaggccactatgcaaaacaatgcccgaataagaagaaaagagataatcttcttagatacttagccaagatcaaagatattgatgactccgacattgaatcaatcttttcccttgatgatgaaccaaccgatgatacagttctagcaatgggtatcgaacaaaaagaagactcttcggatgaatcaagcactaaagaagaagaagatgcatatgatcaattcatgttatttgacctctacacatttcatgcttacaaagtcgaaagaagaattggcgtacatatcccaaccatcaccaaacgccaaaatctacatctttcccaacaaatatgacaagcccatcaaattcaaagcttatctcgacattggagcagcatcatctataatcaaaccagacatacttgcagcttctcactggaattcctgttcagtagctttcaaggcggcaaatggccagatcttccacatctccttaatcaccaagcccatctacatccaactctttccaggatacatgatcaaagcaaagtatataggtctgaactccctggaaaagatttcatacttggagttgatgtccttcatagccttaagaaagtatcttggaatccaaaaagacttaagcacaagaaccaactgctaccatggactaatgtctcccatctctaccccatggaatatgaaattctatcaaagacgagattatcaaggcttcttgtgctacttcacattcagagttcctcaccaaattttcatcacctttatgaaagaatccggactttttcatatcattacccttcaagaagaatgaggatgtcatccaacaaaagcaagccttccaggaatgaatccaaaccactataatcttgctctcgaagaagtcgaccaactccaaagagaagacctcattgagaagaccacctccccatgggcatgtgaaaccttctatgttaacaaaagagctgaacaagtacgaggaaaactgaggttagttatcaactaccatccgctcaaccatttccttgcagacaacaagtttcctctaccaaagcgagaatttctattccatctaaaaacctctcaaattaattacaaactctaacaatcgagaatgggaaaaatgtcaaaaaaagcacgaactttcaaatttgggaagaaaaaacataaactttcaaaatgccattaaaatcgtaaagttttgtttgacttttgattaaatagtcaagtttcgttgactttgccatttcgggcatctcgttaagtttccgttaacaaaaaaatcacagaattaacactccgttaccattttctgttaaaagtgaaacgacgtcgttttgaaattctaaataaaagaaaaaagtaaacccacaaggattcgaacctatggtcttttgcctttcaaagaatcattaaaccactgagccacgagaacatattaacaaaatgaaaaacacatatatatataagatataaatatacaattaattaaaaataaccaaacaaagatctatattaatgcatttaatttaaattattctttcttaaattatataaaaaaagaaacatatgaaatagagaaaatgaaatatattgcctaaataaatggtttcttatattgtttccatctaattatgaacatcacatttaattatttgaagatggaatgattatattttatgtttatcttatatatatatatatatatatatattacaagttaatttatcgaatagatatgtttttataattaaaaatatttataaaattaaattgaataaaattctatgtgcatgtataaattaatcctatatttatttgagaaggattgtataaattttagcctattttctaatttcataagtttcaatttttttcataaaataaaatgaagaaaaaataaattttcagataaaaattcaatgcatttagaagaaatctctatatgtaaaattaaaaatatgatatttcgaaatgtatatttatggtatgtatatttaatatttgtacatatttggttatttttaattaattgcatacgtatatgttatatagatccgtttgcaatctgtactagaataatatcgtggccccaatggttgagtgcatctgaggaaaacaatacgtatctggatcgacgtcgttattttattttagattttcgtggactcacaatcgttattttattttagattttcaaacgacgtcgtttcgtctgtaacagaacatattaaacggaaaattaacgctgtattttttttgttaacggaaacttaacgacatgtctaaaatggcgaagtcaacgaaactttactattttattaaaagtcaaacaaaactttacgattttagtggcatttttgaagttcatgttttgttcatcccaaatttgaaagtttatgtttttttgacatttttcccgttctatatttcacaagttatttttaattagttttgtgtatatatataaatatttcagtttacaataatatcaaaacgttatcgtagcatatttggttgagcgcttgtaataattctggagagtcatgagtttgattccttcttggcacatattgtgtaatatattttcattttgaaacgacatcgtttcgcttctaacggaaaatgttaacgaaaagttaactccgttgttttgttgttaacgaaaacttaacgacatgtccaaaatagcaaagtcaacgaaacttaattattttatcaaaagtcaaacgaaactttatgattttagtggcatttcgaaagttcacgtttttttatcccaaatttgaaagttcatgatttttttgagaatgctaattaatgatttcaagagttttctttaattgagaatgacgtcgtttagcaaatgaatggatacataacatgtctgattactctcttaaaccagttaacaatatttaaatcatattgaaaacaagaggacaaagccagagcgactctgcttttaagacacggcaaaaaagtcaaccaacgaacccaataacaaggaaagagatttgtttttcatttctaatggaaaaaaaacagcaaaaattgaagtctactcgtcgtagtagtcgtcgtcttccactaattccgtggtttttttatcgaagacttttgaataaagtacatttgcagagtctgtcaataaccctttcttcacggtattgctctcaagccgcgtactggtaggctccaaaattatcccttctttatggtttttggaacctgggttctccgattttgaggtaatccttatgtgggttctttctgatttcgtgttttgttttattaaaaggacttctatgtttttttgggggtttctgaaaagttcggtttttgcaggttgttgaaatctttgagtagatttttgtggaacatctgactctcatggcgaagttatgttgcttcggttcttcagactacgatgtatgtaatctcaaatcttgtcttttttttcttttctcttgggccaataagtggttaagatggtactatgtcttgttgagtttgagagatgtcttaaacattttgtgtctaatgttgaacaattatgagatatgaatttgtctttgttggttggtgtagcttgtggttgggagggcatcgactagttctggaaaagggagaaataacgacggcgagattaaattcggttacagcttagtgaaagggaaagctaatcatccaatggaggattatcatgtgtctaaattcgtgaaaatagacggtaacgagctcggtttgtttgcaatctacgatggtcatttgggtgaacgtgttcctgcttatctacagaagcatttgttctccaatatcctcaaagaggtgtgtagaaattttcactattatataggctcttcactgcatctactggctcgtgtttgaaacggtgtgtgtgtgtgttcaggagcagtttaggtatgatcctcagagatcaataattgctgcctatgagaagacagaccaagccattctgtcacattcttctgacttaggccgtggtggctcaacggctgtaaccgctattctgatgaatggacggcgtttatgggtggcaaatgtgggtgattctcgggcggttctatctcaaggaggtcaggcaatacagatgactattgatcatgagccgcacactgaaaggttgagcatcgagggtaaaggaggctttgtatccaacatgccaggttagtcttctccttcactcgtttttgaaaaccgtctttcctaatcgttttataaagatgtttgatttattgcaaatcaggatttcgcggtcctacagataataccaaaacgtatcaaattcagataaaagttatcccaacacatgttttatgttctgttttttttttgcaggagatgtccctcgggttaacgggcagctagcggtttctcgtgcttttggagacaaaagcctcaaaacacatctacggtcagatcctgacgttaaagattcatcgatcgatgatcacacagatgttcttgttcttgctagtgacggtctatggaaggtaaacaatgatgtttgtgatttgtgaaggaactggttggcgtttttggattaaaacggttttgatgtgtaaatgtgtaggtgatggctaaccaagaggcgattgatattgcgagaagaatcaaagatccattgaaagcagcgaaagaactaacaaccgaagcgcttagaagagacagtaaagatgatatttcttgcattgtcgtcagattaaggtgatgaaagatcttttgaaacccaccaaggaaaaaagatggaacaactagaaatggaagaaaccaaataaataagtttgattttgaagagtagaagatatttttacttgtgtttttttacctccggtgtagaatggttgattggtttgcgcaatgtttggtaatttgattggatttttttttttgtggtttgtgtaagtgaaaatgaatcatatcagatttggtgtataaaaccatgagaagattactctcaagtgggtggggagtgtatataaaaagctgtgtgcttcttctgatctatgttattaaacagttctctattttcgttgttttttttttcgtttacaatgtttgtttttttccgataatatactcgctcatatattttaatcaaccgaaaaaaaattcaatagaaattaaacaatttataaaaactatttgtgattcttcattggtaaataaactgtgtttatcttaaaaaaaacatagttgaaaaatttattaacaaccaaaacatatttcgaatacatcgacaaccaaaaatattcaatataaattaattaatttgtaaaaactatttgtgattctccattggtaaaaactactcgcccatacattacacaattagatattagaataatttacatatttttagagtaaatacttgaatctcttaaagtgtatcgtattatagacatcaaatgaaatttattaagcgaagggtcaaaatgtaaaaagtattaatataactaagttaataaattaaacatatgtgttttgatagaaaaacaagataatatcaacatttaacttacgatcgcctctatatgttgttcaattttatcttgcattaaatcgaagtaacatatgcttcgtatatgatattttgtgttgataaagatagagttatcaatcatcggcaatagactatggtacaaaattctctaattgacaacataagggttcagaaagagaaggcagtggtacaaagtttgaaaaagtactccctaatagacggattatgtgcatataacacgatctaacaaaaggcagtattgaaattatcaacagtatcatttcttcttgtaaaaatcgattttatattgagaattttgagttattatgagaattggctgggaaacaatacatctgagtctaattagtttttcaatatttcattctaaaacagagaaaatattagtccttctttttgccaaaaataaccttatgcgttttttcatttaaacacgataaatttaatatatgaaaatatcaatatgttgtccatggatgtccaaaaaactttacaaacctatgtgtatatcttaaacggatcatcttctttgtgtgtcgccatcgttcatcttgagccatgatcaaacagagcatcggcatgtaaatagaagaatttgctgggatctgtcaatcaataccttaaattcaataagattagtgttgctattaggatggatctccttaaattccagtgataatttaacataatttgatgaaaatgctatgactgttcgatgaaatctggtgaagattcggtaataattcgaagaaatcttgtgaaaacttgaacacaactggtgaaaatctatcgaaagtttgacaaaatttatgattgtgattgtgatttcaatgtcagattgtgattcattattcacttgttctgttcaacacattgggatacgatggttgtagttttatttgtagcgtacatacaagtgaattaatattattaatgctttatatttgtgtttacattagtactggcttagataggagggtgagaggtgcgacggccgggggtccaatcccatatttcaataatgagaatattacgtgattagacacttttttgaaaattagttcctaattaagcactttaaatggagaagtcactttagataaattattttgcttatttaccttttaactacattttttccatcggtcatcttttctctctccttttcccatctcttctctctttttttcttttcttttctcactttatcgaagaaaaaacatttcccacaatatcttcaattccaaatctgcaattaatctccaaatccactatacgcgatggctttctcttctctctggactaattggagaatacgaggtcttggtttctttaagattgtgatttattttgcaatttaaatatttgttttgacataaatttgagatttagttatctaagaaacttcttcttcttcaacaatggcggcttgatttgatttttgctctctctcatgtgtcaaactcgtttcatctatgtagcatcgagattccggttaatcgaatttcctgttattatggacatggtatacagaatggatatagagcagtaaaaaggtttccgaatagatatatttaaatggactcgttattatggacaccaaaacattgtttgttgatttttctttcggtttgcagagacctctaccttcaaaaccttatggacatggaactttggtttctttacaaaacacagttaatcgaatctcctgttattattgacatggtatatagaatggatatagatcaatagaaaagtttctgaatggatatatttaaatggactcgttattatggacaccaaaaaattgtttgttgatttttctttcagtttgaagagacctccacttccaagaccttatggacatgaaactttggtttctttacaaaccacggttaatcgaatctcctgttattatggacatggtatatagaatgaatatgaatcagtaaaaagttttctgaatggatatatttaaatggactcgttattatggacaccaaaaaatcgtttggtgatttttcttacagtttgcagagacatccacctctgagaccttatggacataaaacttttaccaaattcctgagataaacgagatcgaattgtttaagaaacttctccaaaagttatggagacgtggaaagagagaggcgctacaaatcattagagagagagagagagagagagagagagagagagagagagagagagagagagagagagagattttatttatgggaatgttacacgtttaggcacttttaaagaatttttttctatttgaggcactttgcagggatgaagcactttttcattgaatttatgacaaatttgcccctagaaataaaaacgagaatactttagcgtttgaaagttggtatatgatgagtgggtcgttggatggaagttgtagctattatcagattatatatataatttaattactcaaaaaagcataatatatattctttctctatttgtacctttttttttcttctttttcttcttcatcgtctacttcttttatcttcatcgactcttctccttcttttctttctctatctatctctttcttcatctttcagtctttctttgcaaaatcagacatgagagactttctcaaaatcgtgtagcttttgtattttcctttacggagaagcctctctagatttaagtaacgattaggcttattcgattggtttcggagcggcagcgcttgtgactaacgatggaagcttgagtgtagcagacagtaacatctagagatgaaagaagaagaagatttgttccctcaatcttacaaccaatcgatccaggttttgcgacgattcttcaattctacgaatagaatttagagttttgttagattgtgtaaatatttgattcatattagcgaaattgtgtttgtgaagacgatgagatcggttgcagatcgaaagttcctctttcgttactctcctttgtttcagatctgttgcaagaaggcgacgagagaggcggtgataacgtaacgtgggacgtttctcgacttacttaatttggattttgaaattccacctgagaatttgaactctctcccgaaaaagaagaagaaatggcagcgtacatggaagagattccgtgagaacaaaaattgttaggagtaacctcgatattacggggttaccgagatgcgaggtcctcgttactctgttctattccatggagcaccagattggcaaattccagtattgaatttcatatccatatgatcagcttgtttggtaccatttgattctagcttgataaattgatgtttcgttgaacctctaagctaagagcactttacttcgcacatgagaataaatcatttccacatggtcacatcttgttggacaagttttcatggaaacaaactatcaaagcatccaacacgatttcattatgtataaactaataatcctataggtcttcaagccccaagaacaatatgtagacattgctttcaaatagcaacactcaaaacccaattagttaatgatagtttatatccattataacttgtccaattagactttaacatgtggagtaatggtgaaacatgacaaacacttgaacacaaatgattcatgtgtagagctttcatcaattttctatcgaatgaaaaagagtgtcatggtgatgcaagaatcacaacttagtcaaaacaaatcatgcgtctttttctttttcaacacaatatccacaataacaatacattacttacataaaagaacgagacccatcaaacatgctttcatataaaggcaaaaccataccaactaaaacccaaaatcttattaacatgttttctttcacgtattcttttctctgcatttgttattcttatctgatctataataatgtgtccatttcaaatgtgttcatacggaatcttgtttactaagcatatacattctacacgaaagttaatgtataagtctgctcttattcattcaagactcatataatcaaaattctacacgaatttatttgtaaaactacaatcatcttaagtgattatgttcctcttgtgtatttctttcattttctgttaattaaccaaaaagcaagtttgtaatcagatacttagttgaaacttatgatacctaatatgtcctgtttactaaaatatataacgactctccctgtcaaatgtacaataattcatatccatcaccccacgtccatacaaccatgtctacaccgttgtagaatcacaaatacacaatttctacagaaagcataagtaataaccaccaatttcaaaaactatgtccattacgatgctttgtgtttatattctaaccctttacaagtagccatccactagcgaccattctatgttgaccatatagttgtagggatcaattacaattttcttgggtagttttataccaataaacaagtctatacatgaccaataaacgccaatccaaagtacattgtccatttttctttgaccatttattcacttgtgtataaacaatcccatcagtaggacaatgtcagttacatagcttttataaaaaaaattaacgaagatcttatttgtattacactctcaatgaagaccattagttcacttggatacacccgtctatactaattatttgtaataggtagaagacagaaggatatgtcaattcccaaaaattactgatttttattcaatagaaattcaacaaatatacatcgattgtataacgtcataaactcacaaaagttactttgattttcatcatgtctcaacctctcgtttctttcttcatcttgactttgaattagaagtgattaatctcaggaaatcaaacaatcagaaacaatactttcaaatttacagatctgatgtggaataagattaagaactttctaattttgtagatcagagataccagagtcattaggagcagagaggcaccaaacaaaacgacgaataaggcataaagctccctccgccaccgctactaccaactacgccatcatgtcttgattagctttttaaaaacaatcatagcaaggagtcaaagcaaatatgtcggagattagaagataaagccctcgtttttgaactttgatttttcgtaaaagatttgattttggttttggaaatagaaaaataaaatcgatggagaagcgctgagaagatatgacaaagagaatgagtttgcagttaaaaagggtaaattggacaatttagtttgacaaagtgctttatcattttaaagtgtctaaatccgtacatagttttttaaaagtgtcctagaatgtaatattctttttatttattttgggtaaggatcatagaagaagaataagagaaattgagaattaaaaacataaatattaaattgagggtaaaaaagtctaagaaaaaaagaattagtagaaaaagtgtctattccctataaagtgcctcaaatggaaaaacattctctaaaagtgcctcatagtggaacattcccttcaataattagagggcaccattttttttttttcttctaaatattaaaaaaaaattagtaacacaaaaatgaaatttagaatggacctataatttttttaatgtattgttttttgtttttaactaaatctttaacaaaattatcatagaatggacctataatttggcctccttagaaaaattgaaagaaacattttaagaaaatgtagtgaagattgacaacatagttggccgagtttccggatctgcttgttaatacgataaagcaatttccaccatttttgtgagcttctctctattttttccctgtgaaactaatacacgttcatcggaaatgcttctcagtgacagagtttcttcgggagacgatgataaactcgaaaccaaatctctcggatgtttcccaattatcacttccaatatcaaaaccccgaagctatacaagataaataaactctgtttatcctcaaaacaaatagttgaaaaattattaataactaaaacatatttcgtatattttgaatacatcgacaaccaaattttctttttgaaatttatactaatattttgtatttattatattttaactttttctaaattttgaattctgttttaatttattaagaaaataacttttgttttaaatctggataaaactgtcattttcaatattaaaaataatgtttttattaaaaatggagaacaatatattttcaaatgaaaacttaaaatagggtagttttttttttcaagtttttttcatgtttttttttctaattcgttctaaaataccgaaaataacaagattgataatttttgtttcataaaagatttagatatttgaaaattagccgccgaacttttctctagtattacctttaatgtgagtggttggtttaattgcatatatagatatttaactttctcgaataacaaaaaaaaaaactcaaaatataagagaagaaaatgcaaaaatttagaaaaacataagcaaaaataaaaaaataaatataaacaaaatttgatctaattattttaataatgagtttttgagcgcactaattgttatttcatatattaacaatagatgttttgtattattgtggagatatagtatattgttggataaataaataacccagaaaaaatgtatgaaaaaaagctataataaacatgtggcaccaccgcaccgaaggtaaaccaaagccagattaatttgtctcgtctcgggttcctataacacaatgatatgataccatcgatcgtatcaagaagccttgaactattgagaccgttttgttaggaaactaggtctgcgaggaagaagaagaaattgaggtatgagggtagaacgaggaacatgacaaacagctataagaagaagtaacggagaagagtgagtcctaaggttaaatataagtgcatcacacaaaatgatgaaatttctaaatatttgtgtgttttgtataagtctttccttcattcttcatgttgtcactctaagtaatcaaaacaattattagtatgttatatgttatggtgccaaaacaaccctacagcagttggtttcggtttagttgatgcggttcagttttgaaaaagacaaaaaaaaaaaaactgaaacgaagaaaccgagaaaacgaaaaagagaataacggagagattgagagagaatcagaaagcgaaacgaaattcagtatccattgcttcaaaattcgacataacttcgaattgttgggtagttgaattgtgccactgaactcccacatccggtgaagtgaaagttactgtttttcccggcgaagccaagagaaagttactgtttttcccggcgaaaccaagagaaagttactgttttttccggcgaaatttgaacctccggcgagatagcatctttagctatggctgggaataaagctaacgacgaagtcccgaggaagcagcatggtccagggaaggagaagcgtgtattaagagtttccccacggagaaaacgctctgcgacaaaggtaacggaggaactgggttagaatctctaatttaccgtttgttgtctttgggtgtatcagaattgtaaagcttgtttgattaaagtgttagaatttgtcggaatttagcatatctttaggatgaaaaattgagaagtagaattggaaatctctgtttccgccaaaaatatgattttgagttataatctggaaaatgtctgtgtacgtacactacttctgtttgctcaacagtatatgacttttaattgcaggtagtccaagtgttgctccgactgaagatcttacagttgaagagttaccaccaagactctttgctctagaccggtacccttccgagacgaagatgaacgcgtactctaaaccggagtacatttctgacctagcaaaagtactaaaggggaaaccagagatgcagtttcttctcgattctccatttgggaaactttttaaaatacccaaaaacaaggcatctttcaatgctaagcttgtccttggactaatatgccgtcagttagtgacaaagaaggtgaatgagatgtggattgtattcggcggtcatccaatcagatttggactaagagaatttagtatcttaactgggctagaatgtgggaagtatcccaagaagaaagacgttgatgatgttatcagtgtgaaacctgagtgtgagagtgtttggaagactctgtttggtgagaggtttggggacacggttccaacaattgctgatttggtgagctggctgcaggaggaggaaagcatggaggggtggaagtaactggcactatctcttattattttggttgacggtgtggtagcggcccacagtaaccccaacatgcctacttcgaagactgtcgagatgactaagaacctggagtttttctgcaaatacccatggggaagggtgtcctttacccgtactttggggaggatagcaaatttccaaactccttacgatgctcagaaactaataaggggtatacttgtagggtcttatgcactccatggtttcccattagctcttcagcttttagctttcaaaacaatcccatcaattgctaagctaggacctgatgatgtacctaacaggacatttgctgagaggtctatccatcgtcttgcctctctgcgagcaatccggacatgtcgcattttggagtgtgaggctgctgatgaggtgtgttaaattgtgtatgtacgtacataataagtaaatgtacattatctatggttaacatacttatttgtgtaggttgaggtcaactatattgtgaaaccagctgataatgtttgtcctccatctctttcatgggatgatgaagttgatgatccaagggttgattacattgaggcactgttgatagatgggcaccagtggcaggaggatgaatgggttggaggctatgctagagtaccaaagcagtcgcgcccaccacaactagaagagacaggtaagtataagtataaatgtttttacaaatttttttggtattgcacctagaagaaaaccaattaatagcagcaactggtctattgtagatgttaagaggaaacgaaatgcaccgggcccgagccctaaagaacctgctatgaaaaaacagaaatctgaaatggactgtgataaagaagagactgctgaggattgttttggagagcctgtgcctgagaggtttattgttgaaatgaggaggtctttgaaggagctggaagaccaaatgtatcaaatgcatgaagatatgaaagactttgtccgtgaccagatacgtgctgcccttgatccaaaaggcaaaaggccagaacaaaccataccttcccatgattcgcgggaaccacctacttctatggataaggcaccggttactgcgaagaagccatcgagaaggatgtctacaaaaggaagcactggaacgagaaagtcttcaaggctgactcgtgtttctcatgatgtggacactcctgcactttctgttggctgtaattccaaagaggaagatttggatgtccctggagtacataccactgctttcggcggaagaagaaaaccttcaaagccgaagaaaaatgtttcttttgctgttaacactattgaggaacctgattccaataaggaagatatgcaaggattcattgatgaataggtaagtcatgtacgtatattgctaaatattttataacacatatgtataactgtactgtctggttcgatacaggatggcgctaataatgaaagtgattttactacaaatgatggattgaattcttctgccgctgaagaagagatattagacactggatttttaatagttccttatgctggatccacacaatcccatctggtatgtcgtctactaatactcttaacaatctgtttaaatggtgtacgtacatattcgcttaagaagttagttaaactatgtttcaggatagaggaaatgttgttgttggtaagactgtcttcttaggttcaatgtctgggactgtctttgtaacacaggaagagaggcctgtggaagaagctactgttgacaccgagatggaagaagttccatctaatgtgtctgcaagagtttcagaggtagatcttctggtaatcgttatatacagatttccatgactatatgcataactattacattaatttcttcacttatctaacgcttaactctatggtagcctatgtttcaggataatggaccaaaggatgttgctgaacctggcttagttggtacccatacaggggccgatgaaatagctgatgctgacatagagatggtagacaatccatcaggtttaccttcaacatctgcacaggtatgtgttagtcacttgttctttttccatatgtgtacgcccataagactttgcaaattatttttgtttcaggatgaagcaagagatgccagtgcatcgactgaagctaatggcagcaagtcagaagaaacttatgagccttctgatggagacacagctcacgtacctgccacaagtgtacgtacatttttgtcactatgttctgtgtacatatatattgtttcatacattactaaaaagcatacattactaaaaagtttctttccgatgctaaattctacaggttgaggcggcaggagaatccaaattagtgacagtgatggaagttgaaatacctgagaagacccacagtgatcccccgtcaccatttcaagtagttaacaatgtaagcttactcttgcaacaaataaaatgtactatttactgttcaaatgtataaaatttatattatgcaggtcatacgggagttggataccaaagccgttggtgatttagctgcagccactgatttggaggtaataatttgtgtgtttcaattcctattttcggaatagcatacataggattatatgtgtacattatatatacttgtgtacgttaacttgcacaggtagtcatggaagagccgtgtattgtcgaggggtctgtagaaactgaggatcctaacccagggtcagatgaagcagacaagaccgatattcctaaaaataatgtatgtacctattttaaacatagaaaaacgtatgaaactgttgttgacaatcatatttgttaacaggatgaatcagacaatgctgctgctgtcgaagcaaaagaagaaaaaaaatcgtccccaaaggtcccaaagaaagtgaagaaacaacttgtctatgaacaggatgatgcccatcctcatggttttaaggcaaaaacagtattggtgcccgatgtaccagctcaacagatagaggttgttatcagggctggaaatgtctcatacaaccccctggacatggttgacccttcaaaagtagaggaattcagcaatatcattaaaggaccctctgtgtaagtacattatagtaaaatggattatttaatatctcaatcatcatttttaaggttgttatcaaatatttttctggattttacaggattcacactcttttcgggtttccaaaagtgcccaacgacttttttgcgaaccttctaacacctggtgaatgggtcgaaagtacggtacgttgcatttatatacgtacattccttgttataaattgtacatagatgattaaatttttcgtggaagtgtatgtacactgatatattttttgaacatttcagcatttagaaatgatggcaatgttgatgtggcacaagaacggggaacagatgatagcaaacagatgtattgtattggacatgatgctgacgcatcttcttaccaagcgggtgggcgacttcaagaagtgtattaataagaacgggttcaaatggggtaaattactgtccgacattgctaatggagttcacataaaccgtgaacccaatatgaagtggatgaaggatgtcgatgttgtgtttgctccgatgaactggaagagtgaacattgggttgctttgggaatcaaccttaatgaacggctaataactgtgtatgacgctttaatatcgcacacgcgggagtcggctgtgaaggcgagaatgactcctatttgcgaaatgatgccgtacttagtcagagcgatgtgccaggatgtattgatttctccgtactcagttgaaccttttgagtatgtgcgttgtcctaccgttgctcaaaacccaactacaggaaattgcgggccatacacgaggaagttcctggagttgcttgcgtttggacaccctttttcggatctgacaaccattcgagaagcagatatggtcttctaccgtcagaaatactccgttgacatctacgagcacggcaagcgggaggccggtactgtgcacttggtttaatcgtccaagaacaatattctggttctttgcaaccaattattatgaacaaacctgacttatatatatgattgcaactacatttaatttggagattgtcagaagttaatttattgtcctctattatattgtcgtacacatcgttcacttataattacataatgtaaatgtgtacgtacatatctatatgtctcgtacactgcatattaactttataacataactcaagtgataaattgatttgacagccaacgcttaccaacacaagtatgacattcatttcaaccgtaattgccccaaccaaattcacagtagtggttattaaagtgaagaaattactgacgacctctgactatctcatttcaaacatggttaacccgactcttcccgacgatttactctcgaagatagctaagaacctggctgaccaatgctggtctgaccttggtccattggtacgagccggcactcgtggaagagacattgtctaccgtccggatgtcctcaaagatgctaatattctcaccttgtgtgactcgcccgatgacttccaagctggagggggccacaatccctctggatccgctgatgaaggccgacatcgaacatttttcttaaggtgttttgcagctaataatcccacggccgtgtattacgaatgtattcgtgttctaacgcatgaacaaaacatcaatggagccatcaggctcttacagcgtcatgctccagtacgagcaaatgcaacacttgcatgcgccattgtattcatatgtgctgggtatgattatatgggcggcttgtttctacagctcttcacccgcaaccattatccattggactcggttgccactcgagttttgggtgatgagttcatcgaggaaataaagaagtttgaccctccatacagcaatacatatggtcctacgttctcttatcctaccagccatggaattagtatgcctccttgcgccttatattgttacatggtatcaggagctttccaaaacgtttgcaaccgctgttacctctggtcgtgtgccaggcgtgttagtcaaatgctatagttattccattctactttatatgtttgtttatgttatccgctatgtcatgtttcaaattatgataagccttctactatgttgtttatgtttatgttgaaattatattattgcttaagaaatttgcaaggtgtgttatgtttctcaagttgaatatttttcagccaaattcacatatgatatttagacactgcagtaaatgtaaatttggatattaaaatctaagcgtccacaactccgtacacgtgcatctaccaaataatacttagaggttttttctttgtctcggaaaactagatatggacgttcactagcatgagatatcaactctaacgtacactaaaaaataacacatgcaaacatatgaggtctttggtttgtctcataaatggtgatatttatgaatggacgtacactaataatacactacatcgttcactgtttgttgagtaaatgtagaaatgtaaatatggacgtacactaaaacgtacacgacaacgtacactgtttgttgggcaaatgtagaaatgtaaatgtggacgttcactaaaacatacactacaacgtacactgtttgttgagtaaatgtagaaatgtaaatgtggacgtacactgaaaccgtcagtaaaacgtacacgtctaggtttaagctgttattaaaaagaggttgctcataacaacgataacaaattatatatggaatactattactttgatttgacaatatgaatacacatcatcacttaatacctttgcaataaatacaaccataacttacccaaccatatcttcaatgatgcttatttaagtgttcaaatttcattttctcgaaacaccttactcctaaatatgacaaacccaaatattcctgacgatttgcttgcgaagatagccaagaaaatggctgacaaatgttggtggtacctcggacctatgttgaaatctggtcctcgtggaagagacattgtctaccgtccggatgtcctcaaaaatgcaaacattttcagcatgtgcgacgatcccgatgacttctacgcggcaggccacgatccaaatgacatcaactccgaaggtcgctatagacccttcttcaaatggtgcttacaagctggtaaccccacggctatttaccatgaaggactgcgtctcgttacacatgagtctgacatccagggagctatcctacacttagagcgaatcgccccaaggaacgccgctgcaacccttgcatgcgcaattctttacatatgtgctggtaatgctcacatgggtggtgtctaccttcggctcttcggaagcaaccattatgctttggaatcggaggacgcacgtgacatttgagaggaggtgctagaagatataaagaaatatggtaatactttaaaatacacatacgctaacagtttttcgttcccggaatgtgttgacgtaagcactcctgaatgcgcggaggtgtgttacattagatcgagactcttcaataatctttgcaaccaatgttacatctggttgtgtgctaaacggattagccagatcctgtagagctcacattcgccacgatcctgtcatatttataagttttccatgcaacaatatgtgagctttttacgttgattatcagtaatggaagtttgtttttaattaaattaccactttgtaattgattcaaacatactagctcaaagtactctaatatgagacatcattaaaataataaaataataaaatatctacgtacacgatatatgataatgtacacgtggcatagtttaattccaactataaagattacatagtgagcgacgatatagtttgtaaatgaagacaaaaggaaatttgatttgacgtcgtataacccatatatagaagatttcgctccatattaattactcgctgtcaaatacactctagaagtgacctccatcacactctcattaatatctctattagacgtacacggttaccgagcaatgtactcaattgatttggcagataaaataagtaagttaatgtttatttgaaaagattgttagtaaatgcgttaacccctaatatagcactatacatgaagccatattgttccacttatatgccatacaaacagacgtcaactcaaccttctgtcagagaacgtaatgagtattttgtagacgtacacggcgcgattatgagtggtacacaggaatttgtttaaattaaaagttactaatatgatgcactaaatatacatccacgtcacccacccacttacattgatggttattctcctctttaaaactcatgacaaacacacttagttgaatacacgaatccgtctaaacctcctcgtttgaaaaacaatgcctttcctacctccgctaacccctccaaccgagttgtacctaggaatccaattgccaaaccccataagcatacttgtcaactacctccccgtcagccagactcccatagagacgctaaggaacttagtctacagttgtgacatcaacacccttgcaatcgatgaattc

SEQ ID NO: 1169 - DNA, 33513 bp, Arabidopsis thaliana
ctacctatcctacgttatttttaataatttaaaatactgattttagattagttactaatatttttatacgaaattttatgtttaaataatttaatgaattaaattcatttttatattgacggtaaaataaatacgagagatatgtccaaaagatttaaatttatgttaaaatatgaaactactactataacttatatttataacatatatatctaccatgaatttataaatttgattcataaaataaaatttacaattaactttaatttattgttatttaagtttaatttctttgttccaaacattttttaaatagttacctagatagtttattcctatttattgtttgtactttcatattctgattatccaaattttctgtttcttaatttaattcctctttattagtttcattcatttttctttttgtttcttagtatttcttctagtggtcaccaatctaaaacttcatataatgcagtctaaaaaaggatccttatatgtaagactaattatgtatttatttattattatatagattttatatttatatttatttgaagaaaaaaggactttcaattgttctatttaaacttgaaaactagcttgatgatgaaccacttctgcctagcatctgttaagagctaccagaaaaatcaagttcgtcattttcacaccttttttttttttttttaaatttctcatcgatcaatttgtatggtttacgattacgtgccctctaagctttctctgtatttcatgtgattttaattgacaacttacaagctttaagtttccagtttttcttcatgtgattatattttccttttctcaaacatcgtaaccatacacgtatagctttttcaacgtttttatgttgatctattagctaataattaacattttacgtgaaaaatgaagggtttaaggaaatttcagcaaatggccaacgatcagaagaatagtgagtcttttccagcgaaggaagatcataagaaggatgatgcggcagctccagcagaagtagaccataaggatgaattctcggcatcacagccacatccggtcgaaaacatagttttagttgggcgtacagggaacggcaaaagcgccacggggaacagcatcgtcagatcaaaggtgtttaagtcgaaaacaaaatcatcaggtgttacgatggaatgccatgcagttaaagcagtgacaccagaaggccctatactcaatgtgattgacactcctggtacgttgtgccatgggaaaaaggtcattaaaatcctcaacttattgaaaatgttgatttaatttctcaattctcgacgaaataaaatatatatcaaacttatgttgattttccaaataaatacccaacttttgttgacataagtttgatatttatttcgtttggtcgagagttgaggatttacattaacgctttcaatagttgaggatttttatgatagtttttctgttttatcattgcacatcttgacttttttatatgtcatcagtatgtaactaatgtggactggggttggttacaggtctatttgatttgtcggtatctgctgaatttatcggtaaagaaatagttaaatgcctaactctagcggatggagggctacacgctgtgctcttagttttatctgtaaggactcgaattagtcaagaggaagagatggtacttagtaccttgcaggttcttttcggtagtaagattgttgattaccttatcgttgttttcacggggggagatgtattggaagatgacggtatgacattggaggattacttgggtgataacatgccggacttcctaaaggttggtaatttgtgatcaaatttgtgcactctacggaaacagaggtttcagcttcgtgacttatttattgcattttctttggtttcagagagttctcatattgtgtggccaacgaatgattctgtttgataacaaaaccaaggatgatgagaaaaagacaaagcaagtccatgaacttctcaaacttatcgacttggtcagaaagcagaacaacaatattccgtataccgatgagatgtaccatatgataaaggttaaagagtttaccacttttgtttccatttgcatccatctctcgcgatgttttgaatgctaaagaaagcaaatggtctctccctcatcaggaagaaaatgaaaggcacaagaaagaacaagaggagctagaatcaaaagggcattcagaagagcagctcgcagcattgatgaaggagttacagataatgaatgaacgaaacctcaaggcaatggcagagatggtataaactcctcatattctttcacatataaacataagcataagtggtgttgaagttgtcattaacaatatctttttatttacctcagatggagaaaaatatgaaaatagctatggaggcgcaggagaagctctttgagcaaagagaaaaagctcaggagatgagctaccagcaaaaaatggaaatgcaggagaagttaaagcagatggaaggacgtatgcgtgctgaaatggaagcgcaaatgctcagccgtcagcagtgcagcattctctgatcattcactgtgcgctcttccaccctcacactttgccttcttaatgacaaatagagaaccattgcctagactttgtgtttctaacgcggaacattttctatgttcctcgtttgagcatgctcttggacttttggcctgttatgagtcagcttttgcttttctttcattttcatttatgttatttatctaaattgattaggccagtcgtagcctaatctttgtttgatttgctacgtatttttagtgtaataaatatgtgtgtaagtgttatgtgaggtgacacgtttttatataatttaatagagagtccagaaagagatttttttttctcaatgaaaagtttcattgtgttgagttatggagcataatctctcaagacacactcgacgctttcattaaggtatttcacgttttagtctatgtttgttaaccctaggatttgtatacttgatttgaatcaatatcacctttttctcattgtaagaatgaagaggcgaaaagagctaagatttgtaatttttgaatattacaagaaaatgttcgattttcctaccgtgtaaagcctatgataatagtaggaacaagcaagttcctacaatttttcttacaaaaaaatatgtataagtagtgttacgtagaaaatcgagaatgacaggaagttcgtcgcaaatttcttaccgactgaaaacgtggaagaaaaatggtaataaagttcccgacgaatttcttaccattctctttgaagagaaaacagttcctcccattttcctaccaataattatgtttttaattaaagaaagctgcaatagcgaagttcttgcttaccgttttacatatttccttatgtctcttttatggtttcatttctttttttgttgcatttagtggttaatttgtgacttcttgaactttataactccaagggaattatttgtggtattttagttgcgttttggagtcatttcattggcatttggcaagataggcggattccaaacacaagaggataaaacgagccaagaatgagtttgaaacatataacccatcaagtcaacacaaaacaaaaattagaaaactgataaaccgaaatttgaccagaatcaaaagatcgaaaatatgcacatgcatgcgtcttattgtctatgattagaaaaccatatggtgatatgacaaagagggcccttaccaaaagagttttctaactgtcaccaaacaaaacgtcatgtttacaccaaaaaaattggacgtattggatcagtgatttggatgcacctaaaataaggggtatgatttaagcaaacttataacacactgccattaatgataaaaccatattgttaaaaaaccaaaagaaaacaaaagactacataaaaaaacttgacatgaatgatcttatcagatttcactggagctacaacatctcaacatatcatagattgatgcactttcccagttttttctgaagttccttcgtctctttttccgccctctccagattctctctgagcttcttaatctcatcgctcgaccgcttctgaacttcgtttgccctcttctccgcttcaagtcttgcagcttgctcttcacctagttgctgctctagtctcttagcagtgtctctcagcttagtctccacctgaacaacaacaaaacagaaagctgtcggtcaatgaaactctcctgtgagaccataactattgataaattaaattaccatctcggtgatgcggctaagctgcctatcataggacatatcgatttgcttcttgaactcatctatctcattattagagtaaccctgaagtaactcaacctcctttttctggtcccttagcttgatagcctcttcctgaaattgcaaccacagttagaatcctctcctccaaaacagaataactcagaaaagtgagtgaaagcaacaatctccacctgtagctcatggaacaactcatctgaatacggttttccattgttctgtttaacaacagattcaacaagtgagagaagcttctgaacttgctcagctttcttcaccttatcagtagtcttgttattaaacaacaccaaccgattgtcacatatcccaagaatttcctacaagccacacacaattcaaattatacttctttaatgaaagactcaagaaaagaatagccaaagtcagcttactttaagaaactcagggcaatagtcagccaaatactcctccaatgtctcctcattctcttccaactcatcgccaccggtaaaaacaacgatcatatagtcagcgatcttactgccgaatagcgcttgcaagaaactaagcacagtttgctcctcttcagcaagccgcctcacagagaataccaacaagatcgcatgaatcccatcttctgccaaacttatacacctcacaatctctttaccaataaaatcagctgcagtagacaaatcaaacaaacctatacacaaaactcaccattaacataacactcaaatagtaaaatagactaaaagtgaaacaatttacacaattggggagcttaccaggagtatcaacaacattaatgatatcaccatcttcttgaacaactctctgtgactcgcacgtgcttgtcactcctacagttctagctcttgacctaaaagctttcctcccaaggatactgttacctgtcgcactctttccgtttccagtacggcccacaagaactagggttcttttagggtttgatgatgacgcaaattcccaatcatcttccatcatatctccacccatgtccaacaaactcatatacccttatctgaaaaaacagtgagataattgttgatcgcttaaagggtcacgtaaagttctaatctttgatagagaaatcacaaaatcaaagcaaaaacagtgacgatcgaatattacttgcttgctaagaagaattaaacaccaaaaacagaacaaaacagagccagaagaatcaaacctaaccacagaatcaacagatgaataagcaatcaagtaaagaagatagagacgaaagaagattacttgcttaaaaaccggagaagctaaagcgacaatcttagagaaaaatatcttttttggactttatacagaatcagtaaaacctgacaagaccagaagtctctgcgaaacaaactcgtactttatcacctgcgacgcggatcacctattagattgattatacaccgtacgatgtattattataatcttcatcctacggtaagcccaataacaagcccatttcacaaactatcagagtaattatctgccgtccgatgccttaaaacttaatccgacggttgaaacatataattaaggcccattagaggcccatataggttaaaaagtccacgtagaccgaagattgatttgtctacgggtattttaattttttcttttcccagaggaaagggaagagaggaaacaaaaattagggcaaaattagcgtattgatgtgtttcacttttcttcttcttcttcttcatcgtgttcgtgtttgatttgcgactttctccaaggaaaatttagggttttcgatgaaggaacctttgcagaagaagaaggtggttgttcgtcacttgccgccttctctttcacagtccgatctcttatctcaaattgatcctcgtttcgctgatcgttacaattgggtttcgtttcgtcctgggaagtccaggttagggttttattttctcgttgggtcttgaatttggaattttggtttctatgaattttagggttacgaatttttgtaatttaagaagatgatggaaattaaagaagattgtatttgattatgttggaaattgaagattattgtatagatttttgttacttagttgattgtagagaaattatacttagtagtattgggttttttttagtgatgtgtgtgtgtgtttgtgtttttgtggtgtcttcagctataaaaatcagaagtattcacgggcctatgtaagtttcaaggcaccagaagatgtttatgagttcgctgcatttttcaacgggcatgtgtttgttaatgaaaagggtatttgactttttaatctgtctttgtctgatggttgcatgtggttttagtagtgtgtgtatttgaagatgtgatttttgtggtttcttttggtttaggtgctcagtttaaggctatagttgaatatgcaccttctcagcgtgttccgaaaccgagtgataagaaagatcctcgtgaagggtctattagtaaagatcctgattatcttgagtttcttaaggtgattgcacaacctgttgagaatcttcctagtgctgaaatccagttggaaagaagagaagctgagcagtctggttcgtgtttcgtatttgcaatcattttgatgcttcttttgtctgaagaggttggttattctctagtgaattaatcgaaattactaacacaacaattatttttcttaggtgcttcaaaagcggctcccattgttacacctcttatggaattcatacgtcaaaaacgtgccactgtgatgggaccccaggtacattatgctcacagttttacggggttttcacttattctacctagttgaatatcagaactttcctgggacggatgtctctctattttatttatttcaaaatggaacttctattgttgatctctggtttctgttcaagcaacagggtttatctgatattcgaagaggaggtagaagaaccagagtagtctctgcaaacaagccgagtccaaggccctcgaaacgtaactctgaaaagaaaaaggtttgtctctcactttttaggagtcaatagtcagtgtcgtctgccattatactcatctgttgccattatatttttcattctagtatgtggaaaaagaaagttcaaagaatgtgccccggaagactacagcagacgtcagcagctctaagccagattatcgtcagtcaaattcaagtggaaaggaactaccaggaaatgaaactggtaaaaaatcaacagctgttgttattcctaactagctaattacatatttttaaaaggccacgtttaactctttgtctttttgctactcaattgcagccgctatcattgatagctctccccctgggatagcattgactatggattctgggaagaaaaagattttgctcctgagatcaaaagaccgagacaatcctgatgtaagcttttttgttctttatgaaagttgtgcaggctgtttgattgtaaacagaattataagccatgtaaatttcttatttgttaatggtatttttagaaccctccaccacaaccggaacagcatatagacactaatctttctagaaactccacggattcaagacaaaaccagaagagtgatgttggtgggaggttgatcaagggaatacttctgagaaatgactctcgaccgagccagtcttccacttttgtgcagtctgagcaaagagtggaaccctcagaagcagaaaactacaaacgaccttctcgaccagccaacactcgagcaggttataaaggaatacaatttaagtgaaaatgtttgcttcccaagttgggctgataattcaaaatagatggtccatgtgcagggaaagattatcatacttctggtaccatcagtgagaagcaagagaggcgtacaagaaacaaggatagacctgatcgtgttatgtgggctcctcgtcgtgatggtagtgaggatcaaccactatcttcagcaggttctgtttctgttgttgaccaataaataattagtttcattttcatggttgtgtttctcctccatgacatttgataggttcttacaggaaacaatggagaagtgaaagacaggatgttctctcaaagatcgggagaagtggtgaactcctctggtggtcacactcttgagaatggttagttcatctgaagttggagaatgcataatgtgtcttgtgtcattattatatgaataaataaaagtgacgttggttctgccaaaaacttttgactctatccaggttctgccagacattctagtcgccgtgttggaggtcgcaatagaaaagaagaggtggtgattggcgagggtaaaacctcccggagaggaagtggtggtggtcccagttcacatgaggcaagccaaaccaaagtcttttcttactacttttcctctgtcctcttttaaccatgtatagaagattcatttttactgtgttgcagaagcaaatgtggatccaaaaaccatcatccggtacttgatatattctcttaacatatggtaagcttcagtcgcactactaccctctcttacttgaaatttgtcaacacagttttatgattgttgtgacctttcaggctaaatatatgagccattccactggattttgtccttcaatgggaatctatagatctcaatcgaaatggggaagtaacattatcaacatcacttgggttttggagacttttggtccaacgttgtaagtcgtagtattgcacataaaagaggccgttctcaaagttaggaatcagctcaagatttatgagaagtgagataagaaaaactcgtttgctactgccttttgaaggccctagcggttcacggtacctgcatccccccttttggcttgtgcggtgtcacagacaagtgagtgagaagtgagaacttactctcgagtctgagtaatgaaaataaagtcaaaagtgtatagggagcgggaagcacagtgtgtcgggttttattttgggttcctgagaggccttagaacttgattgcacgcttttaaccatataagagtttgattactttgaagttaatttcttgctaagtaatattttcttgtggaagttagtttattttttatatgattagtctatttgtacttatttttgatttcaccaacataaaagttatgctgaaagtgatttcacgtttagaaagaccatattcttgcgattaggattaaagagggttacataaattaatcaaatggtcaaaaattaggaaatgagaactcacttgtggaagagaagtcataaggataagagaccaatatatatttccccttggggtcgagttttttgggcctggcttgttagttgttacaatcgagtgtgatgcgtcccatttcggcggagactttgaatgtgtattattgacctttgattcctttgtccatcatttgttttgtgtttgcttaaaattaatttttggtcttccccagtcgactatatactctcttggtcacttgtaacgaagtaacaaaatgaaatacatgtcacatgtgatatatttatacacagactacaatgaaatcaagtatgttgactaagaagagaagaaaatgaagtttgttgactaaagaaaggtcaaaatttttagaaattatcatcaaatcataaagatagtaaaataatgttaacagtatgaagtgtgaactcatatcttcgaagagattgagacagagtttagaaaatctcttacaaatctagtttctacaacctcaactaacattgtccaaatctgtctctatcctctgttttatttttttcttccggtggtacaaaaattcacaatgaactgtatttatcacaattaatgaccgattgcttcttcacctactctctctctctctctctctctctttggaagtaaccaaacaagcctatatgctgctgatcccatctaggggccaagcctctcttctttaaaaacttttgacttccattttcttgagaattcccctttctgggttcttgatttggaaagatgggtaacaagataatctcaatgatgaagaaagatagcaaagatggaggaggaggaggatctaagagcaagagaatgaatcggtctcagaggaaattacttgctgatgaagagatgttgcatcgtcgagctctttccatggcgattcatcaagctcagctttctcagagatttgatggatctatgtctagacgggtcgggtctactagtactaggaaacgtactctctctgacccgttttctaatggcaagcaggttaagtcactactgattctcaatcttctccacacttataaaagtttcaatcttgaaaagttcaaaaggtttcatttttatatgatttaatgatcgtttcgactgagtctttgcctttttgccggttttaatgattgtttgggaactttttatatattttggttactataaaagtggaggaagagaagattctgtgttaagattagaaaagagatgtgaaaaagtgttgtaagatttctgacttttttgttggtaatgttaactttatcatgaaatgaaaagttctaaactctgatactgatactgacactgggttgggaccagatgagctataaaactatggagtgtctgtctttagccacaccccataaccttacaacagaagtactgataaacttttaattgtctttcaattgcattttgtctctcctcttgtttctctataaatttatgcttgctatgactagaagaatgagtgagaagagaagatctttttctttgtttaaagaacttaagttacatcactttgttcgatagtgaatcatctttgctgattgtttgtttctgtctcaccttgtcattgctatagagattgatgatgttattgttataaactagctttcagatgttagagcaatgaatctatgttcctttttcaggtacctgatttttcagagagcttgatagtgaagaaatttgttctggtgcacggtgaaggatttggggcatggtgttggtacaaaatggttgcttcattggaagagtcaggactgtctcctgttacagttgacctcactgggtgtggatttaatatgactgacacaaatactgtctctaccttggaggaatattcaaaaccgttgatcgatctcctcgaaaatctccccgaagaagagaaggttagagcctgctctctttgtttattcagaaccatttgattggaggaatgaggcaatgagatacaagtttgttgtttaatgtaggttattctagtgggtcacagtactggaggtgcttccatttcatatgcgttagagaggtttccagagaaaatctctaaagctatattcgtatgtgcaacaatggtttctgatggccaaagaccttttgatgttttctctgaagaggtaattaattaacactctttgagttcatatctgtaatgtagtctttgtttctgtttcttcttgttgtgctaacatttgtgccaaactgtctacactgctgcagcttggttccgcagagcggttcatgaaagagtcgcagttcttgatttatgggaacggtaaagacaagcctcctacggggttcatgtttgagaagccacatatgaaaggcttgtatttcaatcaatcacccaacaaggtacactccaacatgctaattcttaactctgcatttgcacttggtaatcacttactgtaacttttttaaacgatatggtttatggttttgcaggatatagcattggcgatgatctcaatgagacctgtaccactcggaccaatgatggagaaagtatctctaaccgcagaaagatatgggaaagggagaagattctacgtccagacgctagatgaccgtgcactttcaccagatgttcaagagaagttagtgagagagaacagccctgaaggagtcttcaagatcaaaggaagtgatcattgccctttcttctcaaagcctcaatctctccacaaaatccttctggagattgcacagattccttaacaaagctctgagattattatacttttgaaaacgagaatacactttccatttaatcctcaaaacatcttttgtatgcaattctagaatcaatgatacaagatcgtatttataccatttgaagataaaagtgattgaatacacaaatggccctgtattatatagatacatatacaggaagaagaagaagaaacaacaagaagaggaatcgaagagaagagagaaaaggatctgtctatatataacaacaacactcttattattccaagtctagaatgccgaaatttgagagaaggatcttaacttgatcaacaaggtctgatcctgttgcatactctgtgagcataccaactgcgaaaccaaacatagcccacctacaaacaaaacacacagagttatctcttgtctaggcagtaccaactgacaagtgtgaaactttaggctatatatgtctgaatttgaagaaacatcaatgactagtaacttgtttattcaataccagagctacctcaaatgcaattcaaacaaatctctctatatctattaactttttgagttattagcatccatcaatcaaatacaagaattgagatcatagcttaagtaccttccattggagatctcatttttgggttggaaaccaaaaaagggaccttgaccagcagcttcaagctttttctgtttaaagtactcttgaagctctttagccttttgtctctgaaactccactgtagttacactcttcccatcaacagctacagctttctgcggcggcggagaaggaggaggagaggaagatggctgtgatggaggaacaggtttttgaggctcccggagagtaggaggagccgatggtcttcttaaaggaccttctgtctgagagcatctgatgatgaagacacatggcttagtcgttgttgagaatctaaaagacgacgaagctgtcgaagaagaagatgaagatgatggatttagaatcctgatacattgaatcggtgaagctactgacatttttttgttagttgaattgtctgattttcgaagctttggttctgtcttttggtaatgtctttgtggatgtgatatggccaagtctcatggttatgtgcaaatggtactttcgtaatcatcccacgcgcgttgaaagcgcgtgtaatagttttaactgttgtttgacttgaaagctaaaaccaagtaatgatgattgggtagatttttttttaagagctgaaactttggttaaccaaaccggaaagagccggtttatttggttgtcggttaaccaaagtatttgtaaagtgttgttgaaaagaaattcggtttggttcttgggtaaattcgatttgttttttgtttttttctttaaaatttgattaaaattggctattttgtataaaccggtcttatttttgtattaaccgatgtaaattagagtattggtgataactgatctaattttggaataaaccggtctcattttagtatagtccagttattaagaaaaacaattacatgggaactggactgaaattcttaagtaaccaaacacaaattgtaataatgccgattgttgttaccaaaataaccgaaaccgaaccaaaaacaaaatctcggttcagttcaaaattccagcatttttttaattggattttcttttccaaaagttgtggtgtggattttatcattacaggacagagtagcatagagatgtaatacaaagaataatctaaaatacagcacaaaattgacaaatcaagtggctacaaaagtacacatccaaaagttcctcttcttcttatccaatcttttgcaaatccttctccctctctctttctatatataataacaaaggtgcacatgataagagagcagctacatcaactatatgaaaagccctttgtctgcaaacaatttttaacttccaatgggtcacatgattgtgcacatacagctttttccacttccatgatgaaactcatcttctgattcatcaacttcactgcaaaatttcaatcagagcacactgttttcaacatttgttccccaaaatggtaaatgaaagacgaaatgtgaatgattacacaacttcttaagaacaaaaagccattgtgtcaagagaataattatcactagtctactaaagggagttatgacttatgagtagtatctattcaagaatgacctaaagactttttggatctattacactgttgcttattcatgatcttgagagttactactataaaatctcggactataagcttaagtttacatggaagaatccggtaagatcatgataaaagatgtgccctaaaccattttaagcagacagagagggaataagtcagttctttcctatgaaaacaggttattccctactctaacatagaccagaacttacatctagtggctacacatataaagaataatcaaacagaatctaacttcataagagaaagcatccatacctaggctcaaattctctgacctcagcaatctcaataccacatgtatcaggccactgcactttccttctatctatatgatccaccacaccatctctactcacatcatcatcaccaatcacaacatcactaaacgatcttttcttcaagctgcttttaagtgcaaacctattagtgacttcacagttattatagtcctccacactcggtgcctcatctttcttcccctcgctttccagtctttcggattttcgaccaaaacatatgagagaagtgcaagcagaagagagccaattcttagacgaatctaaccgaaacccggtatcagaatcttcaagaactaaatgataatggttccattgtgatgaaactttgattggtttttgttcagtcttttgacctaatagaagaagagctaaaccattgctataaccagaagctgatgaagagaagaatcctcctccttctgctgcaaataacatttccaatattgtctcatttgcacattccaacaacagtctttttgtacacaaactccaaatccctataccaaagttcataaatcaaaaatcattaggatgacaaagaaggcatttttacagaaaacaggattaatgctttgggatctaaaacacttcctagtgtgattcatcttcagatttagaaagaaataatatttttttgagactgtgggtaattaaatggggaagaaacgaggatggtgaagtatttaccggatggatctgagagacgtaccggagagaatgccggcggcagagcagagagtaacggcgagagagagagagagagagattggtgggcttttgttgggttggttagctttgtgatggaaaaagcaaagctcattagttaactttatttgtctttgagttccattttcaggttataataatgtttttacagtttttaatcaattattcctaaaacttatatgatttactatgtgttttataaattaatctttggcacaaatatgagcttatcccctctctaatgattcgaaagaccagatcagtttttttactttttatagaggcaaggcatagatgatttgagaccacaattctcaactctacattatgggatcaaactagaaaaaaaatccttggttaattggagcaaagtggtgtagtttggccaaaggatgccccagtgtgctcttttttttggttttttagttacccgtgcataattgactatcaaaaagagctcgaatgcgtaattggtgataaattcaaacttatgttatacggtgaaccggatgtatgcagagatgatctttttttttgtctgtctatttttttcgctgtttgaatgacggtaggtaggtcccttctccaggagtagcatgatccagattggggagaaacattacaaagactaatcacaagcacgggtaatcaacaacatgacaatcttcttcacatctgctttcaaacgacaatatatctcatatggattggaatgagagaaatgctagaattgaccggtacagattctcataagttactcaacatactaacagattgataaactaatctgtaatcgatgtcttatctcgattgcactcttgtgtcttcgtaagccactccagaaaaggtttgaagcatcatccctctctatgggaaacatctaaatcacaacatttgattctttgtatttgttttgatttataaccagtagttttaaaggcttcaagccaaagaacccagccaaatggaatgagaaagatcgcccaggtggttgtgttaggaacacccatcttaactgtaagacggacgagtttttgaagctttccatgctgaaacttcctagaagcggttcagcaatttcaatcaagggaatgtggttcgacccttgtcgagactactgcttgaagaactgcaaatgtcaagcttttgcattaccagtaggtccggcaactttgagaaagtgaagtttgtagtgtgttcaaaattgtcttcggtaacattctttccaaagctgttgtgggacaatttatgtatctcaatgcaccacttcttgtgatgaatgtccgtattcaccttctacaatatccacgtttatttgaaattgatgttgtcttcatcacaatcccccaaataattgaagagattatgagttagattgatgagattaaatagacctttataaatctccaagctctcattttgtataaaactaggacaacatccgcgctacgtttcatgtatttttttgtttcttttaaatttaatatcatattttgataaattttatttataaattttcaatcattcactcatgcaaccaccaactttgttagtgtcaaaatacttttcagagtgtaaaagtttttcaacaatatatcacactcgcacaatcccgaaacaaatttgtcctaaaccaatattataaatggtaatatttggattatataagactcaagaatttgatgatgtacttattatatactcatattttgagttaagacttcaaaaaattagcaaaaaaaactcaaacaaatttaaaaaaaaaaaccaaaaaactaattaaaaataagtaatatataataataaagtaaaattagcattagaaaaactaaatatagatagtaataaatatacctttaatattagaaaataaatatatcattaatatttataatataagatatacattttacattaattatgactgcacaagtaccagatgctcgagtagtgatgggtcattcatatagagaaagttggctaacttcatatatatgattatttttttggctccctgatcaatgaattaaatgtttttaaaaacaaaaatacaaaaacagttctctgtggaatgaagtcagtgtacagggaatgcaaatggcctcacctcaagattgactgtgactgataagggtttgttgcagcagttcaggtggaaccaagcagctcaggattgggatcggttatggtcaatgccagaggaggtatgtgatgaattactctgagtgtggaagcaacgcgtattgcaatccgattacaaatctcatatgcaactactttaaaggcttcaagccaaagaacccagccaaatggaatgagaaagatcgtcggggtggttgtgttagggacacccgtcttaactgataagacaagtttctgaagctttccatgttgaagcttcctagaagcagttcaacaatttcaatcaagggaatgtggttcgacccttgccgaggctactgcttgaagaactgcaaatgtcaagcttttgcagttaccagtaggtccgacaactttgagaaagtgaagtttgtagtgtgttcaaaattgtcttcggtaagattctttccaaaactgttgtgggacaatttatgtatctcaatgcaccacttcttgtgaagaaggtccacattcatcttctacaatatccacgtctatttgaaattgatgttgtgttcatcacaatcccccatataattgaggagattatgagttggattgatgagattaaacagacttttataaatcttcaagctctcattttgtacataactaggacaacatccgcgttacgtttcatgtatttttttgtttcttttaaatttaatatcatattttgataaattttatttataaattttcaatcattcactcatgcaatcaccaactttttagtatcaaaatacttttgagagtataaacgtttttcaactttttcaacaatgtatcacactcgcacaatcccgaaacaaattttgtcctaaaccaatattataaatggtaatatcctactatattatttgggaagtacattttaaatataaccttaatttttgtaagtaattacataggtatgccattaaaaataaaattttaaagagtaaattaatttatctctttaaggattaaaaagtcaaatactaatttaattaatttaatttaattaaaaaacgaaatatattattaattttcaaaaataataaccaatcaaaatcaacatataagatttgatatctaaattttaattaatttaaattaattagaaaaacgaaatacattattaatttccaaaaaagtaacctattaaaatcaacaaattagatttgatatctaaattatcatattaattttttattaattattatagttcacttctcatctttatatgattctatttttgcgaaaaataatatcatcattataaaaaaataattagagttttttcgcatatgccataatttgaatttttgaaaacgaatataaactgttcaatacatgaaaatatattataacgggtgaaaaatagatttaagaaaactttctactgagtaacgggtcataatttgaaatatttatattcaatttcatacatattatattgaaaatttataatctatatactataataattaataacatattagatttttttatgtgtataatatgattcaatttttaatacaagctggaaaatcctataattgacgggtttagatcgatattaatacaagatggtatactacagatgaaactcttaaattaacaatcaaactacaagtgtataatcttaaacactaaacaatatagataatatcaacaaaacatatacaactcacattttacttttaatattttatatacaaaatcaattaaatcttaaattaaatcttaatcacataaaaattagcacaaaaaaaaatattcaacaattaaatttttatcaaatctctgtgttatataagttttgatactatattcgaataaagtgtaatataacttttcagtttttattctttaactaatttaagctaactaatatatttgctaatcttatacctatcaaaaccgactatcgtttcttatctctatagtatttttgcaagacttttttggtggatttgggtaaaattgcattcgggtcatatggtacattcccctattaaataaaaatggtatactcctatgttattagctaaaatgtttagattataattcagagtcatatcattaataaaattaatattaataaaataaatggctttttggcaagacggatttggagtgacgggtttttgaatcaacattaataaaaaagtaaaatataattaatacaccgtttcaatatgggttaaatctttaatttattattttttaagaccactaatattaaacatatcaaatcatcttaatttagaaaaaattatataaaaccaaaaatgttatgtggtatgtataatgttactatatataaaatataaatgtattagagaatgatataatttgcaaaacttttatctataaaaaaataattcttaaattttaaaaattactactttaaaaagaaaatcacaggacgggtaaagaaattatagaacgggttttattttggaattgagttatatggtggatgtatttgaatcaatatttataaaattttaaaatattattaatatactgttttaataggggttacaacttcagttttttaacaattgtctcatagattcgtggtatagtcttacttaataacaattataaactgtaaaatataaatattttataaaaataaaatttgcaaattttaatatatattacttttaaaaaataaatcgtcccgcgatatactgcgggttaaaatctagtttggattatataagactcaagtatatttgaagatggacctcatcttaggtatttttcacacttagaaaactattagctaactcattgtacttattatatactcatattttgagttaagacttcaaaaaattagcaaagaaaactcaaacaaatttttttaaaaaaaaccaaaaaattaattgaaataaggagtatataataataaagtaaaattagcattggaaaaattaaatatagataataataaatataccattaatattagaatattaatgatacttataatataagatataaaatttacattaattatgaatgcgagtagtagatattcatatagagaaagttgaccaactttagtaaatatgtcatatatatgattatttttcggctccttgattaatgaattaaatatttttaaaaacaataatataaaaacaattttgggactgcagataataagtttaaatacaataaattttgtaactaaaatgttatagtcatttactaattttatttaattatattatatactcatttacttaataatcatctcatgcacatggtgcagatagatgacatagtttcgttcgtagatgactagagtactaaagtgataagtatacatgaattctatcaaacatgtatatttcatttcaaaattttggatttttgaaccaattttaatttttacatatcatcctaaactttctttacgattttggctcgcattatatacgatctcacgactaaaattatcttttaatatttacaaatttatcttttaaaaaactgtatattggaaatatgaaaattgagaaataaaaaacttaaaatagtaacaattaacgattttgctttaaacatacactctcttgtcactccacgagccctacgcttcccaaccgcctgcctttttcagattacctccggtttctaccactctcgccgtcgccgtcaccggtactccgatcacctccgcacgattcatttcctatttgcatttttcacctctctaggtaataactccacgccgtctcatcaatttgcttcctctcctcagatttgatttcaatcagtgaattgctctgtcgaaattattgatctacgatcttagatcttacggaaatttcgttccgatttcaatctccggtgactgatccgatctgatcgaatcgtgttacattcaaatttactgttgcttagcgatcgcgatcgaattcatatgtttttcgattctgtgatatcttcatgactcttgattcgtgactcgattctttagcggaaagtgagtcttctcgagaatgggagattgaagaagtaagagattcactgattgaggaagagagaaagttagttcagaaaaatggctccagtgagtaaagctgataagaaggcagccgtagatgctgctgcgtggatgttcaatgtcgtcacttctgttggtatcatcattgttaataaagctttaatggcgacttatggttatagctttggtaaagatttctcttttgctcttacttaagacgttttctttgaaacctgtagctattcttctaatttgtttacttatcatgttgcagctacaacgttaactggtttacatttcgctacaacgactctgatgacgcttgttttaagatgtcttggttacattcagccttctcatcttccgtttacggagcttttgagatttattctgtttgctaatttctccattgttggaatgaatgtcagtcttatgtggaactctgttggtttttatcaggtattagacatcatctagctctgtaattgtgaaaagaaatgtattgctgattttatgattgtcctgtttttgcttgtcagattgctaagctcagcatgattcctgtatcttgtttgttggaaatggttttcgataagattcgttattccagagatacaaagcttagcataggactggttcttgtgggtgttggtgtttgcactgttactgatgttagtgtaaacactaaaggatttgtagccgctttcgttgctgtgtggagtactgctctgcaacaatacgtaagtgttctgtgctcttacggagtaacatatcgtttctttgtttaagataatactaatattggtgtggtttttacatgatgcagtatgtacattaccttcagcgcaagtactcgcttaactcattcaacctattgggacataccgctccagcccaagccgcaacattactggtagttggcccgtttcttgattattggctgacagaaaaaagagtagacatgtacgattacaacttggtttcagtggtaagtacgaaaaacctcaataagttcttagtctcattggaattagatttaacttgactctcctcacaaaagcaaaatcgcatcattatgtcaatagaagtaaaatgttactaccttatgaattttgtggtagtctgattatgatagcctttttgtgtttttgctgtttggtaccaactttgtttagagtcagcatgcagagccaagcagatactataggaatctagcttatttcaatgcctgtttcttagttaacttacaaaccatttctctgtgcttaaggccaaaccgtgctgtacatacatggtagaaacttattcgaacctaatgtccctgaattctgcagctgtttataaccctgtcgtgcacaatagcgattggaaccaacctaagccagttcatctgcatcggaagattcacagctgtatcgttccaagtgctgggacacatgaagacgatcctggtgctgataatgggcttcttcttctttggtagagaaggtcttaacttgcacgtggttgttggaatgataattgcagtactgggtatgatctggtacggtaatgcctcttcgaagccaggaggcaaagagcgacgaaactattctcttccaactacccgtcaacagaaactcggagctgcttcggattctgacgacaacgaagacaaagcctagtagtaagtagtatattatcaggaacatcacatagttacgtctctgttttgagttgtttttttattagcttaatttatgattctcgtgctaaattttggtttggtacgaaagaaagcgaattttttcatacagacgtttgagatttttgtaatgcatttttgcgaaatcaagttacatcaacgcacagctttcaatattgaaataagaaatttataaatttgtttgattattctggggtgtttattgccgataaccatacatgctgcacaggctctgatgtgtgcagccactcggaaaaactggtgggcaatggagaatactttgatctggtttgatccctagctatctaactcatctattcactgccttatggagagtaaaggcttgtcccaagttcaagaacttttatagtggtatgactaaaagtctttctatctcagttaatctttgcttataggaacctatcaagggattcaccatctgcaagatggcactcacgcaaggagactgttaattacttactctttacatgccctttatgcaagattaacttgatcactatcacctatcccaattcctcctagaggtgaactggcgttccctatttgcaaacttctatcagctgtgatacttctccctgaaggactctccaccagagaagcagatacacaacttatatccatggatcttatggaggctctgtgaatcaaagaacacttccataatagaaggtcacgactattcagctaaggaaacagcagagaaggcattagagtggcgctcaccgctcacctcgaacagtagatgaatgcagaagtagaagcattatgtttgggcagttcttcgtatcgtttctgatccaatgctcaaaatgtcttacaagccgcaagcttggcactctccaaccaaactattaagacattgcagtctgaagtgagaaatttgaaataataacagcctcgatcaagtaatgccgtagctgagtgagtaccaaatttttctctctttatgctctttgttgcaaggttacacactttagtacaaaaatagttgcatccatttctcgaggttgatagaactattcatgagctcccaatttaatcgatgaagaaaacaattaaataggccaaccgaaagatgatgtaactagagaggtgacataagatccagtaagcaacattatcttaaaagcaatatgacagtagagaagatctctcacaaaagacccaaaatcgagtcgtgcaaaattgtacgaacaacaaaatttaaaattcagtccttatcaaagatccaatccagctgcaactagcaacattggcttaacgcttcttagacacaccaacagtctttcctctgcgaccagttgtcttggtgtgttgtccacgaacacggagaccccagtaatgtctcagaccacgatggtttctgttcattgtaagaaaatgcaaaaccaccattattaaagcccctagaggacatatttatcatgttatatgattaggatcagaaatgactaatgggtttacctgattttcttgagacgctcaagatcatccctgagcttcatgtcaagggcattggagacaacttgagagtacttcccatccttgtaatctttctgtctgttcaaaaaccagtctggaatcttgaactgtcttgggtttgcaacaatagtcatgaggttgtcaatctcagctgcagataactcaccagccctgaaaagttgagaccaatattagacaacaatccagagaaagtgcaatttgggattcacaagaattatacaatatgctaacacaactatttgctgaacctcaacaacacactagctaatcaatgcaaacagagactgctaacaaagataggtcacaaagtcaaaagaagagcaaggttcaacatggaaactagaagatagaaaagtaactcgaattggcttcaaagtgtacactataggacctaaatgttacaaaacaagactcaaaacacatacacaaatcaaatcaaatgcaaacagagactgctaatttcaattctaactttccaaaggttgaagtttgattgaaatcaatacctcttgttcatgtcgacatcggctttcttgcagacaatgttggccaatctccttccaatacctttgatagaggtaagggcaaacataatcttttgcttaccatcaacgttagtgttgagcacacgcaaaatgtgctgaaactcctcatttgcaaccagagactacatgcagtaacaaaaatcacacaattacagccaaacatcaaaaattccctaatcaacacataacctaaactttctgttcgatacttggttctctgattcatgaaattaacacaaaccctaatctttctatgcaatatggatttgaaaggaagaggctaagctactgttctagatcgatcggaatcaggaaagcgaagtaacatatagtagttgttggggaagagactaagacgagagaaacgaaagcgtaaaccctaattaccattgtgatttgaagataagagatgcctgagaaaagatggagctctcgccgtcttcaagctttctctcttcagtgattcaacagcgtgagctagggtttttttttgttcggcttatatagctcattttggctatcgaaattactgattttctgaaaagactattatacccttatttggtttaagcccattcttgtccaattaaaccgatacacttagggatatcacattatcacttgaacatggacacaggacatttgattaacaatctagaaagataaaatgtatggtctaataaagacgcttcaaatcaatgatagataaaacgatgacatgaatcctcttcgtaagcgtgtttcaggtaacaaaacaaaagagtgaatcaagatatatttgttcaatcaaatgagttatactactatcaagtgattcatcgatctttgaactagatttggagcacatatgacgcaaaggagggtttggattcttacatatgttatacactatacagtatagaataacgcgtccactgcaaccgtttgtggtcttcacttcccatctcgacgcatggtatttagttctgtctgacggttttgttatataattttaggaagctggaaatacttgtttacttatatcatcatgcaaagcatcacgagatctttctctataagtagtcttcactcatacatatctgaaagttactttttagtaggtaatgcataatgaaactattacatcacgttactcacgtaagcttaacgatgaaatttgtcaggagagttatagaaaatatattaatgtttggttacgttacataagtagccaaaaaaagtagttactttaattaaaaaactcttcaaataccactatttaacaatcaccttcagtatctcactcacaaaatgtaatgttcttttgcaaaccatgaaccatcacacttgacgttgtgagccactcgtaacgttccgccatcatcatcgctagcaagctacctcgtccgctttccgcgatggatcccacccttgcccaacaggtgatatattgctccgagagatttaaaaaaattgattactaaccctacatatcatcacgagatcattttccgtgttttgtactttatcatataagagcattttcggtggtgataaatggaaacttttttatgaagttctcttgattaaattgaaaaaaataaatcaaaactaactaaaaagaaaaaagctggctctctttggagtcgttgccgttttcgtgtgttatcttagtttttgatgagcatttaaaatcgagttcgtgatcgagatatgcatttataattaaaaaccatttggttgagcatgaaaaaaattcgcaaccatatttttagaacttcgttatttcagtttttttttgcacatctattataaaatgtttgaaaataacttatgtgttttattttataatttgcaatatttgttaagttttatgaaataaaataattttaaaagaataagttttttctgaaattcttactaaaagagactacccttggattatgaaaaattaaaaaaaaaaaacctgaaactctcatccaacatttttcagaaatttatacttaaaaaaccgaaagaatccattgaaaggctcgatccactagaaatgctctaaagtacttcttggtaagccacccaacattgattttttaagttcaaacaaccttctgattaacctatgagtatctcatccacataatattaatagtttaatataaaaaattatattaaattttacatctttttatattttaaacttatcaactatatttttattatattagacattttgtaaaaaaaataatggaggtgctcttagtaatctagattggtttaatacccatagtgtggacaattgataatttaaataactagtgtaccgcttatcttattgttatccggaatattttagagtatatttgttggaataaaacggtccatacatacgtagaggttcatacatagtcctgggcataatacccggaaccgaatatccgaaccaaaaaactcgaaaaataaccgaaccgaacacgaatccgatttttagaattaccctaatgggtccttgacctcactacccgaaccgaatccgaaccgaatctaatacccgtgggtacccgaatacaaatgtaacctaaatatattagttatatatatatttgtaatacctcaaacacccaaaattaaaattataaatccgattatactagatttttttagtaattcatataaatttggatatatttgggataaaagtaacaaatgttatagttttcttttaggtaatttaagtattttggttacatttggttatatttgtataaaaagtaaacaatatatttacgggtaattgggtatttcgggtagatttgagtatatatgagtaaaatacccgaatccaacccgaacccaaaaatattttgggtatttttggttatttttacatttttactaaaataaccgaatcgacccgaatccgaaccgaaaccgaaccgaatttttagaatacccgaatggttctcaacctcctactcgaatagacccgatacccgaaaaaaaagaaccgaacccgaacgggtacccgaatgcccacgccctaaattacatactacatggtcaacgtgagattaaattttcaagcaacaaaagaatgagaacatttttttttttttgtctttcggagtagaccaaatctcatcagaaatatgcataaaaaaacaaataatatgtagttgtttaagaaattaggtaagtgctattgatacaaacatgtaatcttattcaaatacgtagtggttttaaactaatttcttgttctcccctcattgtcacatgtcaactttttcaatagtcgtacaataattcagctatcaatgaaccctccatttttttgccactaagttacaatcttaaagtgtttttgtaggtaaagtaaagatgatacataacaagctactcattgcagggtcgatcatcttgaatcttgttttcaccattcatattctttataataatacaagcacatggagtccaacgtggaccaatagagccgccttggaggcagaagctgcagcctctgtttcatgctcaggccatggcagatcttacgtggacggtcttggtgtccttgacggccataaaccttgtgagtgtcacgattgctacacaggcaaagattgctccgttcttctcaaagattgtcctgtcgatgctaactcgtatgtaacaacttttcatctcgatcattatgaccaaaccaatctgtaaaatttggaataaaaatgttattgttgtttttgtggattttgaagaggagaccctttgttcttggagcctttctggattcgaaaggcagaggaaagtgcggttgttgagtcaggatggcacaggatgagttatacttttaacggatatggcttgtttatgtcggcagagcttgagaagatcattagaaagttacataatgtagtgggaaatgcagttactgataacagattcataatctttggagctggagccacacaattgcttgcagcttctgttcatgccttgtctcaaacaaattcattatctccttcaagacttgtgacttctgttccatactacaatgtaagcaaaaaaaacgctctgttcttggctttatgtaacaagttgatatgtgtggttctgatcagttatatgtgtgtgtgagtgcagttgtacaaacaacaagcagatttctttaattctaccaatctcaagtttgaaggagatgcgtctgcgtggaagaggagcgagcgcaatgatgatattaaacaagttatagagatagtgacatctccgaataatccagatgggaagctgaaaagagcggttcttgatggtcctaatgtgaaatacattcatgattatgcttactactggccttatttttcacctattacacgtcaagctgatgaagatttgagcttgttcagtctctccaagactacaggtcatgctggctcaagattcgggtgactattaactttgactctcctagtaactctatacaaaggtttggattggtcaaaacaactcataagtgtttttgtttgttgttgttgttgttgttcttgcagctgggcattagtaaaagagaaaactgtttatgaaaaaatgaaaatatatataagtctaagtagtatgggagtttcaagagacacacagcttcgtgctttgcagttgcttaaagtagtgattggtgatggaggcaatgaaatattccgttttggttatggaaccttgaaaaaaagatgggagattttgaacaagattttttccatgtctacgcgtttttcgctcgaaactatcaaacctgagtattgcaactatttcaagaaagttagagagtttactccttgtaagtttttcttctaactaatgcaagaaagtgagacttttgttttggtttggtacttataattatgcgtttggttttcatttgaaagcttatgcatgggtgaagtgtgagagaccagaagacacagactgctatgagattttcaaagcggcgaagataacaggacgtaatggggaaatgtttggatcggatgaaaggtttgtgcggctaagtctcatcagatcacaagacgactttgatcagcttattgcaatgttgaagaagtttgtctccaaggaagctgtagttgttgactccatctgaaaacttgatgttgtgatcacacgtcatcaatttgatcatataaaatgaataattttgaatactcttgacaaataattgaatgagacagctcaacttccaattttgtaatacaaagaaaccattatacgacagacttataaaaatagacataatcgaatcatatcattgattatttagagatcttaaaatctttatattatttaattattgcgttaacttggaagataaccataaatccagatgttattatgtgtagagattgactctcataatgattacaataaggtacatgtgtttatatagagaatacgataataatgtaagttacggtttgctaatattcggaataacatttacacaactcagaactcagaaggattaatatttcaagagtaaaaagagccacacggcgtcattattactcgttttgtttcagttcctagccgcaaagtgtcaatgcctatgaacgacactcacaccttgctcacctctacgacagtttaggtggatccatgctttctaaagaagcacgtccatccaaatgtcgatgcccatgaacgacactcacaccttgctcacctctacaacagtttagacggatccatgctttctaaagaagcacgcccatccaatctaggcgacaagggttcacatttcgttcatcacccttggtcgactatcgaataaccggactcccatcaaaagatggttgccaagaacatctttttgctaatgtactcggaataacatctacacaactcggaaggattaacatcccaagagtaagaagagccacccaaaatcgttgctacccgtctcgtttcaattcctagccacaaggtgtcaatgtccataggcgacactcacaccttgctcacccccgagacagcttaggcggatccatgctttcaacgaagcacgcccatccaacctaggcggatggaatcgatgcccatgaggacatctcggtatttcgtgcacattacgaatataccgccacccaaatggcctagaagaatccatttcagcccatgcatgacacctattctcttcggcgacgaggtgaaacgatgctcgtggggacatctcagtatatcatgcgctaaactcatataccgccacccctaggcctcaaagaatccatgtcagtccacgcatgacacgcccattcttctccatctctcagcaatttttgtccgagaactgctaaaaaactccgatccttatataccgccaccctaatgcatcgaagaattaatgtcagcccacacattgcacgcccattctcctcgacgattcaacaatttttgtctgagaactgctgaaaaactccaaaaaggcaacaaagccgatcggtggtcattcctcgtgtcgatattcgatagtatccctcgatccctacccacgtctagaaccgagtagggggttctgtaataaccgtctccctaagtctgtgggccgggcactagggaattcgagtgtgaggaactgagacgaaggttatttgtttgggccgagagttggccaaacgtatgggctgttctatgaaatctgtcgagtaaatggggcgctgtccaagtttgagtcgagcgaatgtgttttattcaggatttaaggggttttaactcgaagggtctgcacgtttaaccaggataggtccaagggattggatcgggcttgggcggaccgaggaatatgcgaatatgttgttgggagagataggattgcgtatcctaacaacgagatttggaccaaaaattccttagatcctctggaggattggcgagccagatattttggccaggatagattgcgatctaactgacaagatttgatccgaatattctgtgaagatgacctgtagatccaaagatccccaagcatcttgtcccccttataagtattgctcaggcagcgttagagcggggcgggggcacaagtacgccgcgattatccttagagaaggggagagaaatagttggatggaattagagagaaaatccgagtgatggtttagaaatccgagaggcgattagggaaccctgttgttagggaatccgttctggccttggaagacgaaaggtgtctaagtctgtatctgagatcaaacgatgagcgattcaattaaatcatgccatcagagagcgaatctgtttggagaaacttaagctagagcggaatgggtctgattgttcttttgatcggaaggattaaggttctggtgattctagtggtacatgcgagtgatacggatgttcggtgtctaatgtgtaatccagacgtctctctttgtacatagtctcgtgggcttggttggttgaatgactcggtacgaacggagatgttggacaaattattagtagctggtacaattgatgcaagagagctatgagtgatagtggagctaatgaaggatcgagtccttggagttgaaggtgagatagtggaagcacatgaatgtaaatgagtcagagtctacgaatggctaaggtattggttaagtaagggtctagcttgtaatgtttttctgctgcgtagaacggttaggttaaatggctagccaaaattgtcataaatctgtgttttaagagcaaatcggagttttgctgcaattttgggtctttggcggatttgcaaaacaggttaggacatttcaggttcccttggtctgtgcagactccctcaacacccaccctttcatatagctttatatctattttttgacttggcacgagtagacattgaaatgtctaaggagtcactcgtgccaaaaaaacaatacttggaatttgaaaattcttttggcatgctttataagaatagtgaatcctattttcgggaaaatttacgtaattttctaacacctccagctaagtcatttgacctaaaacaacatcggattctcatggtctagctgtgccccctggacacatttgatgcaagctt

SEQ ID NO: 1170 - DNA, 63489 bp, Arabidopsis thaliana
aattttgattgataaattcactcagttattcgctgatttttgaagcattgctctagattccttgaaaacgaaacattatattgagatttgggtctttgtctcatgaacctattcaaaccttaagagcattcatgaaacggttcatgaattattgacaaactaaaggaaactttttctttccaaccactattaattaaagctctaaagagccatttctaagaatgttatttacataagtgatatgatgcggtttagtacgaatttttcgttccaaattatccgcttttaaagttgcatagtgagagattaaagataaagagaaaatcgagaattcttctttgtcgttttgtaattcttccaaatacactgagaaggtccgccattcggttggggaagacactattttcaccagatctaaaaaaaccacatcttggttgttgaaaccaatcatacacttcatcgcccaaagaagagcttcaacctctgtatgtaatggagatagacttcttcggaggttcacaggtctcatggttggcgtctctccatttgatgacgtacaatactatcctaatccagaaaacttattgctttctttccattatccattcacaaagcaacgatatccagaataattgttatcatgtgaaaaatctcttaatcgattccgagtttccaaattcaaagagccatggttttcagtactaagttcgacttgagctaactgccacgaatgagcctctttttccgccaagcataatatctctaaatgatcttattccgccaaacataatacctctaaaggatttttatccacatttttaaagatcttttcgttccttgctttccaaatgtaccaaattatccatggatataaagataaatcaaattctgaaggtattctcccaaataagtgttccaaattcgcataaatagaattaaagaattttttctggaacgtaggaatccgtaaagaaaacttattgaattacgattttataagattttggtttttctttaaaatcttctattgaaagaaaatatttttttgaagacatttttacttaagaaaagatagatactcacatttacatttagcatattgatttatttttcttctgaaaattgatttaggaaaatatggatgatttaaaatgtaatacaaaaaatattttagagacaaaagaggatcgcaaacaacaaaattttgtaatttccaatttagtttcacacttctaacttctcaatatccatccaacaagattaaaatcgtcgtaaattctccagacctccaaaactctactccgtgtttgtttagaatctttagaaaaggtaagagacatcaaataaataaataatttaaaattcacaagaaatatttcttgcaaacaattgcgtgcagaaaaaaaaagtcaaaggcggcaacaactatgaatgtaccagagagtttagacactgaacaggtaaggagacaaaagctggaagcaaacaggtgacagctttagtcgatggacttctgcaatcaattatttgctcaagctattgcctcctatagtcgttgagtatctacaccttctagtatatttgaggttgttgccaccttcaaccaaggggtgaggaaaatgtatatgttcaacacttagtatgtttaactatttataactacagcttcatttttttgtttgctttcacatccgatgtgggatacattactttcactcacgtgggtttttaatcacaaaagcattggatgaggctaaatacgataaatatggactctatttatattagttattgggcttttattggatattatcatattccatatttattattattttaaaatgtgaatattgttattataattttagaatctacatttttaacaagaatttgtttttaattgttttaaattgtaattataatttgaaaagttcataataatacaccaaatattttttgatatttacaaaatactcacaaaaatacacaaattttttgcataccaaaaaaatacacgaattattattattgaaacttatactcacttaatattattcttgctaaaaactctcttagacacagttatcgagagacactcttcgaacatggttcccgacgccggcgaaggtgcaaaacgccggcgtcgggagttaactcttctgatttacttgctctagttttctcttgtctctcctatgtctcctatgctttcagcttcgttttcccttttggaaaccgtttctcaacccttgcaaaccttagatccctcttgttcattactggaggccaaaagattagcaacggtggaagacaatagggtccggcgttttccctcccacttcaccatctgttaataatatctcggacgataccacttctttccagcgatgcaactctcatgacaaaatctattatcatcgctaagcccctcgtttctagatctgattcgcttatcccagaagaacactcacatcggacctcattaatggcaagagaactccctcttggactgtcagatgcgccatgtccgatggagacgtcgacggcgcacgacggatctatcttctgggtggcgagcttctggttctctgatagcacttcatcggttaaaatggtgagtcttatctcccatgctttcggatttccgagatctgtctgtacaactgctcttccaagatcctttctcttcacatatccggtgacggcctccatatccgatcatttgcctccggcgatgttaaatcggaatagtgaacaaccgatcattccgttgaagcggcgacaacaagcttaaggcaaaaccataattgttaagttggacttttcctatgtgataggcccatattttggtggcccattaatttttcccctcagcccacgaagtgttatatgtgttggacccttacattaacgtggcccaagtttgtcccatttatctatttgttataccctaatttattcttgttttacaactttgctgagaacggctggggactccatcctcactctgttttaaaaccaatagttaatttagacaaattccatcccttgttcctgctggatgaatcttttagtgacctagagcaatttccagaattttttaagaccttcgccctctttgctgagaaatcgtgtgtgtttcctattgctctccttagaaggtgcgtgcattgagtcggtgctatccaaggtcattgaatctttatcaacttcattatgtctttattggaatgtgaccattcaacaatcacttggaatccttgtggaaattttctttgactcaccattcgattgtttgtggcaagctactaccttgttcttgtctccaatgtatggacttatcgtcgtattaccctatctatgttatttatcaatctcttgtaagaactatctttgttgtatccaaccatgaagttgatgtcttcttaatctttgtatttcttattgtttgaatgaatgaaattacctttgacaacataaaaaaagaaccttatactcactttataattacaacatatatgaaacatacattaaccaaattcattcattttttgagattatgaaaatctacatatacatttttgcagtcatcttaacaaataaatcctggacttgaaacttatttacgactcaatgccactgaatttatgctaacagttaaatcaaatatttacctaacaaaaatattacctaaaatctctcatatattaactccaccaaacgaaatcattcctaaaatctctcataagtatttattaattttcggttttaatttgctgtaaaaaaatcgatttcaataaaatgaattaatcatcctgatttttcattttaaatcatttattttcagtttataaaatgaatcaaattttatattacaatatatgctttaatatatttattaaaaaattaattacgtaaaattttaaatatttgaaaccctaattattttcccaatccacatttttcgttttaagtttgcaattgtacaaaataattatcactccctaaaactttattttttgatttttattaaattttgttctttttctgacaaaaataaattgtacatctattaatctaatattgctcattcaaataatattaacaaaatgctcaaatttaggctattaaaataaaaaaagttagtcaaaagcacaagtatatcaatcccaaattatgattaaactaaatatttatttataataatttttaccaaaacaataacattatatatattaaaaaatttgaagtacctttttaaagtacttttgtgttagtaaagtaacaatttagaaagaatatcatcacattaaagacaaagacaattcttattttttaaatattattattgatatatcttaaatttttaaacattattaatatttaaacttaaaaaaaaataaaacatcatgagacgagaaatatattttaactttataaaatattattaatatttaaacttataaaaaatttaaaatatcatgagatgagaaatatagcggaatgagtttgaattgatatgaaatatagcgggacgggtttggattcatataacacagattaaatatttattttattattttatcatcactaaattttttagttacaacattaatataaaattatataactttaatactaaattaaaaccgtaaaatttaatattattaaatatgaataaaacatttgccccgtggtataccacgggttaaattctagttagagttatatattcggagattatttagatttgagaatttttcctaatctaatagaaaaaatatatgaacaaattggttaatttttgtaacttagggttagaaactaaacaaaataacaaatgatactgcaaatcagttattgaaagtctaaataatacgcaatacaatctttcttaatcgttgtcaaatttgtaaagtttgtatatatagtatctcaacttgaagttctcccgacgatgctgaaagaccatttaaaaataaatatatatatatatatatataatgtatgtagccataaaatcttttaaaagatatggatgagaattatatttcatatcagtttttttacttactatgattaatatgcattttttgagatggagggtaaaattaaaatacaatggcggcttaaaggatttttttttttactgttgcataaacccaacaaattactatgttttcgtaaattcattttttaaatattaatcttaattttcatattatcttgactggtgtataaaatagtatacagaatatttatatatatatatatatatatatatatattttttttttccttttattactagaatcggtcacaacttgtatatatatagataaaggaaattgtcaaaaaaattacttattcatatatataatagatgaaataagaaggattacaagttattacataacatgaagtttcttgacaagagattctctaccatgccataaatagagagaaatgcaatagaggaggatatgggcaaccacattttgatttacataacgatgcttttttaggttttcattcaaggctacaaacatcaagttcacctatgttgtatggacattaaggtagagcaagaggagctcagcttaatctgaacaatgtatccatatttcctaaatcatattgccaaggctgcaaattgggcatcgggttcttgtgtaacaggtggttgatatttgttgtatcgattttgtattgcttggacttgtttttggttttgctgtggttgttgttggtgtcgtcgaaactgtaggtttcctatctctctctcaagcaattgctgctccactgtattaaccaaccaaaatcaaaattttacaagagaacaaaataaatgcattttgatccattttagtagtgatatgaaaggttaaataccatgtttaagcttttggatttctgctaaactatccatacgttgttttaaagctctattttccatgctaagcatgagtaactgctgatccaagtagtgaatggcagatgacatttcacatccttcaacctattgaagaaaatccaacatgtataatataacattaggaatcttttcatattattaatgaaattaaagaacttcgagaaatacacgagcctttagaatcttacttgtagcacttggatggtcctttcaaggtctgatatgtactcaagccttctcaaacgcgctcgatgagcattttgactgcattttaataattttcgataaaattgtatattattaaaccgcatcagaaatatgtttatcaacctatattaggaatgtggtctaacttatcccaacagttagctcaagagttaaggattgccagataatgcctaaagatcttaatctcaatcgatgtgggacattttaataacctattataagtacacatgacaaagataagactacttactgtttgatacgttttgagtcagtctttgatctaggaccatctggttttgtagaagttccttctttcattttgcttacatgtttctcaatgggtttcgacgacatatttaaagctccgcatgacatatttctttggatattagttccatttgctgtagagaaatcccatcctaatttattgtgttgttcataagagttggactgccacaaatcatagttctggaactgccaagacgaaccagcaacatgattttccttcgaaggcattaaagctgagttcaagtaagcagctgtgtcactagctgaacgtctatgacctttgttaatcttaggtgatgctggctcacttaggagctcatcgagccaagctggttggtcttctgtgaaaagatcatctaaagaagcactatggtggtgcatattattaggaggagaaatgttattttccatgtttttttggggaactcgtgattgtgatcttccaatgaatccgaaatttcccgggtttgacaacctccttaaattttccattcttcaaaacctataaggtatgagcaaaacatgtataagaaaaccattatcatgtaatgacaagaattgaagatacagtttctttaacatgcaaagaacatacctaagaagacgtacgagattaggagacgtgtgattgttagaccttccacggggaggaaaatggcataagctcctcccgtgtggttggtttcgatcacctcttctccttagaatgcaaaaaaaaaaaaaaacaagaaacaatctctagatcactaaatagaggaagataccatattgaaacaatccatgttgatgatttacattgcgtggttttcgtgaaaacaacaattcttgtccttatgctttatttggtctattattttctcagttatttttgctttttcactttcccataatagactccaccattggtttattcagactgggtttattggtacacaatactacaaaagcttcgaggaattctttcattttttattcatcgaatttgtatagtaagctccgtaatatttttatgtgatttatctacacgcttctaatagatgcaaaatcaaaatattactctcactatcatatgagattgacaatgtaatgacgtgggacaatttctttctttttttagttaataatcttttctatttacataattataaaattctaatgttattatgaacttataaagtactagatatacaatatatatatatatatatatatatatatatatatttaagagaactataaaaaaataaggagaaactttgttaaatattaagaaattgatatgttcaaatgtttaataatttgcactttaaactctaaagctgaaatttagtacgaaatgttatcagctttaatttgataaataattataagtgatagtttgcactttgtagattctataccatctctatactattatttgagaaatgttgttagcaaaataactagatgttactagattttaatccgcggtataccgcgggacgatttattttttaaaagtaatatatattaaaacttgcaaattttattttataaaatatttatattttacaatttataattgttattaactaacgctataccacgaatccatgagacaattgttaaaaaactgaagttttaacccctattaaaacagcatattaataatattttaaaattttataaatattaattcaaatacatccgccatataactcaattctaaaataaaacccgttctgtaatttctttacccgtcctgtgatttttttttaagtagtaatttttaaaatttaagaattattttttatataaaagttttgcaaattgtatcattttctaatacatttatattttatagtttaattttatatatagtaacattatacataccacataacattttttgttttatataatcttttctaaattaggatgatttgatatgtttaatattagtggtcttagaaaataataaattaaagatttaacccgtattgaaacggtggattaattatattttattttttttattaatgttgattcaaaaacccgtctctctaaatctgtcttgccaaaaagccatttatttattaatattatttttattaatgatatgactctgaattataatctaaacattttagttaataacataggagtgcaccatatttatttaataggggaatgtaccatatgagccgaacgcacttttatccaaatccaccaaaaaagtcttgcaaaaatactatagagataagaaacgattgtcggttttgataggtataagattagcaaatatatttgttagcttaaattagttaaagaatacaaattgaaaaggtatattacactttattcgaatatagtatcaaaacttatataacacagagatttgttattttttaattgttgaatatttttttttgtgctaatttttatgtgattaagatttaattgatttcgtaaataaaatattaaattgtttacgaacttatttgtttataatttggtaatagatagatatttgaatattcagtatattttgcttcagtttaggaaatctttgatgacccatctctagatccaataagccctataatctagatattaacctgcagtataccgcaagtagccttatattttagttaaactaaaaacttttattgtaaagatgatttaaaaatatatgatattattttatttgattttaaatgtatagtaaactgtgagttgtatatgttttgttgatattatctatattgtttagtgtttaagattatacacttgtagtttgattgttaatttaagagtttgacatgtagtataccatcttgtattaatatcgatctaaacccgttaattctaggattttccagcttgtattaaaaattgaatcacatctaatatgttattaattattgtagtatataagattataaattttcaatataatatgtatgaaattgaatagaaataattcaaattatgaccagttactcagtagaaagttttcttaaatctatttttcatccgttataatttttttcatgtattgaacagtttatattcgtttttaaaaattcaaattatgacatatgcgaaaaaactcaaattatttttttataatgatgatattatttttcggcaaaaatagaatcatataaagatgagaagtgaactataataattaataaaaaattaatatgataatttagatatcaaatctaatttgttgattttaattggttacttttttggaaattaataatgcatttcatttttctaattaaattaaattaattaaaatttagatatcaaatcttatatgttgattttgattggttattatttttggaaattaataatgtattccgtttttatgttaaatttaattaattaaattagtatttgactttttaatccttaaagagataaattaatttattctttaaaattttatttctaatggcatacctatgtaattacttacaaaaattaaggttacatttaaaatgtactttccaaataatatagtaggatgtgggatattacaaaatatgctattggaaaatatttcagctaacattttattatttttatttaaaatgacaaaaatcatatctttcatatattcaaattcattatttaatttttcaaaatattgaagcaaacgaaatgggataaggcaacgatgccaacaaacatcaattacgtttgtttaaccataattgatatccataaatagttctcaatcattaatacaaaaaatcgtactaataccataagtaaacataatatatcatgtcttctcttaattttccaaatttgctattattaatttttatgagttgatgaatttctctgggtatcaacatgtttcacagtgacagtgaatcgtatcaaagttaatacatcctcattaacattgaaacagtgaaactttcactcttaattcgtggcaccacatcctcatttagttatctatgcacattttaatattatttatatttaaacaataatttatgtatatttttggcagagatttaagttttatgtgaaaaaataaatattcagcatccatatatgataaattcaaaaatgcattgttgttatattaaagaaactatatagtgaaataaaattattatttatttttaagcttattattttaaatattttacactatcttctaaaacaatatcaattaaaatatagaaaaattctttctaatgctcttttcacactacctctttttaattctacccttttctatttatcattttcatttataccctcttcaaattattaatgaccattttacccctatttgtaaattgatttatgttaacaaaatgaaatattaatatttttcgtctaaaatattccaaaataaaatttcccgccaaaattttcccgccaaaaaatttatcgccaaaaattttcgaaaaaaaaaattcccgccaaaatattttcaaaaacatttttcccgccaaaaaatttcctcccaaaactttttttcacaaacattttaaaagggattaaaaagattttaaaagtttttttttggcaagaaatagatttacaagggattttaaaagggttttaaaagattttaaaagatttacaagagattttaaaagagtttaaaagatttacaagggatttaaaagggtttaaaatccttgtaaatccttttaaaactcttttaaaactcttgtaaatcatgttttactcttttataagcttttaaaattcttgtaaattataccacttatttatcctttaaaaacgattataaaccatgcaaaccctttttaaaatcccttgtaattcattctttgacacttacttgtgttttaaaaacgattgtaaatcatgttaaccacttttaaaattccttgtaaatcattcaatgccacttacttacttttaaaattccttgtaaatcattcaatgccacttttaaaattccttgtttggcgaaattttttttttggcgggaaaaataaattttggcgccaaaaattcgacgggaaactttcagtttccaattacatgtgcttattagataagggtaatttggtcattctgttcaaggaaagggatatttttaaaaatgaacaatataaaagggtactgttgcaaaaggatagtaaaaaatggtagttttgtaaatctccctaaaatatatgcaaaccattttcactatattttacattcaataatttagaatacaattttcatatattttgaactaaacttgatttgcaagaatttttcatatcttgaagatttaaaattgactcctaaacctaacaatctctacaatatatttaagattttaaaaaatttagcagcacttcaatgtgcacactattttatatgtatgtctgctattgttttaactcattcagtatttgattcattttctttctttataaaaaaacaagaacatagagtatagatccaaaatagattacaaaaacatagagtatgatccaacggattttaacattgggtggattagcgtaggattatcgaatttactgatccaattgcggaattatattggagtatgacacaataaattaaatacagaaaattacaaaataaattttattaaatagaaaatattatgattatgatttatgatgtaaactatcaaaccaaaattgccacaaatatttcctcacgctgcacatcgtggatccttatctagtttacctttagattttcaaacctctaaaattgaaataatgtttgataattttcaataatgcaaaaaaagaatgaagaagaaattcaatcaaaacaaaagacaaacatatcacatataaacttcattgttctgatgcttctttgatttagcaattttggggaaaaataagttcgaatgcaaaaataaagtttgtaattattcaacaaaaaattcgggcataccaattttttttctttcttttaatcgtttgaatgcaatttttttgttcggaatatgaacatggcatgtagaaagatgaaatgcttgctagagcgttgaagtttagagaagcgtttgttagcatgaaagcttttgataccaatgataaatttttgatctattgaaaccttttagtgttattatcacttactttttaggctctaagtatcccacatccaatgtatactttacacaaatatggaggattgagttgttgctgaagaagtatgctatttgtgatgatgatgttgttgagcaagtggctcaagagatgcatggtaaattttccgagtattgggaagattatagtctcattttggctatgagagcagttttggatccgaagcttaaattgaagatgcttgaagtagcttaaaagaaagtaaattctactacttataagttaaaaattaaagggctcgagaagaatttgatgatattgtataaagttggaacttggtgaattaacttaatgtgagtttttgtaacataagatctatttgaactagaaagaagtattgaagacggtgtgaacaacacaaagacacacttggatatttatttggatgagagtgaaagtctttttcgaaatttggatgtcttaagctattggaaagataatcagaatcgatttggcggtttagcttctatgacatgcgatgtccttagcattcctattactaaagtagcatcaaactcagcttttagcattggatcgagggttttgactccatatagaaatcgcttgcttccagaaaatgttcatgtttgctttgtactcgcaattggctacgcaagtttgttgactatgaaggtaagagttttaaattgaaagctttataggtaattgaattatattaattaaatttcattgtaaattgtaggtaccacagaagataccaatgagtttaaccatggagatactcgaaagactacaagtagttcgagagtagaaggttcaagatcggaaaaatcaagtgtgccatgaaacttttgttttttctcttttgtttttgaaatattttttattttaagttttgttttggtaataaaaccacttttgatattaaaagtctttatgaatcacatttgataaaaacatggatttgattttacattttaaaagtgtgtatgaattaaatttgataaaacatggattaattttacattttataaaaaagtttgtgtttttttatgaattgaaacagccaactaattggtatataactaaatattatttatgaaatttatatagagaaatatatataagaaaaaaataagtctaacaaataccgaaactagcgggtcacaaaaataaacaacggatcaaaaaataaatcaaagagaagaagaaatctcaacaaattctctaattcagtgttcttcttcttatagactccaaaaacctctgaagagcctaatctcaaaatttctagggttttctctaatcggaaccaaaaccaatgaactcttcaccaccaccggcgaattccgccaacggcgatacaaccaacaacggcgagaacggtcaagatctgaacttaaacttcttagacaagattcgtctctccgctaaacgagatgcgaaggaagacgaaggagaagaattaccgacggagttgaatacgatcaatagcgccggcggatttcttgtggtttctcctgataagctttccgtgaagtacacgaatacgaatctacatggtcacgatgttggtgttgttcaagctaataaacctgctccgatcaagtgtcttacttactactttgagatttttgttaaagattctggtattaaaggacaaattgctattggttttactaaggaaagcttcaaaatgcgtagacaacctgggtattgttttctttatctttggattttggatccaatctttgttgatcattgtgtgttgaagttgtttagggaagaatctgaatttgaaggatttagttcaagaagtatagttttagcttgtagcttgatcattgttgtgtttaaggtatggtttattttagaaattgaggtttgtggtatggttttgggatccaagttgtggtttagttattatagagatttagcttcttggattaggttgtgtgtgttctttctggtgagttcagttgtgtagaagtggtttagggaagaatctgaaattcgaaggacattgctttgtggtttatttgaaagctaggttcttgagtttacaaatatggatgatagtgcctttgaaagaagctttatctgcctaatacttgaatttgaggttatagttttcttttgtaatggtagatgggaagtgaacagctgtggatatcatggggatgatggatacctatatcgtggacagggaaaaggtgaaccttttggtccaaagtttacaaaagatgatgcagttggcggtggtataaactacgcttctcaggagttctttttcacgtaagaaagaaactgtttcatgttttttggtacttaaataagttcattactactgtgagttgaattcatgattcattcattttcctgttactctttgtctgttaaagctgatgacatttttgattatttttgttggtgccagtaaaaacggaactattgttgggaaaatccccaaggacataagaggtcatctattccctactgtagctgtacatagccaaaatgaggagtatgttctcactctctctttaaagatcaataccattgccatcatgtatctcactctctcttacacaaagcatatttttctgaaattttggcagggtattagtcaattttgggaagaagaaatttgctttcgatattaaggtaagaggaaaaatcctttcaaacgtggttaattaggtctcatagctttatactaaagtaaggatggtgtaaccaggactactgctattgaaatcacataataggtatgcctcatgtccgttcttggtactggggttaccgaatctatagcagtggttctctttgtagacattgctctcacatttgctattttactgttcctgtgtaatcaaacctcaaactcttgggcactcaagttataatctttaaacactgaagtagggcataaaaattctttccattacatatatgtttgaaattaagtaattgacgagggctgtttccctctttctgtattattagggatatgaagcatcagagaggaataagcaacaattggctattgaaaaaatatccatacctccaaacattggttatgggtgagtacactccttcccagcagtaacagatcatgtacttttttaactttgaattgcaatacttggtttcccttctggactagctttctgctttatctataattttgttttctttatcattaggcttgtcaagacctacctgctacactatgggtatgaggagacactcgatgctttcaaccttgctactaaaaatacagttcctccaattcatatagatcaagaaaatgctattgacgaggatgattcatcctatgctttgaaacagagaaagaatcttagacaggtattgaacttgctacggtttaacatataagacatgttatcttctaactttattaggcttgtatctggctttttttggttcctattcaaacccatactaaattactgcttcgttagtgaatttggactgattcattctttattgggtgtagcttgttaggaatggtgagattgatactgctttggcggaactccaaaagttgtatccccaaattgtacaggtgaactgagatttcttatcatattgttgagatgatccacttcacaggattgtgatacgaagtcttacccggctgtacctactgcaggacgataaatctgtagtttgcttcctccttcactgtcaaaagtttattgaattagtacgggtatgctcttcattccttaaccatctaaatttcgtgttcttaatacttgtcagaaatattctctctctgtgcatataagaataaaatttttgtaattaaggaagcttttgatggatttggtgtctcatacaaaaattagctgcttgaactgtgtgatggactttggtgttaaaccataaactagtgaaaaaatgcacagaacctataacacactggaaaccatgttacatagatgcatggaaccttgtcaccgtgtataaatatcaccttaagttagttctctggattattccttctttgttcactttcacatctatgcagatggggctatttctctaactatatggttttggaaaaacatggcataaacaggttggaaaacttgaagaaggtgtgaactatggcagactcgagttagctaaatttgttgggttaactggatttcaagatatagtcgaggtaccaatgtctcctttactcctttttctttcaagcaagatctggtttctgagaatatgtatgtattgcgttcagatacagagactatatatgttgctgcttcgcttaggaactctattttcttgttgattattcaggactgctttgctttgctcgcgtatgaaaagcctgaggaatcatcggtctggtatttcctagaagactcacagagggaattagtggctgatgcggtgaatgcagcaatactatcaacaaatccaaataagaaagatgtgcagagaagctgtcacttgcaatcccatctagagaaactgctaagacagttaaccgtgtgctgtttagaaaggcggtcactgaatggagaccaaggtgaaacattccggcttcgacatgttcttaacaacaacagataaagaagatgaaaatggcttagccgcgcatatattttgaaaactctgtttttctatggtcgttatcatcataagtggcttttgttcattacttgtgtgatattatgttgaactttccattatgtaaaggagaaagttagaaaaatgggttcgacgttaagacactgggacttccactgttattggttctttaaagtttagatgattcaaattaagattttcaacattcaaatcagaaatggaaaaactgaattagcggtgggggtgttcgggtttagcggtatctttcgggttttgtaacttttgttcgcttggggttacctgaaattattctcaaaaagagattttatggtaaacagaaatttttatgaagagaatctttaattttttattttcttttcataatttcatgtgacgatgtataaatgttatgatggtaaataaatattattgtaaattataatcagttttaaacaatcgagaaaaaacaaattcttgtttaaaatgtaaatttaataattataattacaattttcacattttcaaaataatagtaaatatgaaatttgacctatccaataaaagcccaataactaatgtaaatagagtctatattgatcatatttagcttcatccaatgcttttgtgattaaaaacccacgtgaaaaaaggcaatgagtcccacatcggatgcgaaagcaagaaaaaatgaaagtttggctataaatagttaaacataccgagtgttgaacatatatatttttctcatgctttggttgaaggtggcaataacctcaaatatatcagagggtgtagatactcaacgactataggaggcaataacttgagcaaacaattgattgcagaaatccatcgactaaagctgtcacctgtttgattccagcttttgtctccttacctgttgagtgtctaaactctctggtacgttcatagttgttgctgcctttcgcttttttttttactacacgcaattgtttgaaagaaatatttcatgtgaattttagattatttatttatgttctgtctcttactttttataaaaattctaaacaaacaaggagtagagttttgggggtttggaaaatttactacgactttaatcttgttggaaactacaaaattttgttgtttgcactcctcttatgtccataatatttttttatattaccttttaaatcatccatattttcctaaatcattttccagaagaaaaataattagcttcataccttcatccaatgcttttgtgattcaaaaatccatgtgaatgaaagcaacttatcccacattggttgtaaaagcaacaagggactaaaagttttgttataaatagttggacatgctaagtgttaaacatatagttatgcccattcctaggccaaaggcatgaacatcctcgaaaaaacgagagagtatagacgcttatcggctgaaggaggcgatagcttcttttctgcctcagtatttgtttttgtattatatttttataggttttgcgcaaaaagccctcaaagtcatctatttatgcaacattatcctcaacgttcaaaaaatgcaaagtaatcctataaagttaaaaataatacgcaatataactcatttttgtaactttacatatattgtaaatgttttcactatcacatacatttgtttttaaataattaaagatatagttgaactcgtcatctccagagcttcgatttgatatattaacatgtcaatgctcgatatactcaatttggaccaaccaaaatcattggctccatcatcaaatgtttcgatcgacatatatgattatttacctaattgatacgaccatttataaccagaccattagcttttgagatgataattccagacaagcatcaaaagattatcttatagacaaagactttggttgaatgtgtatgattggaaattttattttatagaatgaagtcatatttgatattggttgagattatgtgagacaaaattatttcaatgtaactaaatattagggacatactataatgtttagtggtactcaaaaaattttggaaaatacaaaattatgctaaacaaaataaataaaatagaatatatcgtaacactgtttcttttcttgtgatatatatttgttacatagatctaagtgaacaaagttaaatacttaataactttgttcatctctttttattttgtttacactggtattttcaaaattgtatccaaaagtttcttccaagttgataatcctccacaatcacggcggcatctactgatacacgtacatcctcgtctatatggattagctggtgtacgcttataacaatcgggtgttggaaatcttggattacaaggatgtttttgccatggaggatattcaatataccttttcgcatcattgctatttataaacacacatacaaaaaccaaaactgtcacaaacataaacacttgtgctttcaacattatttactttcttgattattttttgtttggtggaaagattggaaatgccgattcttttttatagtgcaagagataaattatatatatatatatatatacagtatagtttcattcactttaatacaaaaagttcattcttatctttggcagtgcagattctttgtagttttattaatgaaaaaaacaataaaatttggtcgttatggtttttgtttcagttaagactttaaaaaataaaagatacccattcgaaaataaattcagaaagaaaaactgagatttttgacgactacttgatgttcatttgatttgatttcggttatggttttaaaagatttatgaaataaattttagtcagttttttttttcttaaatattttagtcgattttccaatgctcattaagttcttagtttttatcataaataaatgtgagaattttttttaaaaatcagatattatgacatatagtatagtcttttgttaaggaaaaaaacaaaggggggtatcttaatttggttttggatcgttttaaccagagtagatactcgtccattcctaattgtatgtactacacaataaccagcttaaaagttctatatataattaaagtattgaaccaatgattttatagttttgaagttccatcatatttattacgtcaagatcaagcaacatgaggttgaaccaggaaacataggtggtttccggttcaactagatcttcaattccggtacatttagttgagttaattaatgggcttacgaaaacaaaagaaaaaagaaagttcttgggcttgacacgtttctaagcccataacgaagttattaaaagaattagttgaagaaacaaaaagctttctcgtaattttccaatgtaaccctccaaaaagaaggttattgcattggtttaattcggttcactggtactttccggtttaaatcaaagtaaccgttggaaaaaaaaaaacttcttcaaaaaaatcacaattttcaattcgcgtctcccagatatacttctgataaaaatggtgaacacgattataatggtttgtatagtcgccggaattatcgtcggaatgcttaacaaactcgacgaaattcagattttatcgaaatcaaagctcaaaaagtgtgagttaagcatcagattctactaatctcaattcactttgattagctggtgtagtggtgtgcgttgataacattcaggggttggaaattttggatcacaatcattaggatgttttggcactcgaggatatttaattgtgtactcgagaaaacatcagattcagggaatctcaattgtgtaaagatttgtaaatgaaggagaaatgttgtaattttattaagctcttgtctcttaacgattacaatgagacatagtctcttatttatacatctcataaaccctaggtgccgtaacacatgtcgttagatgacaggaggctaagcacgtcatatctgttctttgtctctatccttggtacagattcatagctcaccatctttgcttttgcaacggctctatctttgacgcaatactctgcaactttgttctctttgtcgtttgtaagctgcagaggtaaccttctgttgttgggcttttcgatattctgagtgttaatgggctgagtggcttggcccatgacattgtgttgagaagactctgagtcgagcagagggtttcacttgtgctctgtttctgttgactgaagcttctcctttatactcccctgcaaacttggtgtgggtgggaaatctacacccagtttgtatctgagagaggtgaaagcatcctatggcaatgactttgtgaatatgtcggccaactgctgatgagacggcacatgtttgacaatgaacgaacccaaagctactctttccctgacaaaatgataatgagtttgaaaatgttttgagcgggtagtaccggatttgtagcatggtatatctacaaaaggttatctccatacaactccggtggttctcgtagtggaatatggagatctctgagcatgttgttgaggcaaatgatttctgaagttgtatcaaacaatgccctatactcagcttccgtcgaactcttggagactgtgggttgtttctttgacgaccaagagatgaaattgttgtctaggaaggtgcagaatctgcctttagaacgtcttgtttctctacaaccgacatggtcactatcactgtatgttttaagcttgaaggttgtatccttgtttgtagaagatcgtttcggctttgagtagtggctatagtcaccatcactgtaagtttgcagtgtgaagtctgtaccacaaatttcctttgtcttacaaatttgtttttcttagagacttatcctcaatcctgatgctacgcacataggtttagttgctaccgatttgttataagtctatacgtttccgcagatttgtgtttccaaaagataattgctagattgactcttagttactaaagatttctttctttgatgacaaatttattttgaatcacagatatatattccatcataacagatttattggacgaaattgtcgcaaatttaatcatgactaaactaactttttagtagtcacagacttgttgatgcacttttattgcagatttatattcacatcctgattttaagatgccacagatttatttctgttaaagcaatctaaaccgtccgagttagggtttgaccaaacattaaagtagctcttccttacccttatcttatcttcttctttactcctccgcctcaagaaatattatattccaaatacaatgaaatgttaaatcgtccatgtatagaaatatatgttaaatgtttttatatacaaatatttgtatataaaaaataaaaaaataaaattttcagaaataattatgatggcttgtcctaaatatttagctataaatataaggtctcggtcacaccatatcaaaaggactttttattaaatatatagttatgatattatggtttgttttatattcctatggttctttatatgaattgaatttcttatcatgcattatgatttttcacttgaagttgatgttatatgtgtattgttattttgttgttgtacaaattaatatcaattttttggagctgatttgtatcttttgaattgtgttttaggtaacatgggagtttttatcaaaagattgaatgaacgagttgatgtgacatgtctcttcgattaaagtcataaacaaacttttacataaatcgtgagttctctttaatatttggtacctcttcataatttactttcaattttataattttgtgttggatatagattattggtagtctctcgagtctgatttttttttgtgtgtgtttttttcttggttttggttagaaatttcaatttactatatgaagagaaagaggttagttttcaaacttaaaccacatcgatgtttgaatatctttgctcttgttccagtagtttttgttttttctaacgtctgattactctcagtttcatatagtagaatctaatcaaaaaaatttcaaaaaatttcaagacgagtcgtaatatacattacatatttggtgaagaaaaaatagaaccctaaagtgacgaatacttgagaaaggggcaatcgatctaaagaatctggtggttgtagaaccctatacacatcacagattaataaagctaagaagtcatgcacgaagaagtcatagcggaggtttcatatgcccgtaccatgcaatcatgcatcattatatgcccgtaataatacgaatgtgaaaccgaatacttgaaaaagagacaattgctataaaggatctggtggcttgatttgaaaccctaaagtatatgtcacatattacgaaagctgagtctttttgacggagaagttacggcggagaaataccatgcatcaatgtcttgcgtatacatatttggtggaaaaaataaatagactactattagtggtaatgactgttgtgactttctccacattgaatatgaaattgaacgtaaaaaccattaattatttttatgaagctgccatgttattttgcaacgtaatccatttaatcattgttataaaataactttaatgtcggatatgatgatataacttatataaaaaaaatactacatcaagaaaatttcttaattctgaaatagtgattttattcccaactatagataatcatcaatgacgaatatattacggttcaaaaaagttgtaacctatagttaataatatgacaatttgctaaatttcaaatcccatattatctcatgagcgtgattatatgccaaatggttctaagattatatgctaaattccaaatacaaaaagtgttaaattgccatatagatgttaaaattttcaaatatatcttaaaggaaaaattttaattttcaaaaactcacaaatatgttaatgttagtataataatttctaagttttagtttaaacaaaaaatcaatactaattcaaagttgaggctataagcttctaaaagcgtacacatagaattttaaacgacgaattgcggttggacatgtcatttgacattttagctattacgttagtttacatttttaattctaaccaatttttatttaaaaaaccttatgaaaagaaagaaaaaaacaatatatagaacaaatagaaatgtaaactttttttaaaacaaacaaagaatgtaaaattttgttagtagaaaccaatcacgattaggtttattgctaattaacatttttagccattacgttagtttacattttgaagttctaataattttcaatattaagatatttatgaaaagaaaagaagcaatatttaaagaaaaaattgtaaactttttaaaaaaataacatgtggaaaaacaaaaagtgtaaaattttgttagtagaaaatataaaataatatcattaaaaattaagatatttctaaaatagaaataaatatagaaaatataacataagaaagaacatatataaaaacaaaagtgtaaaattttggtattagaacatattaaaaataatatcattattagtttgaccaaatttgctaattttctctcttaatcataattaggggttggaattatgctttagtttcgagtcaaatttgatttggttagatgaggaaaaatactactaaataccaaagtggaaaatattcaactaacaacgcaaagacaaaaacaaattcatgaaggtctaagaaacttttagttttaaataaaaggttaaaaattctatttagcaggaaaaagaaaaatgtaaaggttttatattcgaaagtagtgttttatgtataattagtcattaaatataataatagaaaagagatacttgacatatcataatgtttagttattgagatatcaaacaaagagctcaatgaattacgagcgcattgctatttggatcatctatttttgcgaaggacaaaatctttaatctcatgtataatctttgaatcaaaaattgaaactaaaaatcagtaaaaatcatgtatgatgtagtcaccatctcttatggcgttaagacaaaccatcataggtggtttgagtctggaagcaacaagctttcgccttaacagcagacagaaaagtatctagtgcataatctttgccacaaataggagggaatcgatctaacaatgatggttcgagactagacatgacctgccatagacgtggacaggggaagtagagaaatatcagatgtgtcgatgaaagaaatctgagaagtatccggtgaatcgacaattggagaatcagaggatagcgagttgaggacaaaagagggaaagacaatttcttaaagggctaagacaaatagaatggggagagatgaccttttccactaaaaaaaaacccaatagccaagaagccaacaattggcccaaacgttgcaaggcccaaagctaggcaccaatactacatgaggtatcaccgtcgcaaaaataagtagcaaagaggagactaaatatcgctggaacctttaaaaaaaatggtaggggaacaacatcaccaccaaacgaggaggaagctttatcggggaagtcaagaactaagaatgggatgtaacatgagtagaatttgaggggtaaccagttgaaaggaggaaagatacagagttgaagactggatctttgcttaggcaccatgaagagagttgccacaaggaaaacaagggggagtcggaatcaactccagcgagtctacattatcagatatgagcaagttttggatcaactcatgtggtttgactttgaacaagaattgagcacgcataaagagaagagatacaacaaaaacgatagtagaatatccaacgcggcgatccatagcaccactgacatcagagaacggcgcaaatcaagatatctcgggaatagtgcctgggaggatgcggctatcagagaacggcgcaaagtgtaacaaaaatttaaataaagtaaatgataaaaaaaattataaattaaagaaaatttattaaaaataacaaaaaaataaacaattgtaatattttggcattagtagtattattgtatagttacttcaataattattaagcctaaaattatattaaaacaatcaattactaatttgcattagtaatattaatgtatagttacttcaataatcatctgatacaaaataacctgtagtatcaaaaacattaacttgaaaaatatagtgcatgtcgcagaaccacccaatcaattttaatttcgttttcaactatcgttgacaataagatattgctttctttagattaaacatttttctaagaaaaactgtgtactgcttaatgcacatggctacgactactactagtgtgagtttgtgtctgtgtgacaattgtgggaatggtggccaattgtcacaagtttagctaagtttctccgaatattcttttattcgttcataaatttgctttcaatggacctttttttgtcacttctcacaaaaactaaataagctttacttaataatgttataaagctgaaaccttgagcataaattgataaacaaaactaacaaaatatatattctcgacttgtaaacatcatctttttattgactcttctaaatctttttctccttattgtacaaaaattttacagctaaaattcatatatatctattttttctagttcaatatataagatcatgtttcgaattttcgaacagatcatcaccatttttagatagtacaaaaataaaatacagatatatcaaatcctaaaggatacattattgttcttctttaggtttgcatttgcatctcttctgctgctctgtcaattcctgaatccatcatcaaaaccaaataaaatgatcaaaaaaatccaaaatcctaacatattttattaaacataaatttgtgtttctaatcaattagtatctgtagataaacctggatctggctttgaagagccttcacatactccacagcttcttccaacatgtctgcagtgttggtttgctgcaacaaagaaaatacaaaaaaaaacgaatcttcgcgttataactctcccggactatcatgcattgaatcttctaaaagactgcacaaccatagtttatggattaaggagtaagtagttttgaagttccaataatgccttcacaatcatcaacagttaacatccaaattcctttactttacggctaagcactagctcctaccttaagaaccaataatgccttcacaataatgctctaaccttaagctttaagcatatctaatcttggacccatttggtaattctttttaaaaacttcaaagaaaacttaaaaccaatctgccttgtaaaaagaatttaccttatccatgttaggaacaagctcttgcagcctcctaatccgatcacttattcgcgttcttctcacctaacaaaatgaacagagaaaagcttaatgacaaaacaagaatgaggcagaaacagaattagtactgcaaagcatctagcacaaacttttaagtaattacccgttcagcaatgctacgaggatgagtagcacaaccacgtttagcacgaaccctacaaggaactgaatcctcaaaaatcttgtccatgttcatatccatcattcctgatatcccaccactcatttgctcttctttctactcacaaaccaaaagggaagagttattagttaactcacaaaccatatgcacacatgaaaacatgtttcatttcacaaaagtcatgattcagaaacttctaaagttacaagatcgatacatatctaaccaatgaaggctctttttgtttgcccatctactaatacaaactttatgcaacattcactttcacagccacagggaaacaaagaaaaaacaactgcaacttgcaggggaatttgtttcaaacaaatgcaagttgtcaaattagacaagacaactcttttacatctttattgtctccacaactgaagaattcaaacacccaattaaactaaaaccgtatcaatccccaaaatagaacctaacctcaccattttgaccacaaattcacacaacttgacattaaagtaagcaacaaaaaaaagtttatctttccattaaagttcgcatttttatctgaatttaatggaaacagagtcttaccagctgagaagaaaactgtgtttccatatctctagaccgtttagtcggagaaatatcaacgttggtcgacaaatagtcataattcgccggaataccaaaattagagaaatacccatcagtcccagaaccagacccactaagaaaatcagccggagaactattctgacggtgaaagccaccaccttgatgatgattatacaatccttgctcaacagaactcaggaactcgaacgagtcgtcacgactcgttatcactcctccagagttattattaccagtaagcagctctgttaaacaaaggttaggttttaaaccttcttcttcatcttcttcgagtagggtttcaatccaagtagctggagctgaacggatccgagataatccacttcgactcacctctcctcctcctccaccaccaccaccgctacttccgccgcttatatgagtggattgcatcggggtctccaccggagaatgtctttagtcggtgaattgaattcgcgcttttttatgggtggagacaattagacaaaacaatttattaaattttagcagcagaccagattgttctccgattgttgtcttttcatcaaaaactaccgtgtgattaatttacacggatacaaaaacagaatcgttggatttgtgttttgttgacttttgactaagatctaacggtggataagtgagaggtttcgtgcggtgcattacattgaattctagcttttacgtcactgtttgttctttatttttcagtggatatggtttctatttattattcgtctacgcgcaactgtagcgagtgaggtatacgttcggaggctaaaaggagagaccacctccaaaaatgaaaaaatgtgaccttttttctggctgaagctgtttttttttttttttaatatgtatattacatgttggaagattcaaattcagcttcaaaactacaatgtctttttggatatgtggtaaaaaaactctaggcaaagtttagaggtcgctaatttgagtgatgcacagaacgaaagtaatattacatgttgtagttttgtgcatggaagattacgggttttaccctaaaattttctggtattcaaaaaatatcacccaaaaatcattttttcagtattttcagtttctaattaaaacactaagagtttaaatgttattatttctacagtaaaaaaattaagtaaattgagatgtgatcgcggtctactggtattcataaatccatcaaaaaccagagcaattttatacaagatcgaaaatataaagtcgagtggaatgcattttagaatttcatatacaatcccaaattttttttaaaaaatggtgtagatttcgaccagtttgctctaaaagtaatttagagttttgtgaaaactaaacctccaactcaccaatttttgcatatttacatttcacctttagccaatgcagattaactctacaaagttaaaatagtatgcaattaaaccatttttcgctacagttaaggttgtaaaatgttgattaatattaataatatgtcaaatttaagctttagtgacagagagttcaactaaacctttaaattttaaaatctaatgaatgtgaccgttaaaacgtttacaatatatgtatataagaattaaattatttttattttgattttctatgattagtctataattttttgagatggaagataaaatagtaaaatccaaaatttaatgcttggacttctttatagaaattcatcatcttcatctccagccccaaatgtgttgttcttctccttctaaaacgttttgaggtaaaaaggaacacgatatcaagttaaagatggcaacacaattaggatgggacaggacaacttggtagactcacatcctccacgtccattacagatggattcagctcacacagacgacaaaataaataaacatattttgaacaggggtgcatatcggttctgggatacagatgcaataaatcaaattgttaacccaaatgatcacaaatttattcatggtattcatttatctcggtaccctggtccagatcgtataatttggaattattctgtctctggtatttacacagtcaaatcaggttattggctacttactcatgaccctggagataatcaagtttatccttccatcccgcatggatctacaacgatgaagagcaaaatatggaaattaccattctccctaaaattaaacatttttgatggtgtgttttatccaaggctctagctacgtgtgttcggctgaacacaaaaggtatgcacatcgatctgatacgtcctaaatgtcgaaatggagatgaaacaatcaaccatgctttattcacatgtccattttctactatgacttggaggctttccaatacacgtgttttttatggtcaactagatctgatgatttagaggccaacatagctaaactcattgatggttttcaatcaccaagttcaacatatgagcataaagttcttcctttttggatcctttggcgaatgtgaaaagcgaggaataatctgggttttaataactatagagaatcatgttcgaaagtggtattgaaagctcaagcagaaacaaagaagtggattttcagtaatggcacaaccgactcttcccgaaagagtacaagcacgctaccaagagaaattcttcattgttcaaaaccgaaaatcccctatgtaaaatgcaatttttatgcaagttttgatgagacatcttctcaagctcgtcgtgggtggataatacgagacaaagatggaatggcaaaggcatggagatcaagtgatcctaatggcacaacatctccgttaatagctgaaacaaaggcgctccttgtcgcaatgcaacaaacatggatacgaggatgtaggttggtaatttttgaaggagataatgaagttcgtatcaaatctatccaaggatacactacccagagtaatataaccaacaaagacatttgcttttggaggaaaaaaattcgacatgttcttttcaaatttattaagagagaatgtaataatgtagcccatcatttagctatactagcttatagtcaactcttgtttttggctcattctgtcattctgcctatttggcttgatgaacttctatgtattgacaattcaaattaattcaataagtttttgacgaaaaaaaagaaaaatatttgggttcacctcctttattcacctcctttattctagccaattaaaatgtgacacctaataattataaaagaatttaatttaattataaaatctaatttgccacaaaaacaaaattatgtatcggtttgggtttatttgaaaaggtcagggtttagattttatgattaaacgaggttaaatatcggtttgggtttagattttatgattaaacgaggttaaatatcggtttgggtttagaaagtacgattagggtaacacgttaaattttggtttaggtttattaacagatttagattttacaattaaacgaggttaaatatcggtttggatttagaaaatacgattagagtttagttttttacgattaaatgagtttaaatggtagtttgggtttacaaagaagaattagggtttagattttataataaacgagattatatatcggtttggattataattatagttttaatttattatgtaatttaagtataatttgacatgacatgtttttattggttaatgcaaaaagaggtgaacaaaggggttaacccaagtctcgttcaaaaaaaaaaaacgttttgaggtttgatctttacttaaacttctagattatttatttattcttgagtgcttttggatcattagagtttcttaagaacactaccaacctttaaatttgattcttttctttgtgcctgcttttgtgttttgacaatacaaaagtttccatgttcccctctccaatttctagactcggaagaatagattaaacacctaaacagagtcttggttccaaataattgtgatttttgtgaattatgttatgtgcttatgtatatgtttgagtaaaaaaaatttgtaattattattattttggtaatagtatatcttggaaaagggaaaactaaaatttatttaaataaaaataacttaaaataaaggaaacgaggtgcaaatattttttcgttaaaacaattttttttttaaaaaaaaaagttgcaaaaaataaaatctttgtttttaattaataagatatatatggaattgtaaaaaattattcaattgcctttttaattataggatgcataatgtatcattcatatcaattcttcatctagaaaaacggtgagacataagatacaatcttaactataagaaaaatcaaagattgcaaaaataaggaaaactaaacaaaaaaaaaaaagtaaaaaccaaatagaggataaagtaaccaagagactttttagggttaggagtttgtttaaatcctcctcgattctctatctttttgggaataaaatcgaccgagagattttggttttgttcaacaatggcagaaacaaaaaactggtataacacaagagaagcgatagaaaaaacctctccatcgagacttgacggtatcaacttaaaggaagagacgttccaacgttggtcttacacttcattcctacaagagcttggccagagactaaacaatcctcaaaaaactatagccactgcgattgtcttgtgtcaacgattcttcactcgtcaatcactcacaaagaacgacccgaaaacagtcgccatcatctgtatgtttatagccggaaaagtcgaagggtctccaaggccggccggtgacgtcgtctttgtctcgtacagggttttattcaataaggagccgttgagagacgtgttcgagagattgaagatgactgtgttaaccggtgagaagcttgtgctctctactttagaatgtgatcttgaaatcgaacacccttataaactagtgatggattgggttaagagatcggttaagaccgaggatggtaggcggttatgtcaggctgcatttaatttcgttaatgacagtctgaggacgtcgctttgcttgcagtttgggcctagtcagatcgcatcggctgctatatatatcggtttgagcatgtgtaagatgacgttaccgtgtgatggagataaagcgtggtggcgagagtttgatgtcacgaaacgtcaattgtgggagatttgtgaccagatgcttgatctttatgttcaggacttcgttgttccgagacatggcttgtgacttttttgtttattgagattgcgtttatagaagtctttctcacaatttattttcaactgcgtaggaggtttaattttgttgaaacttttagaggcatgaaatccttagtttctctagattagctctttcaattccttgataatgtattgcacttaaatgagagaaatatcaaaccaaaatgcaaagcttaataacaagttacgttcatcatcaccattcctttgacttctcttcttgtccacctcatgtgatattactttcaactacatttcttttgtgtttcacatatggtattgggatcggttaatgtcgtggattttactcttatatcacttctttagctctagcatcgatattaagtttattatgtatatattatgcattgcaatactaaatacatggttgatatgttatgctaatatgatttttatatgttttaagtttttaataacaaactcaaaatatatgtttgtttgtaagaatacgtgattagttttatgtgtgcaggaacaaaccatattggaacgtctttgttgggtttgtagtcacactaacaacattgacgaggaacatcgtgtggttgaggtttaaattttttatttgcggtggtagcgtgaaacttgaaagaaattcctaggttaattttttttttttttgagatttcaaaatttatgtattatagaattttagtatatcatcgtattattcttagtaatgtctagaaaattctttttgaatattctgagagttacaattagggtctcgatgcatgataccaagagagtgacaagcttgtgagattccaccatgacgcttatctctgcatatcgagatcgatatttttagatttgtacgcatataagagaaatcagctcctgattacgcttcttctgctctgaagatcataggtcattaatcgaacctaaattctgatgttgtttgtttctactttttttttttttttaatttggtaaaaggtgaaggatttatatcattttcaattttgggaccgtatacagagagaattaataagaaaggaaaactaaaaactatgctctagagacctacaaatacaagggaaaacattagtgaagccattagcagagataagtagaggaaacaccgattccgaaccgagaaacttggacatttgcgtaattgtcgcagctcgaaggagctctaatcctcatccttgttgccacgagcattaaaatttccgaagcagtccacaaacctcaagaaagactgcatacagcttctccgaaaactaacgccaaaacaagattgctaaagagacctaaccgcacccgacggcatgggagtgtcaaagatgaccagagaagccgcaacaaggccatttctacttgttgcggcttcatcccgttaattagatttttagctagttagtagcaatgaattagaatgagaggattcatccaaattggggagaaagagacgtatccgactgaaccaaagccgttaggagttttttattaaaacaacaaatagtgatattgaagatttcattgagtagaaaagagagaggagaataacaaaaatatatctattaattttttgagagtgaagaacaaaaaacaaaagaaaagaaagatggttctcgatcgatgaaactattatttatgtaatttttcatgtttaacgattttctttacttaaaatcccacttctagtggtcgatcagtttcatctatattttgaactcaaaagtaagtctttttcagtaacataaaatttctaacgacattaaaattcttatttgaataagaaaaaattcattcaaactccttcaatttagtccgttacacccctcctaaagatatgttcttatttctctttacttaaatgaaattaaagtcatcgtcattgtagatgaagacttgaccgtatctatttttatgggcagttttaaatttgtatccttatgaagcttgactaacttgactcctttatatatatacacacatatgcatctgcagttttaaaaacaacttcacaccaacaacaaagaaaaaaaaatcaaactaaatggctttgtcaaagtttcaactagtagctcttctaatcacatatactctcctattttcttgccaatcaaaaagtaaatattttctatatttttcttctctctcagtttttgttgttgttgttatgtcaaatttttctctcttttcacctaaacttttgctatacatgtctctcttttcaaattcgtagacgatatttaatacataatttcttggaaaaaatatagtaactaatgattattattgatttgttttggcgattaatagtagtgaaaagaatgcaagttggacctagcgagtgtgtttacagaggtcggtgccgagatagctacgaatgtaggagtcgatgtggaccgcctgagttctcacatgaaactcttggtttatgcatgttcgattatgatgattacgaatatttttgttgttgtaccacaaattactaaaaataattatgattttggttgaatatttatattttatttatatagaaatgaatcattgttttaagatatgtcaacaatacagaattttatataatgtttgcagaaaataatattttcttgtaacaaaaatgccctattttttgagttttcatttgaataataccctatcctttttcctcttttaaaaactaaatttaagtatataaaattactaaaattgcctcattaatatttcataataattaaaatgaatttaaacttaaaactgaaaatttccataaattttaaattttaaattaatatttaatatattttacatttttaaagataaccgttcctattttaaatatttaaacaaaatttcgtcctaaaacaaaagaaaaataaattaaaaaataatctaagatcctgtctattgaaaattcaaaattgtgtttcaaacacttgaaaatatcttaagtgagagactttaaaatatttttagatattatctaattaaattttaatatagaaaataaataaactgtttttatctcaaaaatagttgaaaaaataattaagattacgattttttttctttctaaatattgttttaatttattaagtaaacaacttttattttaaatatggacaaaactgtcatttagatattaaaaattaagttttattaaacacaaagaaaatgtagttttcaaatgaaaactcaaagatatgatagttttcataatcttcctttttaatttctaaatttataattaattccaaaataatattgtttttggtcaatagtccaaaaatgatttcctttttggatcgatgatcaaacttataccgattaatgtttttgggctgtaggaggccccctgtaatttagcttttccactaggatttcccatactttcagcctatgccctattccatttttctcccaatgtatataattccacctaaatcactaaaatcaattaagcttctcaacttccgtttgaaattgataatcgcattttacaatcgttaaccgcaatcaaacggttgatccaaacacgatctattaacactttctcaaagagaaaatccaattcgggttataacattttttttctccaaaatagataagtctaatcagcacaaaactagataagaaacgatatttgaatctctaggttttggatgtgtcccaccgtctccatggctcttctccggagttttacaatgaaggtcgcacgtgactactttcattcagttctaacttatggtaaaagagattttttgtattgtaatttgtttgtgtgttttgtatgtctcagatttgttttaaattttagttttagttttgtaaatattttttgagtttctaaattccgattcgggaaatattgatagatattatgtagtttgtttgctcgagttttttctcctttgtttaccttctttaatcttgtctccaggaatgtttttgtactcgttagcttatctgtcttcagaaatgttcttgtactttccgactctttgtatttcataataactttcctccaaactggtcttgctcatataacaaacagatttatcaaattttgtaaataagtaaaaaacagtcacatgacaaaaaccaaacacaagtatataaaaaagtcaaataaaaagaacaaagtcatgtgccaaagaagcttctccatgatcccactcatttaccaaagtcgtgtcgtacaacccacgacctcctctcctccccatttactccagccatgactcttcacgcgccgtcgtcaccattatgttgaccgacgtcttttggcttcgtacacgacggagccgtttcgttttctttctcctctgttctccattactaatcccaatcctctgtgcctcaatcccaatcctctgcgccgtcgagatctttagtcgtctccgtagtcgtcatccttggtttgctaaatccaccgccgaggaagatgatttgaggctccggagatgtgaagaaggatgtggttgcggcgggtttgatgaaccggaagaagctggtttgcttcagagatacttggaagatcagttggttttggttagatctgtttatgattgtggtgaagaagatcaagatcaagatcaagattccgatcaaattattagagttcctcttctttcgtaaatttccttttttcgattcctttagattttgatctttttatgtagataaacaaaaatgtcagttttactatatacttttcaaatccgattaattgaaaattttctaccattttcgtttctcttgattcagttttttttttttttttttcaacaaatacaccaaaaaataaatatttcaacaaaaaaacacacaaaaattcacatcataattatataatttatatatatcaaaaattattacgaatagtgcaaatgtcaaaacggataatttggcacataaagttcgtgtccaaccgcatcatatcacttatgtaaacaacatttttcaggaatgactcttatgaactctaattaagagttctaattaattttggattaaaaaaaaaaatcattactaatgataaaagaaattcattaccatcaattttaatttatcatcatctccgccattaattaaggggccaggttattttactttccattattgtcaagagtatatttttccaataatgctttttatttttgttttttgagagaatttggtaaaaaaatgttggatacgagttcttgtgttgggtcagatcaagggccacctttgttttgtgtgaaccgagtgtgttcccacaagacaaatcatacggtgtaggaaatacaagagtagaaagtggtccatatcttatctccgcacattcttttgactgctagagaaattacttattttgatctctacccacatccaaaatccaaactttgatctatttttagaaggattattaaaagtaagaacctcaaatcagaacaagaaggaattggccaatgagccttgcaagttgccaccaccaagcctggagcatacttggcagagcctaataagctcataatgttgtactcttgaagacctcttcaaaaatagtcaaaacagcccatgaactgtgaagacacaaaacaatgcatattgtacttacttggacaagaacatatgaagtctaattagcatggatccaaatacctttgtcccatgtcgtaactgagcagagtaaggagaaacaattgattgtggcccccaaaattctagaaattttttcattacaaaatagtctcccaatttttatttttcttataaataagcccctaattttaaaaattacaacaaaacctttagaaaatttttaggctcctaaaatttcagggccgaccccataagtacactatccaaggagcggactacttaagatatcagaattaaactcactagttcaatgtcttactgccaaaaaaacatcggagtcatagaagacagattccatatatcagaaaatgaacatcgtataatacttttcttttgacatcatgcgtattaatttcaaatgttcaatttctagtatttttttttgtttttcattttttattcaaacatcatgtgtaattaatccaagttttaaggttttcacacatactaagaaaacaagttaaattttgattaataatgtttccataactttaaaccaatagtattcaatttcttttattttatttttgaagtttatactgataaagaaatgcatagaaaactttaaaaaaactttagaaataagtttgagagggagtattaaacttgagaacatacattatgtttctccctttcaacaataggtgataacaaataaagagtattacaataagaaaaatacatggtaaggtgagaatgaaaatcttttttggcaatgaattcagcacaagatttgcttgaactccattgaatttgaagatggtttcaaaccccttcttgctattccaaaacaactttactctcaacaataatttcttcaactccaaggttgtccaaacacgacatttcccaaacaatatgtaggacctcgaaatcctgatttgcaataaatcaaagatgtttataaaacgattaggaaaaacggttttcgaaaacgagtgaatgcgagatttgatctctttccgtaatccaaacaggctcccgcagtgtggcggttttatgagcatcgcatccaggatacaatcactataagaccggtatcgcaacactcgatagcggaatctgcgaacttgaaataaacgatatacttttgaattactttgagaagaaagggagagagggagagagtttcgtttagcttgtagcgaaaagcgagtgaagaaaatgagaggaagaggtgttccttttataggagagaggtgagatatgcgatccgcaaatcgagggagaggtgagatatgcgatccgcaaatcaaggcggagatcgcgggattcggagttatgcgcaagtccaagacgttggcgtgattagcggagtcattatcacaaccgtttaaggattcaaattaattcgaataaggaatattcggatatgatattccgaatataccttaattatgcaaacgatatgagctttcgtttttgggccaaaaactatgttgtacaaataatgcaacaaaacctcataagtttttgctccaaaagaacattgtttgtgggccccaagagcccaagcccaagcgcggcccggcttggcccggcagcgtgcgcgtgttgttgcataaaggacttgtatctcctacactatagtgtcccttcccaataggtagtgaaccatattaaatgggtaccactatatatactagaggagagatcttcaaacttccaatgtgggacaaatatcaatatttattattgtaagctttcaaactaaccactttggaccttaattactcattcataataacttcaatttttacatgtaactacactatcttatagtgctcattacaaggaatccaaagactccataatccggtcattccggtaacggtatcaccggaaaagtcgccggaaagttggccggagccacatatgtaaaattgagttccaacataatagttgttacttttgcatcaaaacacgattgaagacaaggataaaccttagccaagccacccccaacaagtctcatattgattatattcaacaaaccatgaaacattagcatagcattttagtttacgtgaaggaaaacatgatttgattagagattgaacttttatatggttttctcgacattcctcttcattagttatattattaagtaacatttatttggatatttactagaatccgagttttattttaacttggatgtacaaagagtagagaaaaacaattggcttcaaatcaaatgatgatgtaaccaatttctcatgagagcaaacgcttcctcagcgtctcgatcatcttcgggtgtctcgggccggtgaacaaagccgtgacctcttccttcatacacaacaacctttgaaccttcaccaatcttctcctcaatttcatacaaacccttcacttcacaaagcgggtctctatctccagcaataaacaagactggcactttcacatctcccgccaccgccgagtctattctcgtaccgtagaacgagacaccggtgctaaagtaaccgctctcatccgtggctaacacgtcaaccacacgtccaccgccaaaacagaaccccatcactcctagcttcttggagattccagccgctgcaaattcctcaaccatccattttgtgaaggtagtagtgtcttgtctgatacggttagggtcatgtcctcttctccattcctcgtattcggactttggtcggtttttcgaccatggatctccacgaaacaagtccgggacaagaacgctatctcaaccaaaaaatcaaaaacacaaaactgaaatttcaacaatgaactttggaattcgagagagataagtaaacagagaagattgattacttatagccattgcaagccacacggtaagcgaaatcgcgtgtagctgaatcttgaaagccaaagacatcagagagtagaagcaatccagttccgttattgttcttcaccgccgttaaaagataaccttcaacaccgtcaacggacacttctgttccgttaacaagctcacacgcttcttcttcctcatcatcatcgacctccacgttaatggcgccgtcagaggtctcgagggcataaatgttcttcagagaacttcctctcctatagaagctcgtcgtgatatgtttcttgatctgacaaaacatgatcttatcaacatttcgcttatcaatgctatagactttaagtggttcaaattctgactgaaattggttaagacgagataattagtaaaagagaagattgcgtacagaggaagcaagaggtatgatttgtggaggaggaaggcggtggctgccatggcggttgaacagtgaccgtggtgctccggctttagctaaggaggaaagagaggctaacgatgcagccattgtaagtatctttctagaatcaatatggtccagaagtttttctttatattgttttggatatttgttaataaaatattgaattgtaacagttaagtggagaaattggtaaaaccgaaaaaaaaaaggaagtggaagaaattgagatcataataatatacttttaggggttgttaacaatgaaaatctgaaaaatggtaaagtctatgtattgtattttttttgtaaaatatatgttttagtttttagttattaaaataattttgttcttagatagttgtattttttttatcataatattttcgtttgatacatttttagttagagttgtgaattttctttttttttcaccataacttttaccttcgtttgtattttgttcatcacaattcttcatttagatagttgtataaatagttttgttgatttttttttaacaatatcaccaatatttaaaagatagttaggcggtagttagacgtttggaaggaggctagcgactagatcgattaatcaaaacttaggcggaacctaggcattagtaaagtatttacttatttttcaaatatttttagtagatttataacaaattattatctaaaaaatttagattactaaaaatgttacttattcgaacttagttatatatattcacacctagcttagtcctagtaattaagaaaattgagattaactaaaacatactttacaattttaataaataagcatttgtttttgtttatgtacttattcaaaaggatatcatatgaaaaaggcactaaactggttttagtaaagtaaatgaaagatatgaaaattcccaattacagattagaaatatcaacaaaaccggtacccaccggcaatattttgcattaaaccggatgaatttttaaatatgaagacgaggggtattctggtttgtactttaagagggctccaaattactcaggctcgtagatcaattcttttcgtttccattgacgagattatttatgttgttttcttcatatggattacacttttcccaaagttgagtttctaacaatataaatgatcgtctgatcagggacatcaggcagcagatccttatttgtctagagaggtcaggccaatacaagatcgtgtgaatcatgagattagcaatgacgtaacctcaaaaatctcacagctgaaggaatctatattaagaacttcaatagcttagagatcaaattaaggtacaaacctaattaaaaaaaattctagcaccttctttctactcataaattttatcttttcgttacttagataatccaatggatcgttattttttcataaatataagccgaagaacaatctacaattaaaagaaaatgatcatccaatctaagaaactgattcatatgagtaaagaagcaagacgacagcaaacttcgttatcgataggactaaacagctcaagaactatagtcttattagagtttctcacttctggtgttgcttcaaagagagacttccacaagtgaagaatgttagactttatctcttccctcacaaacccatttgcctctgaaaattccttggcagacctcaacttctcttctagcttcttaagctcttggttgtagtattcaaaactatacgatttcactacgttgttatttttgagaatcaaaacaatgctattcaatcctcctactccaatgttaaatgctgtggacaagttttcatcagctcaacgttgattgagatgccatcataatgatacactccattcttgggcttgatatattttcatacacatattgaataacacgaaccagtcttcctaccacgggaccgtcatagtctttttcccctacaaaaacagaagagtaacatagaacgtaggttatcagataagaggaacattgcttcagccacaaagagcgagagcttaactccgggtcgtatagcctcttctttctgattctccttctccttgttgagatcagtcctacaaacaaaaataacaaattagtattttcactaagaaaactgttaggaaaatcaaagatctaataaaactcttagatacattttggcaactccggatctaataaagatctaattttcttctattggtgtaatctctcgtaacaactctcgtgttacttttggcaactccgggtcgtatacattttacggatgaaaagatttctcccggatcgatataatatattttgtaatcaaattttggtaatataacaatgcatacattttctatttgacaatcatttttcgtttttataaagttaaggtcaattttatttttaagaacaaattgagtttcttatttctagcacaaaaagaaaatagatttgaacaaaagtgatgatctcatttatcacaaaagtattagaataggaatgcatatattcctttctgtattttaggaatcttctcattaagcctctaacgactactttgtatattgctatgtatttaaaccccttgtgaatatgtcaaggaactcatcaattgagattatacctattctaatatggtatcagagactcttctctaaaccctagcagtcatcttttcctcatcttttcagtcttcttcttcgtgttctctctctctctcttttgctcttctcttcacttttctctctgtatctctagctcttctctccatttttttttctttgtctctcttgatctgcacttaattcatggcgacagttcctccaccaaccgctactactcctgctgcgagtctcactcagatccgtgctcacatccccatcactctcaacatggagaagatgaactacgattcatggcgcatcctcttcgaaactcattgccttagtttctctctcaccgggcatatcgatggcacctcccttcccatcggaccaaccgacgcaacatggaagcaacttgacaatacagttaacatgtggatctacggtaccatttcagaatcgctcctcaactctatcttaaaatcgcagtgctctgcacgtaaactttggctcatgctcgttattccgcgacaacaaagaagcccgtgcaatacaactggaaaatgaactccgaaatctccggattggcgatcgatcggttcatgactattgtcaaaaactgaagtcactctctgatacgctcgccaatgtggattcccctgtctcagatcgcgccttagtgatgcaccttctcaatggacttagctccaaatttgataacatcattaatgttattaaacatcgttccccaccttgctcttttggcgatgccagatcgatgctcattgaagaagaatcgaggcttaaaaccaagctgcaatctcttcctaacaatgatgacaacgcttcttcaccacatgttcttcttgcctcatctcaacaacaagactatcgctcagtccccacaaaccaacaattccagtacggtcgtggcggaggacgaaacaattgaaacaatcgtggaggaggtcgaggaaacagaggtcgtggcggtggcggcaaccctaactacaacggcggtaattggagctctggaaatcaaacatcgaattggcccaaccaacctcaatggccaagttatccacaatggcccaatatgccaatttggcccactacaccacctcctccacaattctatgggcaaccaagatttcacattggctctcaaccaccaacgctgccacaacgcgcacaagggattctcggtcacgcacctccatcaaacgggtctgccttcctcacctcggcccaaccaatcacctctccagcaaacacagacataattcccactacgctcgcaaatgcattcaacacgatgactttctcggatcctaatgatgttggatggtacatggactccgcagctacagctcacctcacggctcagccaggtacactctcttccatcacctcatcctctaattcttctcttcctctcgtcactgtcggtaacggttccacaattcctgtcacttcttatggtcaaacaacaattccatctagttctcgtccccttcacctcaataatgttcttatttgtcctcaaattctaaaaaatctaatttctgttcgtcaatttaccaatgataatctctgctctgttgaatttgatctgtttggttttcttgttaaggatcttcgtacccgagcacctctaatccgatgtgatagccaaggccctttgtactctgtcaacactccctctcatcaagcgcttctcacctcatcatctgcctcaacttggcatcgccgcttaggccatcccaacaactctgttttacgcattttaatttcttctggtttatttgattgttccaaaaacgatatttcttctttatgtcatgcttgccaaattggaaaacatattcgtcaacctttttattcttctactaatacagtttcttctccttttgaaataattcactccgatatttggacttctccggtgacaagcgtgagtggtataaaatactacgttatttttctagatcaattctctcatttcatttggatttatcctcttcgttacaaaagtgaggttttcaaaaaattcttacatttttttaattttgttaaaactcaatttcaaacccccatcaaagcacttcagtgcgataatggcggagaatttaacaatcgtcagattctagattttttctcttctaatggtattcaatctcggttttcttgtccttacacctcgcaacagaatggacgtgccgaacgaacacttcgcacaatcaataaccttgttcgtgttcttctttttcaagcaaacatgccaaccacatattgggttgaagctcttcacatggctgctcatctttttaatattcttccttctagtgccattggtaatcaaattcctttcactcgcttatttcaaaaacctgtttcttacgatcacctctgcgtctttggttgcttatgctaccccaaccttcttccaaccactgctcacaaactctcaccacgttctaccaaatgcgtctttctcggctatccatctaactacgtgggtatcgttgtcttgaactctcctctcgtcgcataatcatttctcgtcatgtagtttttgatgagacaatttttcccttctctacaccaaattcccactcggctagtttggatactcctctcacttcttcttatccaccattaacgctgctacctaacaatctccaatccatcactcaatctcctcttccagcaccgatttctactacaacacctaacactactcttccctcctctgtttcaccaacgacatcatcctctctaccatcttcttccgctgctccacccgaagcaacaacttcttctctccccaccgtcattgctccaaacatttcctcttcactttcttctaataccacaaccaccgcaactgctcctcctaataacatccaaactagaagtaaaagcggtatctctaaaccgaaacaaatcttgtctctacatactgatgtcatttcccctcttccattatctcatgttcaagcattgaaagatcctaattggaatccagcaatgcaagatgaatatgaatctcaaatgaaaagtggcacatgggacttagttcctcgaccaccaaacactaacgttgtgcgttcaatgtggttgtttagacataagtttaatgcagatggaactctctctcgttacaaagctcgtctcgtcgccaatggtaaatcacaacaaatcggtgttgactgtgacgaaacattcagccctgtcatcaaaccagttacagtccggtccgtccttcatctcgctcttgcacgagattggccaatccatcaattagacgtcaagaatgcttttttacacggtgatcttcacgaaacagtttatatgcaccaaccaccgggattcacagacccgacacgaccacatcatgtttgccatctcaagaaatcactctacgggctcaaacaagctcctcgagcttggtttcaaagattctcacaatacgcaacaaaggccggttttactaataccaagagtgatacctctctgttcgtctaccatcgaggctctgatcttacctaccttcttctctacgtcgatgatatcttactcacagcttcatcaccaactcttctcaggtcaattctatcctctcttacatctgaattctccatgactgatatgggtttacttcactattttcttggaatttttgttcatagggacaacaatggcatgatgcttcaacaacgcaactacgcagctgatattctacatcgagcaaatatttccaattgcaatccatgtgctacacccgttgacacagccgccaaactcaacgctgacgtcggaaatcgtgtagcagatccaacactatatagaagccttgctggagctcttcaatacttaacaatcacaagacccgacattgcatacgctgtccaacaaatctgcttattcatgcatgatcctcgagagcctcacttcaacgctctcaaacggatccttcgctacattaaagggactatcgatcacgggctgcacctcaagaaatcctccacaacaaccttaaccgcttataccgacgcagattgggctggctgccccaacactcgccgatcaacttctgggttttgtgtttacctcggtgacaatctcatttcatggtcttcaaaacgacaagccactgtatctcgatcaagcgccgaagcagagtatagaggggtagcgaatgttgttgctgaaacatcatggatacgaaatcttctacttgaactacattgtccacttacaaaagccaccattgtttactgcgacaatatcagtgcagtttatctctccacaaatccaattcagcatcatcggaccaaacacgtcgagctagacatcctctttgtacgagaacgagtggcccttggtcaagtccgtgttctacatgttccatcatcaaaacagtacgctgatatcttcaccaaaggattacccgtcactttattcaacgatttcaaatccagtcttcacgttctacctcgacacgttctgactgcgggagggtattagaataggaatgcatatattcctttctgtattttaggaatcttctcattaagcctctaacggctacgttgtatattgctatgtatttaaaccccttgtgaatatgtcaaggaactcatcaattgagattatacctattctaataaaaagaaaagaaaaagacaagcaaatatgtctctagtttcctacatagacaagcggaataacaatctgcgataaaataaggtcatccaatctaagaaactctaattcatatgagtaaagaagcaagatgacgacagagatcttcgacctggataggcataaacatctcaaatagtataagcttattaggtttcatcacttccggtgttgcttcaaagagagacttccacaagtgaagaatgttagactttatctcttccctcacaaacccatttgcctctgaaaactccttggcagacctcaacttctcttctagcttcttcatctcttggttgtagtattcaaaactacacgatttcactacgttgttatttttgagaatcaaaacaatgctattcaatcctcctaatccaatgttaaatgctgtggacaagttttcatcagctcaacgttgattgagatgccatcataatgatacactccattcttgggcttgatatattttcatacacatattgaataacacgaaccagtcttcctaccacgggaccgtcatagtctttttcccctacaaaaacagaagagtaacatagaacgtaggttatcagataagaggaacattgcttcagccacaaagagcgagagcttaactccgggtcgtatagcctcttctttctgattctccttttccttgttgagattagtcctacaaacaaaaataataaattagtatttcactaagaaaagtaaacaagctctcaaagggaaaaatgaaagatcactaacccttaagtgtaaggagaatatctagaatgtggtaaccttttgttgttacggacaatacggtcagtcatagacattgattccatttgtttcgagatgattgagatgtttgaagaattcgtcgaggaggatggatccagatgcaaattttgttggcttcccaattcacatgcatgtaaaatagaaggaaacaatttagattcaacaaaggcaagtattaggggatttcaaatctatgaattaacatataaagataattttttcagaataaaaaaaccctagatcgtaacatttgagtaatcgatatctaagttttccaacgcatttgtttccatgaatttgaaacccatttgattaatcgatatcaaatccagattccttgaaaactaatttatgaacaaaaaaaagaaccatgcactcacctcattgttgtagacttgtagtgtatagacctaaaaacgtaccccaagattccttaccaatcctaagccaattattgttctctctaaaatggtatacgattataaggttcagaagtcttggttacaaagcttttccgggtttttttgaacttttttttttgagaatataacaacttctaatttgtatatatctctttaaaaaatctctatgtaaaacagtttaaaataaaataaataattcaaataatttttttaaactcacaccaaataaaagagaaattcggtcagaaaacttcaaacgaagtactagagccaacatttagtgtttatcctactatattatttaggaagtacattttaaatgtaactttaatttttgtaattaattttttattaattattatagttcacttctcatctttatatgattctatttttacggaaacataatatcatcattataaaaaaataattagagttttttcgcatatgccataatttgaatttttaaaagcgaatataactgttcaatacatgaaataatattataacgggtgaaaaatagatttaagaaaactttctactgagtaacgggacataaatttgaaatatttatattcaatttcatacatattatattgaaaatttataattttatatgctacaatagttaataacatattagatgtgattcaatttttaatacaagctggaaaatcctagaattgacgggtttagatcgatattaatataagatggtatactacatgtgaaactcttaaattaacaatcaaactacaagtgtataatcttaaacactaaacaatatagataatatcaacaaaacatatacaactcacagtttactatacatttaaaatcaaatcaaataatatcatatatttttaaatcatctttacaataaaagtttttagtttaactaaaatataagcatacctacggtatactgcagattaatctctagattataggacttattggatctaaagacgggtcatcaaagatttcctaaactgaaccaaaatatactgaatattcaaatatctatctgttaccaaattataaacaaataagtcaatttaatattttatatatgaaatcaattaaatcttaatcacataaaaattagcacaaaaaaaagtattcaacaattaaaaaattatcaaatctctgtgttatataagttttgatactatatttgaataaagtgtaatatacctttttaatttgtattgtttaactaatttaagctaactaatatatttgctaatcttatatttatcaaaaccgactatcgttttttatctctatagtatttttgcaagacttttttggtggatttggataaaaatgcattcgggtcatatggtacattcccctattaaataaatatggtgcactcctatgttattagctaaaatgtttagattataattcagagtcatatcattaataaaactaatattaataaaataaatgattttttggcaagacggatttggagggacgggtttttgaatcaacattaataaaaaagtaaaatataattaatccaccgtttcaatatgggttaaatctttaatttattattttttaagaccactaatattaaacatatcaaatcatcctaatttagaaaaaattatataaaaccaaaaatgttatgtggtatgtataatgttactatatataaaattaaactataaaatataaatgtattagagaatgatacaatttgcaaaaattttatatataaaaaataatttttaaattttaaaaattactactttaaaaaaaaatcatgggacgggtaaagaaattacagaacgtgttttattttggaattgagttatatggtggatgtatttgaatcaatatttataaaatttttaaatatgattaatatactgttttaataggggtcaaaactttagtttttttaacaattgtctcatgcatgcttaataacaattataaactgtaaaatataaatattttgtaaaaataaaatttgcaagttttaatatatattacttttaaaaataaatcgtcccgcggtataccgcgggttaaaatctagtatttgtagtaaaacacaattagaaaactaagtttagagttttcaaccctataacaaaatctttaaacaaatctctcaattaaacataaaattggcaaagacaaaaaatcaaaatatatttaagtttttttgggccgatatgaacccgttttgggcgaaaccctatgaatcctttagccctaaagacccggtttctcctaaagcttgtgtccgttgtttttgaggactacagcggattaattcacgggctttggtcataattgacatgcctatcaaatactacaaaataaccatcatttgatctttgcaaaaagtgaaattcatcatttaatatatttatatatcctaacaaattaggaatataagatccgggtgaagcacgggttatcaatctagttttaaaattaaatgattatgtattatatataaaagtttgtaaattttattattttataagatttaatattttatagtttagaattgttattaaggaagggtataccacataataatttaattttaaaactagatttcattttttatagtggacgttttcagttttgttatcaatggagatgttggcaaaatggattgctttcgttgcagttggactcagacttttcttccctaagcatttcccaggtgatgacatcattcttgttgtgccttgttgatttgtatctttgtattgttgtcaactttgtcatacaatcgctgaagatgtctcgaatcttaaaatgttagtgaaacatcgagcagagcaagaatctatggtttttgtttcttctgattatgttgcatacccatatactacctcaagctcggttctatatataaaagaatctcatttctcaactatatgtttgtcctactgtaagaaaaaagttctgaaatatgtttctctgtaaattgcttatggatttcgtttcgtatatgcagtcgtcgaatgtttgtcgttttggtattgcaaaaggggattgaacgacacgttgtttataagattctctgcgaacttacaacagaggtcaaaccaaactgaaccagcataaaattgttcatgggatcacggtggttaagctttaaccaaaaagatttcaggtctttattaaaccaaaatattaaaatcctggatttatttgttactaaaccaaactttgtgcacatcacaattgtggcgtaacgtaaacaaagatggaattcgaattttcatttacgaaatgggcgtcttttctttcatttttttttttcgtcgtcaacttaaactttttattaataaagtcaaggtacattgttccaagatattacataaccagattggttcgttcttgcacttttcgctagagaatctgctacatggttcgcgtttctagagatctttataaagctaaaagcatgtcgagcgttatttatctgcaggatgtctctgatatacgaagagactgtagtatgttcccatctttgtaagggatgtgcagcttcgttcatctctaatgctttgtaaagatccatgttgtcacctgcaaaagtaacacgtgaatatcccaggtttctgacttggagcaccgccattctaagtgcttctgcttcagtctcaagagaagagaccataagggagatagcagcagagccttgaagaaggagggcagcgtccttgttatagagtgcccaaccaatgccggcttgttgcgtaggtgaaagccaggagccatctgcaaaacaacagtaggcgtcagagctgtgaattgcctcttccatagtacatatttccttcgttggcagcttcacattattcgattgactacatggcttattctgatttaatttgcatgcctcattccacacagataaatcaacgagcgcttgactaatgacatcaggaacaaccattcttttgttttcaaaaatgagagcattcctcatcttccaaattcgccacccaaggaggaataaaagtttcagctcattggcatggtttctattaatcatgattaggtcctgcaaattatcggctagattgtgggcattaagaaattcacctgaaggagttgaaataggagtgaggtcccagatttccttcgtgagcttgcattgaaacaaaaggtgatttactgtttcatcttcttcgccacacagctgacagatggcatctacccgtaggcctcgtttcttcaaattatctgcaacaggcaagccattatgcaaggagcgccaccaaaaatgcttaagttttggagggacgtccacattccaaatgtacttaaaaagaaaatgagtgtgttggctgttcacagtagcgtcttgctcaattcctcttctacgaactgcataatagccagatttgacagagtagctaccatcttttgaataaatccaagttatactatcactgacccccactaaagatggtctaatagcctttattagatttctgtcttccaaagctattaccttatctatcaactcctcattccaccgagtggtacctggtatgaaaagatccttaaccagttttagtgaggtacgaacattttcctagcgtttaggggcacgcggtgggttcgatggaagccatttatcttgccatatattttttctctgcccattaccaactacccattttagtccatcagctagaagtgtattaccttgcattatgcttctccaagcatggctagattgccacttgacaccagcttccaacaaacttgagtggggataatatttagctttgtaaagccttgctagtagtgagtgaggttgttggagaagcctccagctttgtttggcaatcatagcaaggttaaagtcctttaagagcaggtccaatgaaaggctttaaagggctctagagcaaaagactcttcctataaaagcccaaaggaacgttcctaaattaagaggtttttgtgaagctaaagggacttgacgtgtcacagcctgattggtcgtgagtttgataaaacaatttttttttttccctttcccatctctttctcactgtctctcagctgctcttctctgtttttttttctgatctctctgaaatcaattgatcttcaacatttttatttccaaagagacccaatttaagattccaccattggacataaaaaatataaaaacccatcataatctctaaactatacaaattcttaaaatttattactataaaattttaaagagactctgtcaagggcttaccattgaacatgctctaagtctctgatgccaagtccacccatcttctttgtgtcattgattttgctccaagctacccaggaaattttattatgatgttgtgtgctggcccaccaaaacttgcgaatgactgaggtgatttccttgataagtttgatacacaacatgaaacatgacatacagtaagatgggagagcagtggcaacagctttgatgaggacttctttccctgcaggagagagaaaatgagaataccaactttggagcttctgtgaaactctgtggtgaaggtaagaaaaagcattatatttactcctgccaacaaattcaggtaaaccaaggtatcgtccaaaaccactaattttagtgactcccataatattagtaagatcatgtttttgttgacagttgagtcccttgccaaaagtaacggcagacttttggaaattaacttgctgacctgatgctgcatgttattggttaagaacttgcaggagggcagtacattcctccactgtagccttacagaacaggagggaatcatcagcgaatagcaagtgagatataggagggccgtttctgcttgccttaaatccatgcagtttaccttgatgaatattatgacggattaaggctgagagtctttcagaatataataaatacaagtacggagagatgggatcaccttgtctaatacctctctgtgggaggatgttgccaattggagaaccattgacaaggactgagtaagtgacagtggtgatacattccataatccacgcacaccatctttcagcaaaaccaagcttcttcataattgcttcaagaaaagaccattcaactttatcaaaggccttactaatatctaatttgaaagccatatatggttgtttaagattccgagtctgtaaggaatgaatcagctcatgtgctataagaacattatcaatgatcatccgacccggaatgaatgcagtttggttttctgagatgataaattggagccaaggttggagtctatcagccaagattttagagataagcttataggcaacattacacaagctaataggtctgtaatctttgacttctaatggattctcgacctttgggattaagcaaatatgagtgtgattgagttttgggtctaaggtacccgtattaaaaaagttttggacatactgaaacacacctttgcttaagaccgcccaatgatctttatagaatccagctccaagaccgtctggaccaggtgatttatctctattcatactgcatagggcatgagagagctcctcttctgtaaccggcttggtcaaatggttgttcatttcctctgtaactctaggctgaatagacgtcaatacctcttccatgttgttgctgccatgcgaagtgaaaagagtgctgaagtaagtctccacaaggttgtaaatttcatcctctttagtacaaacgttaccctgctcatctacaagggaagtgagacgattaaaattcctcctctgttttgttttcgcatggaagtaccgtgtatttttatctccagcttgaagccattgaactctactcttagttctccaatattcctcttccagccgatattccttaaccaactgatttttgagatcattgatatgagcatagtttattggaagagtctcataagccttatgcaacttactcttaagctcttgaattttcttctgggagttggtaatgtgcttcgacttccatcgggacagactaacacgacatttcttgagtgcaagatgaaagtttgtgttctgaatgtcttgacattgtgtagtccagactttgtgaatttcttgctttacagcaggatcaaatctccatctattatcataaaggaacaatttatatcctctccattttctgtttcctgtatccaacaaaaggcacctatgatcagagccaccccatgacatcaactgaacatatgctcttggaaagagatcttgccaatctgaagtagccactgctcggtcaatttttgatttgatttgatgtgataatgagatcgatggcccgtccacgtaaatttcctcctatcgtcttgatgtcatgaagacctgaagaattaagcatttgtcgaaaagtcttgaaagaagcctcagatcgagaagggccgcctgatttttcttcattagtcttgatgtcattaaagtcaccaagaaccagacgtggtttactttgatagagtcctgcttctgcccaaaaaatcattttcttccacaaggcatttcgctctttatattctggattaccatagatataagtaagacgaaaagcaggtgaaccggattccgatatatacatatcagtataatggagagtaggtgatgatagaaaatccagcttaacctcatcattccaaaaaactgccataccaccgctaagcccttccggattcacaacaaaatggtgggcatatccaagatcattacatagactttgtacatattcttgaccgttcttagtttctatgaggaacactacatcaggtttagaagactgccttatgtcttttaaatacggaattgtcagagggttcctcttaagtccctgacaattccagtgtaatatcttcattttggcgatggtggtttaggggttgccacctccccttgagtgagtattggatcttgcgtcctttggcaacttgttgcagcttgatcttcatcaaaaaggttatcccctttccttttgcgaatactatctgctgtgtttctaagagcatcaagctcttcttgaggttgcaactgtgtcggtcccatttcttctgagtgaagtgttggctgggtttgaatgggattctcttctccttcttgcatagattcatcattaccagcagtcaataaattagctgctctggtgcgaattgtaagagtctcagatgcttcaccagtttctctaacaactataggaatagggccagcaacatgtgttgaggaactagaaccttcctgcataggttcgtcatccccttgattaatgccttgcatcggttctatagcttgtctagttgcttcaacgttcaactggagcacaatgctttgatggttacaagctaattcatcatgcagcaatgacccacatctaaagcagaatttcttcagtttagcgaaaacaaacctaaccatgactgggactgtggcaggttcgaattcaacagatcgtactaagattcaacgatcggagatgttcattgtaacatgagcccagacttcaccttcagcatccgcagtggcttctataattttggtttcatcaatatgccccagaacccctgctgtctctctaataactgggtctgtcctaaaatcttcaggaatatgcagaattttaacccaaaaggagatttgggagagaaaatttgacaaggtacgattggtccatcgatcaacagccaccatccagaaattatggtgccaagggccattttctaggacagacatgagatggtgttcagctttaaagaagaattgaacagtaccgtcatcattaattctacttgtaacccttccatccaatctccaagctttaggcaaagcacctttaagtcctgctggtttctgatgttgagggtttagacctttgacaattaggctgagacgattatctatatcacgcgagcgcctcgcttcagctgacatcttcagaggagctctctcagatcctagatctaaattttgaagcgcttgccataattctttatccatggattcagagaagacaacaacagtcaaagagaacaacacgaacggaccggcagagacaccggagagtaaaatccgcactaggacgacaaagagatcaccagaaaattgaggcggtggaagtcggtggaggatcactgtagaatcgcccagaaggaagagagagaaaaggttttccgcggtcttttctttcattttgaattctgaaatttctatataacagaaataaaattagaattatagcaaaggaaataaaaaagccgtttaaagaagaaaagcgtctactacaagtttctctctaatatctcttgtatattttaagaaccccaaattctcattttcgaatagtctgccgaagagtaacggtggttttgcggcgggtcaccggcgatggtgatctaggaaggccgttctctgatttcggctaggttaatccattctaaggttagttataagcggtctcccaaattccgatgaatctgtttctgatgtgtgtttctctgttacttgattcgattacaattacttttattctgttaatcttcttgaattttatgagtcttgttcgagtgattatgtggttttacgctttcaatactgatataggaaaagagaaaggagtaatgaacacgtgtactgtggagattagaagttggatcaatggctgagattgtttggatgctaacagaagagaaaagaagcgttaaaaggaaacgaagaggaaaaataatcattcatgaaaaattgtgttgagttgttatcttcttcttcttcatttgttctctgtttctctgagagttctattttgaattatcatagctatttcttcattgtgatagagctgtttctacttctaagctttatcacatgagattttgattctcgttttatgaacgacgattcaatgtgtgtttgtgattgggttaattgagaaattgtggtttaactgtatcaaaggtatcagagccatctctttcctcggaatcaatggcaggaactagatcacgatttgaacaaaggattgcggaacaaaatctagagatggacaagatggtggctaaactgttggacgcgattcgactaatctccgatcgggtgagtattgcatcatcgagtggtcatccacaacatcaacgatcatatcaggcgatttcagctattcatgacgctatgtatccgtcatcgaaagtggtttgtggtcacaaatctggtatggattcgaattactccgctgttactcgtttatcgaaactagattttcatagatttagtggagatcgagtaagagaatggttgtttaagctggaacagttcttctctcttgattttacaccgaaggagttgaaagtacgagtcgcatcgagtcattttgatgtagttgcaaagaagtggcaccaatcgttgttggacactgattttggggttaaattgttgagtaattggaaacgtataagcttgtgttgcaggaacgttttgctgaagttttaaatgatccaattgttgagttgaatcaattgcaggaaacagatggaattgacgagtatcatgctcgttttgagttgattagctctagagtgaacttatctgaagagtccttggttaatgcatatttgaaaggattgcagttggatactcaaataaatgttagaatgtttcagcctcattcaatccaccaatgtttgatgctagggaggggatatgagaaggctcatcccaagaagaacagtctaaacaattgttgtgttgctaaatggagtgaaaataacagtcagtctaaagggattttatcatctaaaccagagcatgttcataacacagttcttcttactagcatggagagacctaaggatcctacaacacaacctcacaaagtcttgtccattgaagataggagtaagaataatcaaaaactttgttactttggtgatgagaagtacaaagaaacacggtttgaagctgaagaagatagtgggaaaatggaagaagtacatatggagaaggttgaattggagaaaacaggcatagtagctcatatttcagttaatgcaatttcaggagtttctgattaccgcacgatgagggtgaaaggtttatatgagaagcaagtattgtctatactcattgacccggattctacacacagtttcatggattccaaagtagctgagaagttgaaatgtgttttaaaacctgcaagtatggctcaagtttcagtagctgatgggagattgttgggacttaatgctaaaatagataagttccaatgggaattaagaggtacacaacttcaggctgatcttatggtaattaccttgagagggtgtgatatggtattaggtgctcaatggttggagacattggggccaataacttgtgattttaagaagtcggtgatgcaatttcacataggacagaaaaaggttcctcttcagggtattaggcaaggctccgtcagagatgtgaaagcaattaagcttaataagctgagcgaggatcaacttcaactttccatgatgtctgttcctgaagttcctactgaggaacatcactctagctaagcagattttgaaggggagcagttggtggaaagttgcttgcagcaacatgtagcgatttgtgccacaaaatcgattgaaatcttggcattgattgatgcaagttaagaactgaaattatacaaggttgttggttcttcaaaacgacaaatcacaggtttggttttggaaatggctgattggtgtgtgcagtcaactattgtgaagcatgaacattgtttagatcaactatttgataattggcctcctatggtacaaaaaaagataaagaaggaaaaggttttgaagagttggaagtttaagttcaaacctataaaggagaacataaagcaacggtataatcaagttttctgtgtctcggattcttgcattgacatgttgactgttcatcatgaggaaatgctacatgatcacattagagaggtgtttaaaagctggagtagaagattgccattgtgtgttctgtttagacgtaactcacaggagattctaagaggtaacaacttggaacggaagatgcaaaaactgaagtgtcccaaatcctggaagtttaagtttaaatattgggacttgaggggatatgaacagaatcaacgtcgtcaatacatggttccactgttagttctgttgcatatgctactcatttcttggttggaatcgatgtggataagaaacagtcgcgttgaacttcgatcgaaccgactatgggatccttgggggtttctagttgaagatgaaacagagattacttggagttcatgtatgattggttgcaacaatatcttcttttcgaagttcaaccatgtgggcatggttgtttggggcggaaggatttgatataggaaaagagaaaggagtaatgaacacgtgtactgtggagattagaagttggatcaatggctgagattgtttggatgctaacagaagagaaaagaagcgttaaaaggaagcgaagaggaaaaataatcattcatgaaaaattgtgttgagttgttatcttcttcttcttcatttattctctgtttctctgagagttctattttgaattc

SEQ ID NO: 1171 - DNA, 81513 bp, Arabidopsis thaliana
gactctgttttaaacacttacttatctttgttaaggctctgttttaaacacttatttatctttgttaagggtctgttttaaggagcttattgatgtataagactatgttttaaaaatgttatggatgtaactatatttaaattacatttctttgattcaaaatataattatacaaatttataaaaataaaataagaattcagttaaaactaacgcagcggtgacgaaacgaacatagacacttgcggcagcgacagcggcatgaaaacgaacatgcacacaagttgcgtcagcggcagcggtaatggctgcagtagtggcgacgaaacgaacaataatctgcagtagagtttgccgccgccgctaccgtctgcggtggtgaaacgaacagactaatatataaaaacatatactaagcaaaaaacaaacttttggatacaactacattagatttctttacttccgtgaaacatgagccaagcaaattctgggaaaaaaaaaaatattaacagttaggccatgttcgttttcctacaacatacattgtttgtttgtctgtcagtggattcagcgaccagttacagcgacaatcgttaataattgtcgttgtgttgttcgtttgactgtcgctctagacagtcgctatatgtttaaaaaatttaattattttttgtgctaatttatattttaaaataaaattgtaatttatatatatatctgaaaaaatataaattaatatatttatttactttagttttatcaaatttaatttgactacaattaatttacgttatttgaatttaatttattttaatttaatttaataagaattagtttaatttaactagaactcaaacccatcgtgatatcgcaaagaaaaatattataaatttgtttatatgataatttctttaaaacaaatataactcaaaatgatgcatattataaatttttgtagttatagaaaagtatatatataactaaccggaaaaaaataaaagtaaatattttgacagaaaattacaatatatgaagttgcaataaaagacacaagcgagaaaaaataaccgtcaatattttgttacggaaagttgcgattaaaagacacaactgttaagaatataaaagacatttctttaagtttaatttaattgtttttaattgtttttaattgttttttaatttatatttttttatcgctaagttgttcgttttcatgtcgctagattcaacccaaatcttcttgaccaatattatccactcactggtatcatccaaaacacaatgacttccaaaacacaacgaccaatactcattcactcaacagaaaattcaaagaagaacccgtaagcacttttctatgtaacttcacaaaaggtaaacgccaaaataagtaattcgaacccacggcggggttagcccttcattatcaaggagacgactccaagtcaatcactgagtgcacatgaggattattaaatagccagaacttggatagctttatctaacaccaagagagaaagataagagagagggagtgagagtaagtaagaatgggttttgcagagaagaatctttatgattttcgttttcttttgttcatttccattattttgagctgttccatttcagcttctgcaactatcgcagaagcaaatgctcttctgaaatggaaatccactttcacgaactcatcaaaactgtcttcatgggtccatgatgcaaacaccaatactagcttttcctgcaccagttggtatggtgtttcttgcaactcacgagggagtatcgaagagttaaacctcactaacactggtatagaaggtactttccaagatttccccttcatttctctctcaaaccttgcttacgtagatcttagcatgaaccttttatctggaaccatccctcctcaattcggaaacctctctaaactcatctactttgacctctccacaaatcacttaaccggagaaatctctccttccttaggaaatctcaagaacttgacggtactttatcttcaccaaaactatctaactagtgtcattccctcggaactaggcaacatggaatccatgacagatttagcgctaagtcagaacaaacttaccggttcaattccttcttccttaggaaatctcaagaacttgatggttctttatctttacgagaactatctaactggtgtcattcccccggaactaggtaacatggaatccatgacagatttagctttaagtcagaacaaacttaccggttcaattccttctaccttaggaaatctcaagaacttgatggttctttatctttacgagaactatctaactggtgtcattcccccagaaataggcaacatggaatccatgacaaatttagcgctaagtcagaacaaacttactggttcaattccttcttccttaggtaatctcaagaacttgacgcttctttctcttttccagaactatctaactggtggcattcccccgaaactaggcaacatagaatccatgatcgatttagagttgagtaacaacaaacttaccggttcaattccttcttccttaggaaatctcaagaatttgactattctttatctttacgagaactatttaactggtgtcattcccccggaactaggcaacatggaatcgatgattgatttacagttgaataacaacaaacttaccggttcaattccttcttccttcggaaatctcaagaacttgacgtatctttatctttacctgaattatttaactggtgtcattccccaggagctaggcaacatggaatccatgatcaatttagatttaagtcagaacaaacttacaggttctgttcctgattcctttggtaactttaccaagctggaaagtttgtaccttcgtgttaaccacctctctggtgcgatcccgccaggagtagcaaactcttcacatctaactaccttgatacttgacaccaacaacttcactggtttctttcctgaaactgtttgcaaaggtaggaagcttcaaaatatctcattggattacaatcacctcgaaggtcctatcccgaaaagcttgagagattgcaagagcctgatcagagcaagatttctaggaaacaaattcactggcgatatttttgaagcttttgggatttacccagaccttaacttcattgatttcagccacaacaaattccacggtgagatttctagcaactgggagaagagtccaaagctaggtgccttgatcatgtcaaacaacaacatcacgggtgctatcccaacagagatttggaacatgacacaactagttgagctggatctatctaccaacaacctctttggtgaacttccagaagcaattggaaatctcacgaatttgtcgaggctacgacttaatgggaatcagttatctggaagagttcctgcaggtttaagtttcttaaccaatcttgagtctcttgacttatcctcaaacaatttcagctcagagatcccacaaacctttgactcctttttaaagcttcatgacatgaacctgagcagaaacaaattcgacggaagcattccccgactatcaaagctgactcagttaacgcaacttgatctcagccacaaccagctcgacggagaaatcccatcacaactaagctccctgcaaagcctcgacaagctcgacctctcacacaacaatctctcaggtctcattccaacaactttcgagggcatgatagcgctgacgaacgtcgatatatcaaacaataaactcgaaggtccgcttccagatactccaacgtttcgaaaagcaacagcagatgcattggaggaaaacataggcttatgcagtaatattcctaaacaaagattgaaaccatgccgtgagttgaagaaaccgaagaaaaatggcaaccttgttgtgtggatattagtgccaatcctaggagtactcgtcattctctctatatgtgcaaacacattcacctactgcattcggaaacgaaaactacaaaatggaagaaacacagatcctgaaacaggagagaatatgtccatattcagcgttgatggcaaattcaaataccaagatatcatcgaatcaacaaacgaattcgatccaacacacctcatcggaaccggaggatacagcaaagtctacagagcaaacctccaagatacaatcatagccgttaaacgactacatgacacaatagacgaagagatatcaaagccagttgtgaagcaagagttcctaaacgaggtaaaagcattaacagagatccgtcaccgcaacgttgtgaagctcttcggcttctgctcccaccgccgccacacatttctgatctacgagtacatggaaaaaggaagtttaaacaaactcttagccaacgacgaagaagctaagcgactcacttggaccaaaaggatcaacgtcgtgaaaggtgtggctcacgctttatcgtatatgcaccatgaccgaataacaccgatcgttcaccgtgatattagcagcggaaacatccttctcgataacgattacacagctaagatctccgattttggtacagcaaaacttctaaagacggattcatcaaactggtccgccgttgctggaacctacggctacgttgcaccaggtaaatctaaatccctaaatctgattttgagcttatgaaatttaaatcactaaattcgaaattgaacttgatttttcgcaacagagtttgcttacacgatgaaggtgacggagaaatgcgatgtgtatagcttcggggttttgatactcgaattgataattgggaaacatccgggagatttggtatcgagtttgtcttcgtctccaggagaagctctgtcgctaagaagcatttccgatgaacgtgtattagaaccacggggacaaaatagagagaagctcttgaagatggtggaaatggctttattgtgtttacaagcaaatccagaatctcggccaacgatgttgtcaatctccactacattttcttagaaactgaacttctccatcaatttctatgttatcattgtgtttatctatacagcaacagtaatctctgttggcttttgttctctgttcttgcttgtgtttgcaggaaggggtgtcgactctcgtttcagcttttgttgttgttgtttgggcttctcggcctgcttcagcttttgtatgtattgggctgcgcccttgttggtctttgggccttgtttgtttttatctttgcggcttgcgtgccatgttaggccttttggtcttgtaatgtgtttggttaatggaaatctatgaagttaaaaaaatgaaaaaaaaaaaaaaaaaaaaaaaactgttaaaagcatttttagataatggtcattgtgttactcctcacatatgaacattcaaataaagttttggatactgtctatctgtatatcgccagaattagtaagagatttcttatgcatagtaggagattaaaaaaaaaaatgcatagtaggagatttgtaaagaaagaaataagtttttttttgtataatgagttctaatggacatcacgtttgcaagtgataataaaaaaatcttacactcttgtactctgtaacgtgttaaaataatacaaaatggattataataacgaaatctaaacacttataatcttgcggatgattttgtgacaaccaatgaaaccgttaatgcgagattacgatagttttttatgaaatcatgatttgtgcataaagttaagcaaatgctaaataattcataaagtgtaagaaacacgtggcagaagaattaataattcgtttgggatatttttggtatatacggacaggccacgtcgtgtcctaaacctcttagcctttccctttataagtcaatcttgtgtcggcttcgactcccaacatacacaaaacactaaaagtagaagaaaaatggcgactcttaaggtttctgattctgttcctgctccttctgatgatgctgagcaattgagaaccgcttttgaaggtataatagtttcatgattcttcttgttacgttctctgtttttgttaccttcttgtttacatgatcagtatccactttttgtaaaagtgatgtgaatctgttggttttcgtttggtgggttattgtatgatcatttgttttgattgtttttcatgtggatcgatctttgttttggtccgatgatatgaatgttgtgtcggtagcgttttatgatcatttgtacgatgatgtagatcgagattgttccttcatggatcggatcagtgacaatgatctcctttctttgtgtgatctataacaatcttttgtgttagtgatgaagttttgattgtctgatcatgttgataatgacaatgattacattcacacgagatcttgattgagttgtgttttgattctcactgtcacagatctgtcttcttagtctagatctataatgtagttacgtgtaatacaacactaagatcttaagatttatattttgtgaatctgtttgaccggttctgttattatggatctgaagtgtgtgtgacttggatctgaagtatgtgactttgatggttatgtaaagtgaatctgattcgtgtttttcgcaggatggggtacgaacgaggacttgatcatatcaatcttggctcacagaagtgctgaacagaggaaagtcatcaggcaagcataccacgaaacctacggcgaagaccttctcaagactcttgacaaggagctctctaacgatttcgaggttcggttttcggacttttaagtatcgacttttaaacatcttgtgtgaagtcattgtattctaattggttttttggtcatggacagagagctatcttgttgtggactcttgaacccggtgagcgtgatgctttattggctaatgaagctacaaaaagatggacttcaagcaaccaagttcttatggaagttgcttgcacaaggacatcaacgcagctgcttcacgctaggcaagcttaccatgctcgctacaagaagtctcttgaagaggacgttgctcaccacactaccggtgacttcagaaagcttttggtttctcttgttacctcatacaggtacgaaggagatgaagtgaacatgacattggctaagcaagaagctaagctggtccatgagaaaatcaaggacaagcactacaatgatgaggatgttattagaatcttgtccacaagaagcaaagctcagatcaatgctacttttaaccgttaccaagatgatcatggcgaggaaattctcaagagtcttgaggaaggagatgatgatgacaagttccttgcacttttgaggtcaaccattcagtgcttgacaagaccagagctttactttgtcgatgttcttcgttcagcaatcaacaaaactggaactgatgaaggagcactcactagaattgtgaccacaagagctgagattgacttgaaggtcattggagaggagtaccagcgcaggaacagcattcctttggagaaagctattaccaaagacactcgtggagattacgagaagatgctcgtcgcacttctcggtgaagatgatgcttaatcaatcaatcctccacagagaaacataagctgctctacagcttctgttatctcttatctccctctctctctctttgatgagtttcaaatcgtttgattttgtttctacaaaaaccttgtttgtttctgttgtgtgttttgagttcctaaataatgcaaaagagagagacagagagaaccagtgtggtctcttaagttatatatatatgaagagcattggcctaaaacacagactaacaagtagttctggttttgacaaaagttgttgtcactacaaaaagggagaccaacaacaaaaaagttaagggcattgttttctctaaagccctatccgatcttgaaacacaaaataacaacaacaacattttttagttactaatcaaagtcacttcttcaagatggtcttggagaaaatcttcttgcagtaagggctcgagtgtagtttcccgtacctgtaaaccttcgccaccaatttagcacgaacaggtccctgcatcaaccccaaaagccatgtcaagttctgtttctaaaagcttataacatatgtattgatttggacttactttggttacagagagagcagtttggatcacatagttcgcataaggatcttgcagaagatattcaaagtttggaacacagaggagctcacggacgatctcagctcgactctctggatacttccttagacacttctcaatcacgtggctactaaacttctgagtagctaactcggcgtagtgcattctaaactgaaccagcaacttcactgcagaaacttgttgatctattaagtactgcaccacatagttcctgccaaatttcattaactataaggagagtttttcaaactataccaaatctttaagtctaagtggagactaaatttacccaaaaggatcctgagaaaggtgaagcgagtttcttgatatctcagcgacgagtctttcacgttgcagtccaacagagtttgaaatgcagcattgaagaacacagcatccgtgtcgatgaatagcaatctcagcacagtacttagtagcagcttctaacacaaactgacaccaaaattcacaacattaatcagatcttaagtaagaaacaaaaacaacagtctcagcacattactttgtagctgcttccaactcaaactaacaccaaatttcacaacattcacgaaagcttgagtatgaaacaaaagatgtaacctcattgtcattagggccaagggtttgcaagcaactctgtatcacatggttcccattcagatctttgacaagagcaagaaaccccggtttgagacctgacttcaccaatgcaatctgctgttttgttttcacagtttcaatcatcttctgcacaacccttgtcctgtttaaattcaaaaacacattatccacaaatcagaattcaaaaacatattatccacaaatcaaaaccagcaaatttctatgcttttggccaaaagttctcagccttttgtaatcagaagtaagcggatttagagggttttgcccaaaggtctcagctttttttttctctcttcctgaagcaagcagttttggtttgtccaaaaacagcaaaaagtaaaaataaaaattcattcttttctaccaaatgttgcattcttttagtgatagactgatagtgatggctacaaaactaatgcagagatttcaaatatttccataaacagaaaagatttcatcttccccaaaaaaacaagaaagatctcatcttaatcctcaaaagctgaaatgtctccatctctattgagctcgtggacttgttgactaaactaatgaatcaaatttactaaaagttgataaaaaaaaaggtgaagcttacccataagtgttaagacagattctgataagctcccttggatttgacgttaacacactcacaatcaacgtcctctgttcctcatcactcacatcaaacagcttctgaacaatgtaattcccaaaaggatccatggaaagttcaacgacatggtcaatgattgcaagtaatataaccttagcttcatgaaatgttccttcttcgaccagtttctgcaaaactctgcaaccaatctgatctttcgccattaagttcacagatccataaatctcaaccatggagacgagatcattattgctttttggactcatcttcccataagagccttgaccgattagtactgtatcttctagataagaagctccaagctttccagaaaccttctcgtgaaatggactcagcagagaactatcctcctctggataaaaacctctagaagcttccatggcggctagggtttgagaaaccctattatttccttcaaacatcaacgaacttatgagagcatcgttgcctctgagaaaaggaggacgctttatgggttcatggatctgatctaagagaaaatctctgtgattcttaagagctaacatctcttcaaatccgtttaggttaaaggaatcttgacggccaagtaatctcatctctcccggagatggagaaactccatgaaaattgttgttttgcagacgaacagaggaaaagttacgaaacccatcatgaatctgagaagctccggtgagattctggtcaaacccagaagacccatgaagagttctagccccaaactcactcgggtcgacccggaactgttcttcgggtttggtccagatactcatgtcacaagagatacccattttgtgaagctttttacacaaatccagagcttcaacactcttgtggtttttcagaaatgggtttgtgtcgagactcggtaaaaacccatcagaaccaagaggacgatgatcggaagctcctcggaagttgaagtctccattaaaacctccaaaacccatgaatctctctccgaacatgaaaacagagtaaaggttacaaacgaagaaggagagagaagagagagtaaagccaaggaaacaatacggagagaggaggagaggtttggtgatataacaagaaatggtttgtgagagagagagagagagagagaatgttgttgcgtgagtgtacgtacggaggctgtgtgtagtgtttgtctcttttgtcgttttttcgccattaatatcgtaacagagcctcaaacactgctttttgcagcctgccgaggaaatacttgaatttacacttttgcccctctttttattttggttctttttcatatattctctaaaatttcctctttaagaaaacttaaaccgaatctaaactaaaccaacaataaccaatttagcagaaccgagatatggggcaagactaaattaatctgccatcaaaaatagttgcaccaattggccaaaagttaattatgataatcttcaaacctcgactttctttttttacgattcaatctcttacgagaaacctaaattgagtttcttcccataaactaatttagcaacggcaagacatgtatatctaattgtatcgttcttgctaattaagactattataatcgcttatgtaagttttatgtgacttcaaataaacactacttaagttatatagagagtttgagagagcgtaaaccttatagaaggtttaaactaataaattataattacaaataaatggtatacatgaaaaaatatttagatatgaaaacaaaattattatggatgttataaaagattaaattaagaaagaagaatgaagaccatagagaataaaactcgaaataagagtttttttattgttttctctttctctactcttttttctctgttttctctgtaacttacaaatgaatgaaatgagctatatatagtagagcttacttagctaggaagtaaattacttagcgaaaaagtaatggataaacatcatccatatcttagagaagaagtaatggataaacatcatccatatcttaaggatgaagtaatggataaacatcattcatatcttagggaagaagtaatggataaacatcatctacatcttatggatagagatgagtgatggataatcacatccatacttatcaagtttataacactcccccttgagtatccatcacttttgatgagttacgtattgcctcgttaaaaaccttatcatggaaaaatccattgggataaaaaccatgacaagggaaaaagagtacagtgacgtgaactccccctcgaagggacttcacaggtttcgtagatgacgcattccaatgctttgaacatgatttttaaatgtagaagttggaagcgcctttgtgaatagatctgctgcattgtcacttgaacgaatgtattgcacctctacttccttgttcttctcgagttcttgagtgtaagagaagaatcgtggagggatatgcttcgttctgtcgctcttgatataaccttctttgatttgagcaacacatgcagcattatcttcatatattcttgttggctctcttttgatgactaatccacttgcttcttgaatatgattagtcatggatctaagccaaacacattctctagatgcttcatgaagagcaattatttttgcgtagtttgatgaagtggcgactatagtctgcttttgagaacgccacgagattgcagttcctccaatggtaaaaacatatccggtttgtgatctagacttatgagggtctgataaataccctgcatctgcaaaaccaactagaccaaactcgaggtttctaggataatataatccaaaatcaatagtaccttgaagataacgaaagatgtgttttatcccattccagtgccttcgtgtaggggatgaattgtaccttgcaagcaaattagtagcaaaagcaatatctggtctagtacaatttgcaagatacataagtccaccgataacactcatataaggtacttcgggacctagaaaatcttcgttatcctcagaaggtctaaatggatcattttcaacatttaaagatctattgaccataggagtacttaaaggattcgctttatccatattaaagcgctttaaaatcctttttgtataattggattgatgcacaaatataccatcttggaaatgctcaatttggagcccgagacagaattttgtctttccaagatctttcatttcgaactcttctttcatatgagttcgtgcatcatcaatctcctttggagttccaattatatttaggtcatcaacataaacatcaatgatcacgaatcccgaaggagattttttaatgaagacgcaagggcagatttcattattcacataccctttcttaagtagataatcgcttaaacgattataccacatgcgtccggattgtttcaatccgtaaagtgatcgctgtaatttgaccatatatatatctttagactttgatgagtctaatgcctcgggaacttttaatccttccgggattttcatatatatatcattatcaagagatccatataaataagctgtcactacatccataaggtacatatctaaattattagatgtcgaaagactcattaagtacctgaatgtaattgcatccatgaccggagaatatgtttcttcataatcaactcctggtctttgagagaaaccttgtgcaacaagtcgggctttatatcgtgtgatctcatctttttcatttctttttcgcacgaatacccacttgtatccaacaggttttacactctcagatgcagtgacaataggtccaaagacatttcttttattaagggagtgcaactcaacttgcatggcatttttccatttctcccaatccggccttttctggcactcggataatgtctttggatctggatcatcattctcttgatcgatctctttagataaagaaaaggagaatattccattatcatcatcaatatcatctctatcccatatgataccatcatgggcatagttaatggaaatctcatacttttctctatcgtcccgaggacttggttcttcttgaagaaccttttcattttcttctcccaatttctttttctttcggggatttttatcttttgagccaataggcctcccacgctttaattgaaccttaggttcattaattttgctcccatctaattccagctcactaggaattttaactcttgatggggcatttgcagcggggatatatgactttgtcacttttcttgtatcggtgaacgaatctggtaattgatttaccatattttgtaaatgtacaatcttttgtacttccagctcacgatgtttcgtggggggatcaagatattttaaagatggtgcgcaccattctatatctttatgcatatgcatttgatgaatttctccccctaaagctgggaattcatcttcattaaaatggcaatcggcaaaacatgccgtaaacaaatcaccagtttgtggttcaagataccttattatactcggtgatacataaccgacgtatattcgcaatctcctttgggaccccatttttgttctttgtgacggtgctataggcacatataccgcacatccaaaaatgcggagatgggataaatttggaacttgaccataagtcatttgtaaaggggaatattcattatctgcgcttggtctaatctgaaccaaagccgcagcatgcaatatagcatgaccccatatagaaattgggagttttgttctcaatattaacggtcttgcaatgagttgcaaccgtttaattaatgattcggccatgccattttgtgcatgaacatgagagaccggatgctctacatcgattcccatcgatacacaatagtcattaaaggcttgtgaagtaaattccccagcattatcaagcctgactttctttatggcataatcaagaaattgtgcctttaacctgattatttgggaaatgaatcttgcgaaagccgtgtttcgtgtagtcaaaagacatacatgtgaccatccagtagatgcgtcaattaataccataaaatatcgaaatggcccgcacggtgggtgaattggcccacatatatcaccatgaattctcgacaagaacaggtctttcattcccaattttgtttggcgatggccttattatgagttttccttgagaacatgctttacaagaaaactcaccagatttatatattttctggtttttcaatggatggccattagaattttgcacaatttttcgcatcatgactgaaccaggatgtccaagtctttcatgccatatcttaaatgtactagtaaactcacttgagtgtactgtaacatttgatgcgattatatttatttttgtgcaatataatccggaggataacattggcaattcttctaatatatattgcctctcggattttatgcaaagatattcaatgccatctttattcatagtctatatatgatatccattacttcggatatctttgaaacttatcaagtttctataagacttaggggaatataatgcatcatttaaaatgagttccccttggcattgtaaaattggcttcgccaaagcctaatattatctttgcatggccatttatattactcacacttctagcggagtcttttatttcgagagaggagaagtactttttatctctaaagatagtgtgcgtagaagcactgtccgccagacatatatcttcatcctcaatctcgtattttaacatttctggaataaaatatttattcattaaactttgacataggctacccatatgtcataatatataacattattccagaattacaaaagcatctataatgcttgtcatgcataacatgattatacatatggctataatatattacattgatttctcgttgtcatgatcaatcgagaaaatctgccatatcaagatgattatcatcatcttggcctttaaaggaaggttccaactcatcacagatgagattagtttcaacatccctttcttttgccttttatgaggtttgatacatatcggctaaatattttggtatatgacacgtctggtacaagtgtcttttcataccgcatctgtggcaagtgctttcaacatgccttttcttaacacgaccaacattatttttgttggttttttccgtgttgaaataattgggatggaaacttcttccttttcctcggccacgaccacgacctctcccacgaccacgaccacgacctcgacaaggtccgggtcctcgccaattatcatcaccggatgtaacaacattcacttctaaaagtggagttgatccaggtgggcgagataaatgattcatcatcacaagttcattattttgttcagcaaccaaaaggacttgcatcaactcggaataacgagtgtatcctttggcccggtattgctgttgaaggattacatttccaggatgaaaggtggagagcattttttcaatcatatcataatcgctcactttttcaccacataatatcatcctggaggtgattccgaacatggcggaattataatcactaacacttttgtaatccaaaaaccggagatttagccattcatgtctggcttttggcaaaatcacatatttttgatgatcgaaacgatctttaagtgattgtcatagatccacaggatcttttctcgtgatgtattcatttttcaaattgtcgtggagatggtggcgtagaaataccatggctttagctttactctcatctgatgtcgtttcagatgcatctatggtgctaagaagcccatttgatctaagatgcatcttaatatctgattcccatgacatataatttttaccagatacatcaagggcaacgacatcgagcttagctagatttgacatgattatctttagaaataaataatcattcaattaatgagccatttatggcatttcgaagaggcatagcctaccattcgattaaggaggaggtataacctcatactccgaaaatatcaagcatataatttcttataaatgaattaaaatgaatttaaaataatttaaatgttacctcaaaagatgcttgatcaaatagacgattggttggttagacaacacctggagaaacgatcgtgctgataacgtgttataaaagattaaattaagaaagaagaatgaagagtagagagaataaaactcgaaacaagagttttcttattgctttctctttctctactcttttctctctgttttttctgtaacttacaaatgaatgaaatgagctatatatagtaagtaaattacttagcaaaaaagtaatggataaacatcatccatatcttagagaagaactaatggataaacatcatccatatctgagggatgaagtaatggataaacatcatccatatcttatggatagagatgagtgatggataatcacatccatacttatccagtttataacaatggacattttattgacctttatttggacatgatcatttttggtcataactattatattgttctattgtctatgtggactaatcaattcatagtccactaaaaaaaatcttgccaaaataaaaatagaagttcactaagaaaataaatatattttttcgttagatatagaaatgagttttttttaaccatttggtaaagtcaagttagtctctcaccaattagttattagtgtattttaaaacaaaaatgaccttgtcagcaaaataagtgtacaacagacgtgtacggactagttagaaacagtaacgagttagctacaattgttaatcaatataaaaatcatatttatttttccactttcttttttgttttcatattatctatatttttacttttattcattgaactataatttatttatttttgtctttaaatcatccattttccaaaaaaaattaatttaaattataattatttatttttacttcgaatagtgttgttaaaatcaattgcagattagtattacaatgtacatatatatatatatatatatatataataataattttgcttaagtgtacatacacattaaaaatattatatatgtgtaaaatctattttaaacttattatgtaagtgtttaatgaagattcatgtatttagtactattcatgaatgccaatgtatagaagaagaagaagaataaaaattttaggtaagtaaagaatgatagtgtaaaatttaaatgttaaagaatcgattactatattttatagcttgtgcatgtttattctcatatagttgactatatactcttgcaatatttaaatatgcatatatcacgtatataaatactttaatataattttgtgttggttatgagtcatatacatattcaaatcaagtgagacttatcttcatcttggagggtaattgttcaaaccaaacaatttaacaaaaactcttcagatcacacaacaatattttgttctgatatcatatacatattttgaatttctgaaagatatattatgaaatgatagtaaaattaaccaagtttaaccatagtggtggtccaagtgtaaacatgtttgtattattttgtccaatccgttaaggatggtgtgaatatagtgtacattatgaaaaatttggcttatgaaactaacttggttcaagggtgagaacgcaacaataaccatattggaagctccatttgtggaggaaaacattgagaaagtagatgtgaaagtagatgagaaagaataagtagaggacaataacgatgataaagagaaagaggatgaggacgatgaagaggattaagaagagaataatgaaaatgatgatggaaaatgattagttaagtaggagaataccatgaaacaacaagtagactaattatgttgttgaaaaatatgggatggaacatgacataaatattcgtgacacaattgattttgagaccaacatggaattcgggttttaatagaaacgtctacgtactaatgaacgtgtgcgtgatgtaattaacatcgattattttagaaagaatagtgacattcaaccatttgtgaatcatattgtgaatcataatcggaaggtaagatatgacttttgaaaatatgtatgtacactactaactatgtacttgatgaagtatgtaaatgtgaatgttttatgtacacgaatatagatggacatgtatgtctgtttgattatgtactattgtgaatgcggtgtacgtaatatttatagagtttgtatctttgcttttttgacttcaaaatatgctaatataaactaaatataccatatttatgtatataaagcaatagaacatcagataaacaaatgattattagaaatctatgaataatgacggcaaaattaggtgagttaatttttaaaaatgagtatttgttacttttgaaaaatattatgcacatacacatttaattatgtacatacatgtttgttggtgagttaaatttgttgagataaaattattaatacaataataaacaaatactcctaatgtagatatattctatgatggagatatattctacgatgctcctaatggagatacaactattattatttaatttttttgattctaattacactcacaacaaacaatgactctcatgtcgtactaagttatattgatgtctcatcaactcggatattgattacatcatagaagagtagagaaaatctacacaattaccatttactttatatctaccatgctgatttcattttgtgtatatcaaatattcaccgtgagatactttctcgtgtacatagttagtaatgtacgtacatgtttcaaaaatcatgtcttacttcctgcttatgactcacaaatagttgaatgtcgcagttatctccaaaataatcgataatttttcaataacatacatattaattagtatggatacatgtttctaataatcatttaaagtttcatgttagctccacattaagttgagtgaattttgtaatgtccctttgttgtaatgtaatattcgtcactacctttactaccgtttatagtcatcatcttcaccgtactcatcctcattctttttatgtttctcgtcatcagcatccactttctatacacctctgattgtcctttaattttgtttcctcatctactttctcattgttttcacctccgacacataattgttttatcagcaaggtcctccatcatgcacacgttattcacactttccttaacgggttgaacagaatgtcacaaacatatttacatttagatccctactatgaataaaacaatgtttcaagcttagaaatctgttcatataagcctcacaaaaatacatgaatcacaaaccaacctctagagtaaaagctttgtgcttgaggagagataacttaaaagaggttgatgttgaggagcatccaatgagtccttcttcacagaagagctacaagctaccaaataaagtttaaaactcattattttctctcaacaaaatcagaaatcaaatcatgaattataagaaaattagatacatatatttaaagcagaacccttaggttccatagcatattctttggctacctgccttaaagaaaaaacataagacaatggaagaaatctatacttatgttcattgacatgaaatttttttggaaacatacgtttgcagcaatgtttgatattgtaggatgtgagctcaaacccaaataatcattcacagagaacaaaagcagcttcttgaatctcccttttctacactcagcgaatactccactaaaaatctcttctcctatcaacgtgaaactgatacaacataaaaaacaagtattttgcttaatcaattcagcttcttcactaaacccaaattataaccatcaattacactttgcataaagccataattcattgtctaaagtatgaaaacgaaatcgtatttgagttcaaaggaagaaaaaaacaccaaactttggattgtaaactagaggttagtgactagattgtaaacacgtgcaaggttcaagagcaacaccacaaaaccaaaatcaacacaaaacaagtaagaaacaagccagctaataatgaggcaactcgtcaaacaccttgagtgcatgaaaaggttcatcagaacataaaccactccactctggtcaaaagcttctaagaaataaattcaactcaaatcaatcaaaacttaacagaatctcccaaaagcttttaagaataagaagaatctggggataagagcgaaagtgacaaaaagtgatagaaattgataaaatccaatagatctagggatgtataatcataggaaaagagtgaagaggtgaaggagagctaaggagaagggaggaatgaaggaagaggaagaggtaaaggaagagagcgaagaggatggagaaaatagaaattagggtttgatttttattttgagcttttttcttatttttggctaaatattggcggcataagcaaaacatttggttaatattgtcggtcataagtaattttagttttgattccgtgattatagggcttagcgtttctgaaatgctttaatatagttaccaaaattcataccatctatgataacagttacggaaaatgcgctatcgtaatgtgctatcaatactcatatttcttgtagtgcaaactactcacttcgcggagcggagcttctcttcggtttggcacttatctcctgttgacccgcgttcttgttgacattgtgcatatgtggcaatcttctgtttggataactggaatataaaaagtctaaatataattcatatgttgggtatatcaataaatatttgaatacctatttggttctcagtttggtttggataaggttttcgttcttcaacaatggtttcagttattcaggtatagaaatctagtaccgtttggatattttcgaatatgttcgatttgactctgaggttttatgtatttttttcccaggtgtagttcaggcatgtttaaatgttttgtttttatgctcaaaatatactttaaacataaatatataaattatttagatgtttacatacatatatgcacacaaattattaatgtgtacgtacacatgtgtaaatgatattgttacttttgaaaaaatttcaatattaaaattaaaaataaaatatgattcaaagtaaaaatgaaaaatatatgaaaatgggtattaaacgatagaagaaaagaattttaattaaaaatacaaaaataatatggggatttgcaaaactatcatttttctactctctttttacaataatacccttttctattgtccatttttaaaaatacctcttttgttgaacaaaataaccaaattacccttatctaatgagaacatgtaatttgaaactgaaattttcccgccaaaataactgaaattacccttatttcccgcaaaaatcttttttttttttctcgccaaattgttttctccgtaacaaatattttcccggaaaaaaaaattcgaattttttttggcgggaaatttttaaaccattttaatacttcaccgttgataacccttttccgattgatcctctacaccttatacgctttctctcagaaccattatcttttttaacatatcatatcggtattcttttcttttattttctatcacactgatgaaaatatatatatttagagtctgactggtttaaacgcaacaggtgcggttgcggttgcgggagtttgcggaaacgggtggttgcggtttcaagcgttatcaagcgttttgaacgactggttgagcgtttgataatgggtgcgtctgcggaagtttatgactggtaaaccagcgggtgcgatagtaattaaataaaaataaccaaaataaatataatatattactagaaataaaaatacaatatattgtgataaattgataatattcgaaaaattgattttctgactaaacaaaaatacaatatatcatctcgtccagccagatgattttctaatcgagaaaacaaatagaaaaatgtattcaatcaaaaaaatcaaaagaatacaaaataaaataaaaacaacaaggccatgaaatagtcaaaaaattacactagctaatgaatgaataaaaggatagatgatacttatgtttgattcttgattttgatttttctcggatgccataattgagagaatagggttacaatatattgattagggttttctaataaaaataatatatataaaagattagattattttaattatagtgattaggatttggatggaagccacaattattttaattaattaaaaaaagattattatttgttaacctaaccgctaccgcccgcaaccgcaaacgcttgcgggaatgagcttttgaaaactggtgattcgagcggtctaaagcgatatctagcggtttctatgattggtgtcaatcgctaacaaccgctaccaaccgcaaacgctctatttgcggatggtagagggagaaccaatcaagcccttaatcaaaatttggataatgattatggcaattgtagacaaaatttgggtttgttaagaaagcggaaaataataatgggtttaagtggttgatgtatatagtagaaaataaattattatcacatatgttaaaaactgactagtcaaaaatgaaattgaataaaaataattcatttcttttcctcatatggaaaaaaaattcaactcataattactagtggaaagaaattctacttctttactctactataacttttcttctaatttcactaggcggaggtcatggcccatggataccgtgatgaataaactgttggaaaactacataagatggtacaaatttttgaatctaaagcatacaaatggtaaggctcttccatgtgattatagataccggtccttgtgcctattctaccaagttatattctcatgttgtcagtcgtatgtcaccgcatatattgaagaagagaaggaccaacaccggaaactataatacactggactctatcttttagtctggagagaaactgtaaacctcaaattcatgccaaaatgcctttgttatatatatatatatatccatgaatggttttggtttaaattttccctacttatgtcttagtccatgtttaatttatttatattctccaaatctataaagatggcttatgagaggttggagatatgggggaataacgttaatgaagagacaagggagcttaacaaaccggcatattgtggagaaaggaaagttttcttgaagaaactagtgactactacttaccagagaatagcaacggttgctttcttggccatctgctcgattttctcttctctaacttgcttccgatccaattcttactctctttatttttctatttttaagttaatttatgcactacatgaagccaaaagaagtgcaagagggaagcatgtcgaggggagaaactatgacgacttaaacgaataattttggtacaatgaatatgcaattatgcatcatagatcatattatagtagccttttcgaagatctcataagtcttaacttgatatcttttcctttgaatttgtaggtcaactgaatatttctaccttgggtggcctatgcaaactactcatactttgtttttaagttatcttaaaaattcatcaagtgaattggaaaaacacttatcaatgctcttactgatcatccccaatggatttgtctatagtcaagtatcaccagtcatctatttttactttctttttaatatttgattcccttttctggtcttgattatgctgattacttttacaatacaactcaagatgacactgaacatgacagacttgaggtattggtagaacttacatagatcctactatcattatatacaactgaatttgaattaatatgtttaaaagagtacttagctcaatagaacatttttttttattttttttgaatcttcaaatagtcttgagaacatttgaatggacacttattaatttatttcatggttcatatttttatatgaaggtgaaaaagtcaattttgttgagagaagtttgttcttacaactctttagaagttttgagataatgtggatattttatatcctaggtttgcaagtaccactaaatctaatttcatttaatttgaatatataatttttttactttgctaactcgtctaaatgaatctgtttagacattgtgatgcaacgtatattttcagtgcgctgcatcacattgatcatagttgcttgcaacgaagagggaggattgcgcactatctttcagttcgataacttttggagcgtcttcaccacagccgttggattagaatggcaaattcattaataagttcccttccacttctctaatttgttcaaatattttcaagctctctccaacatttatcttagttggaatgcattgcatagcatgtcattcaatgtcacatacttcccaaaagcagctatgaatgatatatgtgctatactcgttctattaccttacttgtataaccatttctcgactcttccggctattgtttgctacggaatttgaaatttgaaagcagctatcttttgttatgtatatcatttattaaaagtatatttgaatttaattatatttttaatacattttagttattttgatttattattttgctgatgtgtacaccttagatggagagagtactctataattatttatatgattttcaattcttctcacttcctacctaaactagtcaaatccaatgagtataaatttctctctctcttaactctcatattttgagaaagtgagagtttctcttccgatgatactccgattgtattatagcaaacattttgtcttggatctttatgacttgttgttgatttagtttttattttcttttgggaaaataagtgtccgacttgctcaaaatgtattatctcttctttctacatgttttaaagattaagtccaaaactatttgatagattttctttgttcttccgttagagcgataatttttttttaattaagagtaacatctcgtcgatatgtatggagaaagtcatgatttagttttttggcgaagctttttgtaatgatatttgtgtgagatggaaaatttaaaattattctgaaggatattcaagacggaatcaacgaatttgtctcggattagcaacatttaaggttgtacaaaaagtgtgtggtggtggatctaaacttccgccacggagctgcgcttgattgtggatttggcttatgccgttaatgtcatctctcctcattctcacatgtggacacgttgtgatctttgttctcttatccttatattttaaattgggtaggataagtgtgcttaatttttaatataatttgtaaatgtaggataagtgtgcttaatttttaatttggtttctacttcatcatctttaatatccactagggtttcattacactgaatgaaaatggtgggcaaaaaaaaaacccaatgagtcttggaaagggaaataaaatcaaaataatacttgaaatttgaatcatactgagagttgaaaacctaatttaactccttgtttcctctataataatgactttaaaagacttttgatattcattaaagacgattaaactggatttttaaacttattattaggcacaaagtgggctagacttcattctttatggatttttaagttatttccttaattaaaattgtttttttctgatatattattatctattttgttttacattgattttataaaataaatttgattattactttacatgatgttttctggtttttatagaaaatttaaatgtatttgactcttttgaccgagatctttttgcgttggttgaattagttttagttaatatttttgcgtaagaaaatagaaattagatacaatttctataatttttaatctatgtgaaaaaacttttaaacatcacttagatgagaaacaaagagagtatataacttaagttttgcccaaaaaaaaaaaaaagagtatatataacttgagttgattttcaatgaattatactagagctcttaaataaaatactaaattgaaacaaaagctatcaacaatgacttataaataacgaggtatgaaggcttagtcaaagtgatgattaaaacttttaaagaaaaataatttttattcagactcttttttatattattttatactcttggaaaggtaatcggatcataaatttggatttcatcgtaaatactatgtagtttacgccaataactttgatatatggaaatttaagtttcgcaatgttttatcacttgttatctaaacacaaaaagcgaataaaatattatgagtaaaataatattatttatttcatagaaaagtaaaccaatacttgtggttaattcttcgcgagtaaatttcccaacgaagaaaacatataacagtacaaacaataattgtgattaagctatgaattaaaaaaaatcaaaatattttccaaaataaaaacttcaacaaatttcttagaaaaatatataaagagagatatgatttttgagttaatgaatgagtaaaaaatagtgaagttataatgaaaatattgttttcataactgtttgaaaagtgataaatgtttcaataaatttttctatgactattagtgaaaaatatttaaatacaaaatcaatatgaaattttaatagccaatcagttaaatttacaaattttggataataggttttatacaagtggctgagcttccttatatattaaccaaaaatataattagtttaacgataatattatggtgatagagtcatctacattataacagtaaaataattataatgacagtgtccattgctatggtacacaaatattcatttcaacaattacttatagaggcgacataattctcactatagtaacttttcaataacaatgtcttcaaaaacaactacaaataataaatcttttcttttagtgatgtgacatactctttggtataatactttatattctataattatatttttattagcgatcttagagtgaccatttagataatatgttattaggtattttatttatggtaaatacaaataatataattttttcaatagcggcaaaagaattgaaatactgaataataaagagaaaagagagagatagatttattataccttattattattgaaatgatgtgaatgttgcgtatttacaacaatcaaatcgatagttttacagaaatagaaaagtaaattactatgcgtatccgtgcataggcttcacataaaatatcatttatgaacaatgtcaaatacgtgtatgcgtatatttttgacgttgtgagaatactcaccgattgacttttgtaagaaaatctgttttatttagtcaattgtttttttaaaaaatcaattaaacacattaataatttacttttctctggatttatgtcatttcgttcatttatcatatcaatcatttattatacttttatttatacttttctcacttctttcatatatcaaatcaattatttattttttaaaaatattatttttatttttttatgtacaaggtaataatgaacattgaaaattaaaataaagtatatacaatgcataaggtatatatggagagctaaaaaatgtgattcaactttgagtcttatgcatgatgattttaaagcgactattaatctttcgtttcatcactttgcctttcgactttttttttcttttaagtttttctttttccttctctctaaaagatattctctctttattactcgaggaattaggttcttaatggaaaaggcatatcgggcggagcagatcatgcagaacaggtggataatacatctcaacaataacctaagcttatcaaacggatctgacggtacataggcatggccacggttacggttacgatttattaaccaccggttacggttacaaattttctttaaccttaaccgctgaatatacggttaaaatggttacggttgaatacgattacgtttaaatacagttacggttattagataattataatactatatgaagcaaaatattatattttcttaaataatattttttaaaagaataattatataaactattttttacaacaaataaataaactacgaaatgattaaggtactatttaagtgaaataattatgcaattagaaaaatgaagtaaccaaaaaattcatatttattaattattacaatttttattaagctaagtaaaacaagtaataaaaaataaactttaatcactatctactgatctcgttgatgataaatcactatcaatatcttctaattcttcttcattctctcgaaggaattcttgttgtctatatccggctctggtccaatcgtcaagacatgcttgagcttcaagagaatctggactcattcttgatcgagtttcatctagtatttaacctcccatgctaaaagctcgctcgacggaaaatgtagaaacgggtgaagaaagaacgtcttttgcgatcatggctaaaattggatattgagattggtgactcttccaccaatgaatgatttgaaagttattacctgcatctgcatcactaaactcaaaattagtagataaatatttttcaagttcagcattattaccttgtgatggtcgttgccttctacgtcgacgcattctttctgcaagacttaacatagaagttgatgacatatcattttgtagagatgattcagttccttgtggtactaaatgctcatataatattcatcatacaaatttctatgtcttttcttgagttggaaataatgcttggaacttaatactatcagacaaatgtaatagatcataatatgcgacgaggtaatcaaataaaccatcaaatttagttcgaggatcaaaaatagatgcaagcaaattaagaggtggaatttctctatagtatttaaaccatttatctctcatactagttatgcatgatgacaaaacagtattattttcatgttcatgcatcacatcagcaatattaacacattcatataaaagtaaatgactagtatgataataaacactggataataaaaacgttgcatcattaaaacattttaataactttaaaagtgcattacaatcatcccaatgagtgggccataaagttaaagaactgcaattttgttgaataaaactacacaataaatatttataaccaatagaatcaacaagcatatcatatgttgaattccaacgagtaaaaacatctcaagaaaaccttttgggagatacattatgcattttacaaaactgaaaccattttttcattaattgtggatgaccccataaataattcaaagcagttttaattggagaaataagattattttgagaaaccaataaaccatcttgaacacataaatttaagacatgacaaatgcatcgaacatgaaaatattttcctcctaaaataagactacaattatttattaattcatcaatggaagcagtattagcggatgcattatcaaaagaaatagaaaatattttgtttgttaaattatattcttctaaatttatttttattaatttaaaaatattatcagacgtatgtctttcataaaaaactcgaaaagcaataattctcttttgaataatccaatcactatcaagccattgttagattatgggtgtgccgatgttagtgaataatccaatcactataatccaataattctcttttgaacatcttctatgggtgtgccgatgttagatcgaaatgaatcggaagacatttttaagcaaaattaataaaagtcaaaaaatatgatggaaaaaaatctctttaacgttggatgaagcaagaagaataatctttattttagaaatatttagcataatatttatagaaaaactgactactatatttatggaaaaaatctttgaaattttttaaatcaaacaaacattgatgacttggtcataaacggctacattacaaaacttgatcaagctcaagtctttgacgatctaaaattctgcagttttgccacgtaggatttgacttggtcataaattttaaagattgaaatgaactaacggattgccacaaaaaattttaaaggttgaaattttattttatttcaatccagctacattcaagtgctcgtgtgttttggcacataaatttcattttattttatcttcatttgatgatatcacactagctctctcgttttctcttcctagtcaatcaattatcggttttgaaaaaactttactacttctttgggttatgagaattgaggaatttttaaaatcatttatcattgttaataatgcaaaactaatgtccatctttttattaataatgcaacttggtcaggtttcatattttgtagttaaccaacagttttgatacggttacggttaattaacggttacagttagtatatatttttaaccgtaattaatgtaattttacggttaacggttacggttattaaccgttttatacggttacagtccggctacggtttaaaaacggtccggttacggtccgaaatacggttacgattagattttggtcatgcctaacggtacaaatacggatcaagcagcacgaacgcttgaaaatatgttttcaatattgaaaggaaatatgatggtgcagataaaatatttatagtataatatttttttttttagttaaaatgcgttacatagacaatactttaaaaattaattatattaaattaattttgcaatattggtttagcatattcttttcctagtattggtgagtagattggaaactgttgacgtcttgagagctcttgaaacatgtctttacagcatctatactttttgcgcctagggaaaaggagaccaacaagaggcaaataatcctttcttgggcgttgtggtggagagatgtcaaggccagggtgttgctccgatgaatgatagctgcttcagcgatggtgcaattggagaagagaatctccccacccctctagccaactccacaaaatacatgcacctttatcaagattgttcgctcgatgcaaaatggtccctcttctttgttgatttgagatgttgctcatatgttttattattatattgttttctgtgtttgttactcacttcacttttctgtcaaatcaataatttatcaatcacatcaattatgagtataatatttaatactcacattaattatctatttgattacacacattaatataatatttctttttgttttttctgtcattttgtttaatcagttctttcatctatcaaatgattatttttccaaaagacttaaagttggaaaacgtgattcaactattggttttctccacaatgatgctttattaactagtaatctttatttttgttacttttttctttctttttatctgttttggtttttatttattttttcctcgttatcgaaaactaaaaatagtatatattctagctatttttggtttcttggcaagttatagattcactttggatcaaaatatattataactatttttgtatgttttcttcatcacttgtaaaggctcgttacgaaaattgttttatcgaattgcatgcgaatagtcttagtgataactcttaagaagacttttactagtattaaatctcactccgatatattgtcattactatcgacattctttgaaatcaatttagatttatcgctttgaaaaggattgagcttttcctttaatccaaacctcagtcatgccagatcgacatattcaatattttctatttgttgagttgtgtagtaaactttcagtatgtaacagatgtatataatggagaatatgttatattctatgaaagtgtggttgatactattatttctatgaacttatggataatactattatattatatgaatgtatagttgatactttgctatgttatgaacgtaggattgtctaataatattctattaaagatattttgggtatttttggtcaatgttttgtttttcctttatatgtatttgttgtagttgcatctcttcatcatcaaagataaagagcggtaaagcgaaatatagggagaatttttagctcccaatttttttttaattttagtaaaattacacctaaatatgattaacttttaaactttctaattttcatcaaattttctcactataaatgtacgttaactaataaataaataattttttttattaaatataaaatggattaaattacatccctaataaatatatgtttgctttccttgtttaatatctcttagaccatttgtttagtgtattagtaaatttcttggtatttgcaattgataacaagaacaaaaagggcatgtccttttaaagccctatcagatcttgaaaaaaaaaaaaaacaaggttttgttactaatcaaagtcatttcttaaaacaggaaacaaaaaaaagttcaattctctaagatactgcattttgcagcctgctaggaaaacttcagaatttgcaatttgtccctttttatttattttggtcttgtatttattctcgtatttgtttgtaatacaacaacaactaaactgattccaaaacttaaccaataataaccaagctatgtaaaccgtaagtccgtaactagtcatgttttaattttaaatttgtttgtactggtgctttattagtattttatattaatatgatgttagacccaagggaaacaattaatcaccaatctagtaaagtataacctgaaatatgtatcactaaatttctgataatactttaattggccatggattacgaaactatattttgatttcatctataattaaatttacaacatatatatatatatatatatatatatatataacctcttttattctcttgcttttctttcacctatactaaagaaaactagttaaatcacatttttatcatattacatatatatttttctatttccttaatactgaaaattttgatttgattaagaagttggatgatcttttccaataaataagtattgataaatatatatatatatatatagtttgtatagaaaacataaagtaatgatgagttttggaaagaaaaataaaataaaaataatgcttaaatcttaatgagagttgaaaaggtgatttaactcatagttttatctataatgatgacttgaaaagactcttgatattcaactttcttcactattatggccattaataaaagattgaagtttttgaacttgttattaataggcatatatacatgacttagacatcattctcaatggatatctaaatgctctcattattttctcatcaaatttctttgagattcacatcctttgactatgttcatccaaaaccttgattgatattttcgtttgtatgttttgagttcccaaataatggaaaagagagagagatagagagaacgatggcggtcttttattttatgtatatatataaagagcattggcctaaaacacagactaaaaagtagttctagtttgacaaaagttgttgtcactacaaaaagagagaccgacaacaaaaacattaggctagtgttttttgctaatgccctatccgattttaatacacaaaatatcgtcagtttttagacactaatcaaagttacttcttcaagatggtcttggagaaaatcttcttgcaataaggattcgactgtagtttcccaaaccttttaactttctccactaatctagctctaactgctccctgtttcaacaaaccccaaaaccaatgtcaagttatgtttttggaagctcttggttgtataaattatgtatatttttggacttaccttggttacagagagagctgtttggatcacatagtttgcataaggatcctgcagaagctgttcaaagtttggataagagaggagctcgcggacgatctcagctcgactctctggatactttcttagacacttctcaatcacatggctactgaacttctgagtcgctagctcgatgcaatgtgttctaaatggaagcagcaagttcactgaagaaacttgttggtctattaagcactgcaccacatagttcctgcccatttccacaaaccataaagagagtttttcaaactataagaaactcgtttgagtataaagccgatatgaattttacccgaaaggatcttgcgaaaggcgaagtgagtctcttgatatctcagcgacgagtctctcatgttgcagtccaacagtgtttataaggctgcattgaagaacatagcatccgtattgatgagttgctaattgagcacaatattctgtagctgcttcaaccacaaactggcaccagatttcacaacattcatcagaacttacgtaagtaagaaacaaaaggaaggagattaatatgtgtgacagcttagttagtcgcagctactaacacaaaaactgacacgaaagatcacatcattcatcaaagcttaagttggaaacaaaagatggtgattgaaactaaaccttgttgtcattaggtacaaggaactccaagcaactctgtagcacatggtacccattagaatcgttgacaagaacaagaaaacccggttcgagagctgacttcaccaatgcaatctgttgttttgttttcactgttttaatcatcttctgtataacccttgtcctgttttaatcaataaacacattagccacatatcagaatgcaaaaactcattaaaatgtctcagttttggtttgtccaaaaacagcaaaaagtaaatttattctttctaccaaatgttgcctacttttagtgatagtgatgtgcagacatttcaaatatttccataaacagaaaagacaaaatttgaaatgtctttatcaataagaactcgtggggatttgtaatggttttgtttcagcttacccattagtgttgagacagattttgataagctcccttggttttgacgttaacacactcacaatcattgttctctgttcctcatcagacacaactaacagcttctggacgatgtaattccctaaaggatccatggaaagttcaacgacatggtcaatgatctcaaggaatataaccttagaatcaagaaccgttccttcttcgaccagtttctgcaaagctctgcacccaatctgatctctggccattaagttcacagatccgtaaatctcaaccatggagacgagatccagaggcaaaccaccattgatcttaggctcatctggataagaagctccagaaccttccatggcggctaggatttgagaaaccctaattccttcaaacatcaacgaacccttgaaagcatcgttgcctctgagaaacggagaacgctttatgggttcattgatgtggtctaagaggaagtctttgtgatctttaaaagccatcatctcttcaaatccgttggggttaaaggaatcttgtaggccaagcaatcctggagaaggagaaactccatgaaagttgttgttttgaacacgaacagaggagaagttacgaaacccatcatgaatctgagaagctccagtgagattctggtcaaacccaaaagactcatgaagagttttagccccaaaatcacccgggtcgacccggaatggttcttcgggtttggtccaaatactcatgtcacaagagatacccattttgttaagctttttacacaactccagagcttcaacactgttgttgtaatactgattcttcagaaatgggtttgtgtcgagactttgtaaaaacccacctgaaccaaaatcaggaagacgacgatgatcggaagcttgtccgaagttaaaaatctccatgcaaacctcgaaaccccattaatctctctccaaacattaggtcaaaagcagagtaaagtgtagaaaccgatttcacaaacgaagaagaagagagagtaaagccaaggaaacaatacagatataacagagccaagaaaggggtgtgagagagagaatgttgttgttctgtgtgtgtacgtaaggagagaccttgtcttttttgttttcagtcacatttcgccattaatgtggcaaacactgctttttgtagcctgcacccgaggaattattaggaagttacagatttgccccttttagtttttggtcatgtgttttcgtagtattaattcgtttgtttttatttaatattgttttgtgtattttttagttacttctgccatctatcatatcaatcatttatcatttcaaataattataagtattatttaatcaatcacatcaactatgaatctaatagaaaaattggaaaaaaggatacaataggaaaattagaataaaccgctaaagaactaaaccattttattttcagagcagacaaatagttcgtagttaatccgccgtatatattttttttttctatcagcactaatacaaattatagtttatgaattgtaaacaaaaagcagtctaaaccgcaaacagatttttcatcctaaaccgacactaccattcaaaccgtaatttattattcaaacatgtttcttttttaatagattacaaattagtattttacttttttcttatatttttcttcaattacttctttcatttatcatatcaattatttattattttaagaaaagattgagtgttaaaaattaatgatgactttagtgactattaaatcatttatttaaattgagttaagattttgtaaaactttttcaaactttataaatcataattccaccattaatattgaagcggaaatattaggaaaatacaattcgttcttttttatttttggtccgtgtttctttttatatttaattcgtttggtttttatattaacttttgttgcaccataaccctaaacctgacaactaaatagtaattggatttccatagtaagataactggaggaataccaagttatttttcaatttatttagtactgataaaaaattatttgattaaaaagttggatgatctttttcaattaatatgtatttttaggaaaatattaggtttaaattgaaaacagaaaaataataatgagtcttataagagaaataaaataaagataatgcttaaatttgattggaagtagaaaaggtgattaaacttatagttttttttttttttttttcatccaaaattaattagagttcaaaagagccaaattaatgcttaaattcctgaggaatgttgtttacataagtgatatgatgcggttggacacgaactttacgcgccaaattatccgctttgacatttgcactacgagaaattaaagataaaaaaaaacttgaaaattcttccttgtcactctgcaattcctccaaatacactgagaaggccggccattcggtttgggaagacaccatcttcaccagatccgaacagtctgtgagaaacacaacatcttgattgtcggcgccaatcatgcacttcatcgcccatagaagagcttccacttcggcatgtagtggggatagacttcgtctaaggtttgctgctcccattgttgacgtctctccaaattcctaataataatgattttaaaagacttttaatattcatttttgtcacttttattgctaatagtaaaatataattaatctgaaatttctgaacttgttattaggcacaaacttagatatcgtctccaatgaatttctaaatgatttttaaaaaaaaatcttgaaaagtattttgttaagagtaaatttaaaaaagagcatcaaacgggtgtgtccttcggaattactaattcgtttgtttttgatggttatatgtgtaacgatgataaacgctcgcaagtcacaaaacttccacgtaaagaatgaaggtttctttaatagattcaacactttagtatatatattaaatgttttgttatgtgtacttcttaatcgttttaacttcttaatcgtttctttcattcttcatatctattatttatttactaaaaaaaagtatgagtctttttaatcagtcacatcaattataaggaatttttttattttacattcattagaagtttgtactggtgctttactaaaggaaacaatctaagcataaactgaaatatgtattagaatattagcattactaaagttccgatagtactttctttgcatggcaaaggattacgaaactagattttgatttcatcgtaaaattaacaataagatttacaatatataatctctctttttccattctttcatctatcatgctatcacattaaatgttttttgttggtgtttaacacatcaatattttatattttgtacggttttattagttttagtctatattttcttatttttttcaacatatcacacttttaatttttattatattacagaaacaacaaatttatttgattacaaggttgaatgatccttttcaaaaatattttatttaaaaaaagtttaggtttacatagaaaacataaagtaataatgagtattggaaagaaaaataaaataaacataatgcttaaattttattggaagttgaaaaagtgatttaactcatagttttctccataataatgacttgacaaggagatttaactcatagttttctccgtaataatgacttcaaaaaacttttgatatttatttccggtgcttttttgcccattaatgaaagaactatattctcaagttttttaacttgttattagacacaaaatagacatgacttaaaagacatcatctctaatggatatttaaatgctctgattgtttaaaatctctttaactatcttgttaagtatatactatatattaaacttcttgatccgtcttaatgcttctaatgttctcattcctttcattttgaaacatttgttttctcatctattttctttgtgattcacgtcctttgattttgttcatccaaaatcttgtttgttattttcggttgtgtgttttgagttccaaaataatgcaaaagagagagacagatagtttttgtggtcgttgggaaaccctatttccttcaaacatcaacacatcattgccaaaagagacgcttccgagaaggaggtgagaagagagagagagatagagtgagagagagatttggtgatattataacagagccaagaaatggtttgagagagagagagaatgttgttatgtgagtgtgtacgtacgaagaccttcacgtccaaagtttatattttcgttttgaggaaatattgtaattaataatttgccctttttattctttggtcatgtgtttggtttacaagactaacggcaacagacttaaaaaaaatagagatatgttggaaattagtacgttttttgaacataactagatatctagtacggttactatttacaatatgaggaatagcccggaaccaccgtttcatctaatagacgagctgtgtaatacagataaagtggggtatgagttgttttgtggaaattacgtataatggtttcactcataaaatcatctcccactaaaagaataaagaggaggttttatggagagagagcgtctgtgagagaagtagagtataggtgaggtttttttatattttctttttctttatttataatatttcattccctccgattttaaaaattaaaatgctcgtttataaattttatttttctaaaattgatcatatacattaaaatctgtgttttcttctctatcatttgatatgcattttgtttaataattttaaattttatattattgagcactgtacagatatagaccactttacagatattattatgcatttcttttttttctctctttcaagttagatttttctgctcttcaatcaataatttagtcgatggttgattttgatctaaagattaataggactgctaattcagaattttgtggttggcttcgaatcatttacatactaactggctacgtttgggcttaaattttatgtgatgtttatcactgctagtaatatccttgtttatattcgattagtgttattttgtgtttaaccgcaaacctctcatctcacaaccacaaatcatgggaaataaataagcatacagtattaactagtctctaaaccaattgaataaaaagaataaaaaaactatattgtagaaataccagaaacaaaaaagaacacaaagacaaagagtaatttttgtatttatctgtacagttgtttattcatttatattaatttatatctatatatttaaaaagcttatatctgtacagtgatttatttctgtacaaatctgtacaccactgtgcagatacatctgtataatggtgtacagatattactatgcatttctttttttctctcacaaccactatacagatattactatggtgtgcagatattactatggtgtacagatattactatgcatttcctctcacaaccacaaatcatgggaaataaagaagcatacaatattatctagtctctaaaccaattgaataaagagaataagaaaactatattgttcaaataccattaaaaaaaaaaaaaaaaagacaaaaagtaatttttgtacttatttgtacaattgtttattcatctatattaatttgtatttatatatttatatggcctatagaatggtttatttctgtacagattgtatatgtacaccactgtacggatgtggtgtacagaaacatccgtacaatggtgtacagatacatccgtacagtgatgtacagatgtttatatctatacaaacatgttttttatgtataatggtttatgatataaaaattatcaaataaattgcatatcaaatgaaagagaaaaaaacatagatttttatgtatctgataaattttagaaaaacaaaattcattaacgagcattttaattatgagatattggaggaatatgagataataaataaaagaaaagaaaaaaattaaaaaaacctgatccacacaccctttctctcacgccttctctacggtttcagtggtataaaatcgtaaatattacttctagagagtggcaaaaaggggcttacaacaaatgcaacagtaacgatatgtactataaccccaatattaaatagtaactgtactacttttctaattatttttccaaaacgtactagttctcaaacaaactcaaaaaaataatgataactcgtgaattgattttttagaaaagaaaaaaaaaacagattatatatgcacggtttttttgtgagtaatttttagtcacttttttcacaacacataaataatgagtctaacaatttactactcacattagttatctgttaatgtttgtttagtaataaattaaacacattaatattaaaaaatattagtagttattttagtcacttctttcatctattatattagttatttattttctaactaagagctgaaaaacgtgattcaactattgggcttctcaagaataatgacttaagttaataatctttatttcgtcattttctattttcttataacaattttaggtttttcacatagattaaagacattaatattccctctttattaaaaagaactagatattaacccgcggtatatcgcgggtaagtttatattttagttaaataaattgttttttaaagatgatttataaatatgtaatattattttatttgattttcatagttgtatatgttttgttgatattgtttatattgtttagagtttaagattatacacttgtattttagttgttaattttaaagtttcctataatataccatcttgtattaatatcgatctaaacccgtcaattctaggatttttcagcttgtattaaaaattaaatcacatcatatacataaaaatatctaatatgttattaattattgtagtatataatattataaattttcaaaataatatatatgaaattgaatatgaatattcaaattatgaccccgttactcagtcgaaagttttctgtaatctatttttgacccgttataatatttgttcatgtattgaacagtttatattcgtttttaaaaatttaaatcatggcatataaaaaaattctaattttttatatataccgatgatatgatgatattatttgtttcgccaaaatagaatcgtataaagatgagaggtgaagtataatatttaataaaaatattaatatgataatttagatatcaaatctaatatgttgattttgattggttacttttttggaaattaataatgaatttcgtttttctaattaaattaattaaaatttagatatcaaatcttatatgttgattttgattggttactttttgaaatcaataatgtattttgtttttttaattaaattaaattaattaaattagtatttgattttttaatccttaaagagatgaattaatttaatctttaatattttacttctaatggcatacctatgtaattacttacaaaaaataaggttaatttttattatgtacttcccaaataatagtataggatgattttataaacttttcaccaagattaagaaaataataaatgattgtaattacaccatatatttacgttacaaatttggttatagacttataggattaacttttatttttttgttaagaaattcaactttagagctaaagttatcttcctcaaaactaaaattttagaattgagccaaaactagttcaagtaagttccattgatcttctatatatattgacatagatttataccatttacttaaaatcatttatggcttcttttagttttaatctaaatttaccatcttaaaataatgaaagaaaagttttgattgatttgaatagaagtccaccaaaagaacaagaagagatgatcctcatatgaatttcggtaatctcttcatttgtttatattttttaattataattttattctgtaatgttcaatatatattttgtaaaatacactatgttcttagtaatttgatggtgttattttatttttcaacatcttagagtaattctctctctgaattcgtattgtatacgttgaatttttaccagcatgtgtttgatagaacatacaattttggatttatttcctccacctattatatctatgagtatgtctttattttattgccaggaccatgcagttttggttcacttgataggagtattttatatattcaattaatatcatgtatgtattcttcttgtttctgaaaaaaacaaggaataagaaaaaacaggagaagtggagtactttatattagagtagtttgttcttaaatttatgtttaacattaatttggttttcgacttcctcattccaaatgactacaattcattattcattgtaaatgtaaattcattaattgattaattaatgttgaaaataaaaatatatttaatttaatataaaaatattttttttgattaattaatgttgaaaaaaaaattatttaatataaaatatattatatttttttcttttattttctgtcatttctttaagtcacctctttcatatattatatcaatcatttatttttcaaagaaagactcagaattgaaaaacgtgatacagctattggtcttctccataatgatgactttaatgacgagtaatcattattttagtcactttcttggtggtttttttttcctccttacaaaaaaactaaacatcttatggatactagttctttttggtttccttgcaagctataaattttctttcaattgatatataatgtgactatattttttggttgtcttattcatttggtaatgcctcgctgaaacttttttatcgaattgaatacaaaaattcttagtgatgacttacatatctaattcatcctccaaaatatgaattaatgcaagacaataaagtccaaacaagaattatagaggttaaatttatcgtaaatgttagagtaacgtctattttctaccgctttattttactaaaattgaagaaattcgagagctacaaggtctctcaatctttcgctctacctctctatctttgataattcagagaatcgactacattaaatacatataagttaaggttatattaattcctatgctcagaagattggtaaattaagtaactatgcataaaaacagagaaataaaatctcactcctctgccacaaacgattctgccgaaattacccctaccaaatcaaaatagcgtagcctctgataacagtttagagagtagacgcggctgcatttaatgcccaagatataaccgaagattttctcagccgaccttggaaacataaaatatattcatcatcatgtcggatatttatggggttgcgagatatcacttatacacgttggtgtatttattagcagtatactctcttctttgcatcaaagaaaaacctaccagactaaagaccttagtctccgacaaaattaatgcgaaaggagctaaacacccagagaattcgagattgaaaggtaaaagtaaaataatagagtcatacgtatattattgttaagttccgtaagagtgatttttactttagggtttcatattaattgaaataaacggatactaacaagtttgttactgcgaatattggcccagcaggtgtaaatggcgttcgtggtcagactagtacctggggaatggaaaaaagatgagaacggctatttcgaacacgtttcacatgccgatggatttgcgttaggagtccgattgcgagagcaggatgggtttgctaaagttgttatggcggtaaaggaaaagttagcgctgggtgccgaagacgatatcgagttaacatatcaatggccacagtggatgatgggtcctgactggagacgcgctaacccgatcgatatattggacgatgaggatatgacactgtttatggcaatacgggcagatctagatgaagtgcatccacgggtgaagataatacgaggagggaatagtcgaaacgttaatagttatcggagtaacctggatataggcggtctgactttggaagaaatttcggataagtactggaatagcgcggaaacaagagctgtttggggtacggcgttaacaagaatgttgctgcgaaacatatcaggtgaaaaccaaaacctatgttgttcgctatattgtagtaaatttatttgttaatatataaatcggataactttgcttatatcagggttgatttacagctcatatacttagtccgataacttatttatatgctaccatatatcttatccaggtgacggtgatggactggcagccatgggaaaggacaacagcatgggcgtacagaaaggcaatgaccaacgaaacgcttatggggggggggggttatcataagagacaacgtcgagattacagctgggacaagcggtgtgccactaacagacacagaaccagactccattccaatctctaaaggaaaagagaaagttactgatgatgatgagagagaacgggatcgtttgtttgagatgtggcgaactcaacaacaggaagaaatgtggcgagagatgtgtgcaacacaaatgaccctaggagcaactcaaattgacgcaacaaacgtgggcgacactggtaaaactgctagagctcttaacttcggaagtggcgacattttcaagggcaatccacgtgaggacttgcaactcactctagcaagagcagaaacacaagaagtttgcacccaagtggtggcactgtcatcaagcgattcaaccttcggaatgccaacctcgctttccacaagcgtatctttctctagcgatgacctaatggacgtcactgactcatccaacaacaacagctcatcgtgcataggttggttatctgatatttaatatgttatcgccgatagcataatactattaccattcgttcacggtttctgacttttgactataggtgacgaaacactgtcacacttttattctgaacttgatggcccactcattatggccccatagcccgtcggaataacagataagggaaaaggtatcatgatagacgaacgaataaccactaaggagataggtgcgggttcaaccaatacaagagtatcggaggtactgaggaatgagttaatggtgaaagatacaccggttccgacggtgttgtacgatagagatgccccaccatattttgacgacccagagaaagaaggtaaagcatacctatatagcaattttgataaataaaaaaaaaactaattagctctgtattatatatagctaatcatgttcgataagtaattgtttaactcgataactaaacatcttcgctaaaagtattaacagctatgttttctcttcctcgcagatgctcttcatcgtgccctaaaatatgctgataatgagggagatgatatctacattggtcggatttttaaaagcaaagaggactgcgccacgaaactagcaatccacgcaattcactggaagttccattttatctacgcgaaatcaggaccgaacatcgtggcggctgtctgcgtcagcgacacatgtccatggcgggtttatgctactaagctgccagatagcgactggttcgaggtcaggagcaccacccaaacccatacatgtagcgtggatgcaagaggagacttccacaagcaggcgtcgacggtagttattggcaagttgatgcgtactaagtatattggagtaggacgggggcctcgcgccaatgagctgagaagaatgctacgccaagagttcagcctcaacgtttcctattggaaagcatggcgggccaggaaattgccatggacaatgctttagggtctgtcatgggaagttacgccctaatccaaccttacttcaagtgtcttttagagacaaatccaaattctttggttgcaatggagaccgaaaaagataactctggcgtagagaggttcaaatacttgttctttgcgcttgatgcttgtgttcaagggtatgcttacatgaggaaagtcattgtaattgatggaactcacttacgaggacgatatggcggatgcttagttgcagctagtgcacaagacgcaaattttcaggtcttcccgattgcatttgggatagtaaacagcaaaaacgatgaggcgtggacctggttcatgactaagttgacagaagcgttaccagatgatccggagttggtgtttgcgtctgatagacacaactcaattacgccagcatccgtaaggtaacatggtaacacataatgtatctcatactaattaagttagtcactaatataccatgttttaaaaaaaatcacatcctgcctaaacattatgcaggtttaccccatgtcatctcatgctgcttgcgtcgtacatctgaaaaggaacattgaggcgtactttaaatatgaacaggtaggttctttggtatccagtgcagctagagcttatcgactaactgacttcaataggatatttgttgaagttcgagctaagcatggaccgtgcgcagactacttggaaggtatcgggttcgagcattggacaaggtcccattttgttgggaatatgtataacgtcatgacaagtaatattgtggagtcgctaaacaatatgttaactatggctcgagattacccgataatttctatattagagtcaattcgcaccacactcgtaacattgtttgcgcttaggaggcaagctgccagaagtgaggataatatcttatcgtctaaggtgcacgatatgctaatcgagaattacgagaaaggagctggatgtgttgtgctaaagattggggatgggctatatgaggttagagaaaagagaggctcaacatttgcagttaacctatgggagagaacgtgtacgtgcagggagttccagctcctaactatcccctgctcacatgccatatcggcggctatagaagaagggctccgcgtggacacgatggttggagtccatcacacgacccccggcttagattgtcataccaagcactcataataccggtacccgacacggaaacgctgactccttcaccaaatgatgtaggaggtggaaaattggctccaccgtatgtgcgccgaccgcctgggcgaccaaggaaacggagattattctcaaaaggagaattcaaggtaacatatttgacgtcaaagctaataaaatatttatatggtaatactattaggatgtaaccatcgcttccatttgtagcgagcatcaagaaaaagatgctcacaatgcaagttattgggacataacagggtaacctgcaatggaccagtaccggtatgtcaaatattttctgttaatgactatattatggaatatttatatgatctgttttgagtgtagggaccgtagaaactatggttcaaggacgttttttggcgcggaaagtgatggatgctgccaggattaataagaaatgccctggagatgtgtataaataaggaaccttaagcgatcagaaattttaaatgtgtatacgtacggctattgatcgctaaatgtaatattatcggaactcatccacttttcaagtagaaatgttaaattataatgtcatattttatctacccaaacagatattctgataaacaaagtagtagcccctaattcttagatattcgatgactcagtgctaaatagttatgatatgctgttaaacactaagttattaggaaaagaaattgacattggggttaaacataaggatgacctaatcttcaaatacatagtacgataaaacaataatagcatagttatcttctattggtgtttatagaaaaatctaataggaacgtacgaattgcaaaaagataaattttataatagcataatagactagttatccgctaatattgttaggaacgtacgaattacaaaaagataaattttataaaataggaacataaacatataatttgatagatcctgttaacctggttaatctctatattttctaacaagataaacagtataagcgatcaagatgctaatattgttacctcaatatgatgtttacgatgccaactaaataaatagttaggatatacctaacaagctgaacagttatccagattagtcgtgaaagcagaatggcttgtcagcgacgatccattacaaacgatatatatgctaatattgttaatttgataagattgttacgttgacagctaaattaatagttaccctaagcatggttcagctgccgttagttttaggatattcttttatccgctacgatcgttaccagataaaactcatgccatctccatctttccgtacacgcctaataaaatagagcagaatggcgtctcagcgactatccattacaaacgatatatatgctaatattgttaatttgataagattgttaagttgacagctaaattaatagttatccagtttagtcgggaaagcaaaatggcttgtcagtgactatccattacaaacgatatatatgctaatattattaatttgataagattgttacgttgagagttaaattaatagttaacctaagcatggcccaactgccgttagttttaggatattcttttatctactacgatcgttaccagataaaactcatgacaactctctctttccgtacactcctaataaaatattaaaaaaatcagactcagcaaccggtaatgaaataaatcgtgataatcttgctaatagtcagctaaactgatatccacttacggttgttagcaagataaaaaattgataaccagacaaacatttcagaaacttaattacaagacaaatgtagcgaaagcgtttggagattatcttagttaatctcaacaaagagtttaagatacatgattcgaggcgagaacataaacacacgcggataaaagagtattcgttaacacaacggttatctagtaaccgcgagctaggattaaagctgagactagcttcttcacttcactttgtaggccgccaacatcaaaatccacacattcaggtacacccccggtagcatgcgtgcgtatgagaaatatagagaatatgcctgtgtcaagaggcgaagttacctgtggaatgacagaagggctctatagtaaatggatctagaagaaattgactcataagaggattgaaggttgcttgtttgaaaagatatgccagcattactgcgagaggcataagcacatcatgaatggcagaatccttgcggctttggatattcgaatccaagacaatgattttccggcattttagatcaacagctaaagcaacccagtgttttttgtcgaagttaaaaggtagatatatgtaatcagcctccgtgaataactgcacactgtcagattcgccaacgccggagagaatatcaattagaggtaaagggaattggaactccgtttttgagttgcatcgggaaaacttcgtgaattgccggtagagcaatgaaacaaatttcaaatcaagaactttgagacgaagtttttcgccgtccacatcatcagtacgcaacaggtgacgactaaatctgatgagagcatccattacctgtgggcacaagtaaaacacgaaaaaattaagtaaatgagaaaaaacaatttaaaattaaatgcgcatatatatgacagacataataccttggaagtcagatttttcttgcggtcaattaagtccaaaatgtctttattagatagagcaatcccaccacaaatgctaatagaactgtaaagaaaacaagctgaaagattacccttggaaataattaaaaataacaaaacatgtattgactaaacaattaaaaaaacaggataaaacaaaccttatcgccttgagtttcttcattgagttttggaatcgctcctcagggtcgacgttgacctgattaataacaggggatggatgccaactaacaatttcgttttcttgtcgtactggaaccgaccatctaacttgctagagagagttcggagccttttacttcttctcccacgcatactctcgacattatcaacatttccatagttctgtttgccaagtagttaaaatgtaaaatataaaaacagagctccatgagctaaagtaaaaaaaaaaaaagaagttaaatgcctggagggggggcatcgcttctttagaagggggtggagttgtgaaatcctgaaatgggatacattaataaaaaacctaatcgatcaccaaagaattaacagcgcaaccactacgaattacctcatctgaatcctgcgcaaaccaaccactgcgcatggacgaacgattacaaattgaaaatttacatgagagaaatttaactcagtaacaatatgattagcagacaaggaaataaaataaaataaataacctggcggggagatgaaacagcagaaggggcacccctgcaaaaagcctattaaaaccaaaacaaaagcgaaagttatcgattgacaacgaatgatgaattagttatatctgatactaataatgttatcaaactaaccgggacagtggttactggtagatcggccgacacatcagggatagggacctaattagagttttgtataaaacaagatgaccacatccgggataaaagatggtccgcttgaaaactattatggacattcttaataaccactaactaaacttcactccaaaaagataacgacaaagattgtattggagacaaagggtagtcatataaaaacaatgtaataatggattgactttaatagtataattagtgcgataaactttttttttttaggccaatcagttagtacgataaacttattacttaatttaggtcggttagtgtgaagagatcaataatcaatattttattttaatcttcaaaagatattaggattaatattttaaagaacaaaaaaaaaggttgaaaacaaactaaaaaaccgatggtaatttaggacctaataagttatcacgccaaacatttatccttacagaaagagaagaagttgatttggaaacaagttctaaagacaatatatcaaatattgatggtaatttagctgctaaccactatatctggcaactccgcagacatctcgttgctaaccgaatcgacgccaaccacggggacaccctacagaacgaaaattcaatagaatgaggtcaaatatacaaaaaaaatttgaaaactagtcaacccgactaggataatataaagggatctaatacctggctttcttcgcattcattacccaaaaggtcaacatcgtgtgctgcctgctgggaacactgaaactagaacaagaaacagttaataactaaattatatcaataagatggcaattattccgctaacgaataactgctaacctcttcattatcaaccgaatgattaggagatgaaactgctagattggctggtgtattctcaggccgcttaaattaaaaaagaaaaaagattatttgaaactgccaatatggagaatctggctaggaaaaaatagatataataccacgctaacctctacttcatttgtcaaggtatccacattggttgttgtcagctgagagcactggacctggaattatcattttgaagggcacttaaaattatactaaaaacatgtaacggtaacacaactaacttaatacgataaaagtataatgatttcgataatatggataacagctaacctccacattatcgcccgaaagtttgggagaagtgactgctccagttacagggctaatatcatgccgctttaaataaaaaataaaaaaataaagttacaaacaacgctaacacaacgatgacaaaactcaccaaatctggaggagaaaaaaatagaaaccaatatttgattaataatctaacctcgttaacatccgcttccacattaacatcccgtccgggggagaggtcatcctcgacggcgtcgccgttagagacctaccgacaattacagcaattacaaaaaatcgtgacaaatggagaaaaaatgtgacacattatgatatttattaacccataatcaaactatctgctaacctgtgcgttaacttcagaaacaacctttggtgatggactagcaccaatcgataaattgttatcaccctaacaacccaattacagaaattatttgttaacacgaaaaaaatgcaaaaaaggtatactagtgacacatgtatacgagtttaaactaaactaatcagatacaatgttgaatcagtatgataattgttaacccataatcaaaatatctgctaacctaggtgttatcttcggaaacagcctatggtggtggaatagcatcggacgctacattgttatcaccctaccaaatccattaccaaattatttgttaacccgaaacaaaacatgtagtccttaacatctaacttataggaataagaatactatgatggttagctacgctgagccgtatttttcggaaatatctcacctcggaatcatggaccatactgggttcagaggggaaatcttcatcattaggagtattgttcccgcactatagcaaaaccaaaaccaattcagacggcgagcggtataataattgttaacccataatccatatatctgctaacctcagtgttatctctggaaacagcttgtggaggtggaatagaaccggtagctacattattatcaccctaccaaaccaattatcgaaaattatttgataatcccaaaaaaatcatgtagtccttaacaactaacttacaacaataagaacgctatgatggttaactacgatgagcagtaactttcggacatagctcacctaggaatcatggaccagactgggttcggagggaagatctacatcaattggagcattgttcccgcgctatagcgaaacacaaaaccatttcagacagcaaaacacttaaacataattacaataacttattgattgctaagaagttttaattaacactaacatcagaattatcttcatggtcagaatgtagaggagagtcaacatcatctgaaacattgttagttccctacaaaacaatatatcagaatgtttgttacacagcacgcaagtattatctaagaacactaactactaaactataagttagcttaatcaagtaaatcaatatacaccacgctcacctgctgattatggacaccgtcgccctcagatcgaatatcttcatccataggaataacttcttcatgttacaccgcgacagaaaagaaggaaataaggaaaaaattaataaaccagcaggaacctgaacagcttagaaaacgagatattacctccgcctccttgtaaccagcaccacttgagacattataattatagaaagataaaatttcatccacacttgcctcaacattagaagttctttcagggcaatgagaacgtgaattggttcggagagaattaaaaccaaattcatcattagttgcgttagaccccaaatcaccagtatttgatgcaccgacattaccagcaggagcagtctctttcgggtgatttaccccactgtcaggatccttcaagtgatcaccttcaattatagtgttttttgttaaccaatcagtcaccgccgaaatgattgttttcgaatgagcttcaagcttcgcatccagcatacgggaaatagcatccatagaaacagcctcagaactcccaacctcctcaggtgtgtgtcttcgaggtttggaccgaaccccaccatggttcttagatgttttggctcctttcctattccgagtagcattagacttagccccacgcttttgctttttagatgccaattggatctgggatgggaaacatccaccgtcaaacatgtcgttcttgaaaatcaaacccttgttaaccaacatgagaagattttcaaccctctcatcctcctcatcgtctgaccacgacaaatcttccgccggatccaacacataatcaggacaaatgattgaagcaacacgaatctgcaaaacaagagaaaacaacatccgatgagtatgttaacataatagacttagtgactactgatctgattatcttgtatactctgttaacgtttatcaatattaacggataagttatataataggacctgataagactaaaaaaagacttagaaaataatgatcagcttattgtctctaatcagataacagttaaaaggttagcggataaaagcattaccgaacacttctcatccaactccttcgcattcctaagtttgaaggggactgactctcgggtggccacttcaacatcgtcttcggcaccttccgaatcggaatcaatagggttgtcgataacaggactatcttgaatggctggagcagcttgtaaaacgaccaattgcaaagcatacaacaatccctgaacaacaaaacacgtacttgccaattgtttgatttctctctcttttatcgacttaatcatcatctcaaacgtgtaacgccccaaggataagcaagaaaggcatccacatcttcaaccatttcggcgtgggatttaataatcttgggatagtgagatatagggacaagaaacccatcaacaatggcaaagcaagcacatcggatcctcataccaggatctgaaacaaccctcctcttcaacattgtaataaccctatcaacggttacatcctcctcaaggccaaacaacttactgttgaaaggaatcgtctttcccgcagtgccttttttcttcttcatcttcaaactcggatacctaccagagggcaatccagtgacgatcttgaactccctcagagaaaaccgaataggtgtaccggcgaatagaacccaaatctcattaggcttagtcacctccaactgcctacccaaaataaaaatcccaaaactagcagaccaagcatgattgttggggaactccaacagtctagcgaaaggagaccgagaaaggtattgccgttcatcgtcatcgagagcgttgaatataccgtagagggttttcatcttctggtaaacattaaccctttcaccacgaggttcttcgccgagagctattaaccggggaggaagtggaatcggagccatcgtctacacaaagtaaaaaaccctagtaagacacagcgagataaaacaaatgaagaaacaaaatcaaagagaggagactcaaatcaattacccaaaacgaatgaagaaccctcggatcggaaggaaatgatatcgattgacaatcaacccagataacacaagaaatttttaagacaagggttatgttcttccgcctcaatcgcagtctttctccttcatatagtaatgaaagcacacgactgttcgttagcaggagagaagaaaacatattaaaaaaaaaaacataactcccgaacacaatatcccaataaaatcttagagtcctacaacatgcaataattcgcctatactctacaactgactaaaacgataacgtaggggtacatgcgtaaaaagttatgttaacagtgttagggtaatagtgaatttcgaagggatctaaataacaagttttctatgcatatggaatgatatttctctataaattaaagcttagggcaaacaaacatggacagaaaatactctcactagaacgttttgagacattcgtagagtagaccaatatcaactatatgttcatagaatagaacaatgtcaaccatatgttcatagataaaacagtatcaaccatatgtttatagaatagaacaatatcaaccatacgttcattgaaatagaacaaacgctccatattatacattcttagattgagatttttctccacaactcaacaatattaaatctcactcagatatattgtgactattatctacattctttgacatcaattcaaatttatcgatttgaaatggattgagcatctcttttcctaatcgtagtcacgttagttcgatatattggtttgcaatacttcctctttatatggaagtagtgtgagcgacaatgttgatagacttttctaaaatttttatctctactcatatttctcatgtggttatctatcaaacgagtaaagtttaaattatcatttttcttaagcgtcattgtaatgctcacgtaacaacaaatcaatatcattgatatatagtaacactatcaaagattcaaatcatatctgctgatagtttttgttaggaaaaatcatgtccactctcatatttctcatgttgttatctatcaaataagttaagtttgaattatcatttttctaaatatcatcgtaatgctcacatatcatcaaaacaattatatgctgcataagtaacactaacaatctcaaagattcaaatttacacaaatcttcaacaaaacttgcagatatcaaatatctctgttaacaaacagtttcaatggtattctttgatatattttctctctaatttaattaaattttaaattcttgccatttaaatttctcaaaatttaattcatttattcttaagaaatttgaagaatggtataatattatttttagttgaactattaaatatttaagtattaggtatggatgttgataacaagtttattaattcaatattttacaattttgaaatatttacacacacttccaaaagttttgctttcaatacagaatacaagaaagtaattttcatataagcaaagacagaattattaaagcaactcatttttcaaaatattatattatatacatagatttctcatttgggacagaccatggccaaaggttcctttccaaaaaagaaacagacttcccaatcttatgtatctgctctcagtcctatccactgcaccaaacgtgtaagacagcttttgtcgaaacggtccacaatctttttcttaaataacagattagccccaaaataatcaacaaaatcaatcaagtacccaacaaatacagagacagacccaaacaatggactcatagttaaagtctgaactcacaaaaaacaaacaaactccacaaattcctaagagaccagattagctttccggttaacaaactcagatcaattcataaccattcaatcacacaaaaccggaaaatatagaaataaaaacatccaaaagtacataatctattaatgaagataaatagttagaaccttctaagttttgtagagaattttaatcttgagctatataattattattggggtttagaccaatgcaatgctgctttctccgcctggtggtttacgaacaccgccaaagtagtcacgagactgagccttcgcatcagcaaatatgtcattgccacttatctccttcaacttcgccgtgcttagaagcctctcagccgtggcggaagagggagacgaaacatcgcttttgaacacgttgttacccgacaaatctgtaaacttcctatccgcaatcttcttggccgtctttagttccccatcctgcaagaattagtgcattggtgtgactgagacatactaatatgagtaagtagaagtttagagaggcgtttttacgggtttggtatcggattctcccaagtcgaagttgtctttataagccaaagcacgaacagtaggacgaagtttgatctcaggtggtggagcaaagatgttatgaccacttagttccttacacttcgcatctgagaattgcttgttaagcttagcatcagattgatactccaatgtaccactaagctcacgttgctttgcaacttctggcaccgtcgctggctttttcggtgtaacaatctcttcttctccaaatgaaatgtgactcataattgctgctggtggttgctgaaacaatccaaacacataaaagtgatcaaaacaaactacaaaatgtatccaattctctcaagaaagagacagacacaaacctggaaagttcttgatttgccgtttgtggcggaattagcacttgctaactcagaatcatcattttcttcatacacagagaatattccactccctgtgatctctttcatcttgtaatttgaacaaggcttcctacaaattgtgtactcaaccaaaaaaattaacaatgaatctatctataacatgtcatagtaacgttttcattgaatgtaacatgtgtacaaagatgagcttaaatacacccatattaaaccaagtacaataaccaatctaaaccagaaataaccaaagatttattggagattgaatcaattaaccaaggcttcctacgatcaaattcattgccaaaaacactaacaacaaaaaattggggaaaaaaccgccatctaatttatttttggccgtttaataagcgtaatattaaatttgtaactaaaatacctcatttaattttggtgttttttaaaaccttcgttttaagaaaattggtaaaatcatacattcaagttaacgtctgttaactttactaacgaaagcactaactgcggttaaaacttaacccatggttccaaaatatttatataactttcctaaccaatcaagcaacaattattaaaaatggtaaaaatactaaaattttgggtttttgaatcagaattagaccggatcattggttaccaaaaaaagaataaattaggaggaaaaaaaaacaaaattagagaagcgtgaacgatacaaagaagatcaaaaacggaaattaaattgaagatataccaaaaatgcttcataattaaggacactaattatggcaatcaaacactttcctacctaaaaaaaaaacattctatagggtcagtccaaataacgacaggatcatcatcatctgttaacaaattgacagattcttcgtacttactgttgtttcgcatttattaaattatcgtaccgttttgttttcttcctgattaatactactattttctaaatttcgaatacaaaaaaaaaatcgtgagatctctatcactcacctcttgttcaagctctcaacttcttcatctgtaacttgtcctccaaatacgactttgcttattccatccgacggctgagattgtttcccccaaatttaaatcagaaacgaatcaattctcgcaattaacaaattgagtgaaattagtttaaagaaatcaatctgacggctcagattgtttcccctaaattccaaatttacaaaaaattaataatcacaacgaatcaaattataaaattacacaaaaaaattagtttaaatattttatctgacggctaagattgtttcccttcaaattcgtagatcgcgaaattaacaaattgagtgaaactagtagtaattagtttaaagaaatcaatctgacggctcagattgtttcccctaaatttcaaatttacaaaaaacaaagttggtataaacattttatccaacggctgagattgtttccctaaattcgaattcgtagatcgcgaaattaacggaattagtaagttacctggtgcgatctggcggcggagcgagaagatacggcggcgggagactcaaacggttgattctccggccaagtgagtagatccgccgtcgacatgtgtggtttcctcaccggtgtgtttttctccatcacgaaaaaaaaaagagaaagtaatacagagaaatagagaaaaagagagattacttcttctataaaagcttcgaatgcaacaacaatggcgacgtatatagagagaaaaagagagagagacgaaaagagtggagtggtagctactcttcttctatttcaaatactggtttttttattctctctgtgtgtatattatattattataatagactgtgacacagaggattatagctctgtctctctgtattcttactggtggaatatttgaatcaagtaccgcctttgatcttattggatactttttgaaaattagaatactttatattattctattggcatgtgattagattggacaggtggcggttttagttggaggattacttactgtagccggttttagttaaattttgaaatatttggttgttttgtacacatgggatattctttaacaaattacccttaaagataaagatacgttgacgttttttgtttcttttattaattacttggattgtgtaacaaacctcaatactacgcgtaaagaatttctaaaaatgtagataattatagtttcaattttgtggggcttgttatgtgtaaattatcttgtaatgttcataggaactttttagatgaaaattaaaaaatgtttttaaaatttaatttttagcgcaaaatttaaaatattacgtttttttcttttctcgaaagttcgttatagataaatcatcttgtagtatatgataagatgttattaatgggaatagatatataaatgtaaattatatttattattgagtacaacaaaaacgcatatttcgctcaataatataactttgcatgataaatatgttaagaataggcagcatactagatatttaacgcagataatgattggcatgccttgtttggaagtaaaagattgcttaagttatgtactttttttaatttatttaaattcttttcattttagtttgtgatgtttagctagacaggtgggtttatgagtagctttgactaacttagcaacataatgttttggcttttctttttcttcacaaagctagttttattattatcacaaaccatgatcagatacataagtccgagtgaattacgggacgacaaagccggcaagatataatcttccggaacacaagctggcgaggaatgaaacccccaaacactaagcccctacatggggaaacgacggaaaaagagaaaataaaacatgagtgatgattttacacataaacatagttctctctttaaccaaataaaccaagatcgtaaaattaacaggcgtcagagatttcgtcgaagattgagaaacccactttaagaaaatttgatcctcttgcctcacttggtaattaaaagtcttcagaagaaaaaccttgggatactttggatggcagatggtggaaactcagctaaacatttagaaaccgtcgagaacgctgtggccggagatatcgactatgcgacttgaaccggcaaaaaaaaaaaaaaaaactgggcggatctcgccctagatccgtattgttgaagttgtgtgaggaaaccccaaattaggtcacccaacccgaatcaccacaacaccgacagtgaatggcatagagcgatcgtgattaggccaaggagtatttagtcagagaagaaaaccacgccatattgcaaaatcaccagtcgaaactatagatctaacaagagaaatcgaggaggaaacgaaatcgaaatcaacccagaaatctccttaaccacaacttaaagagacataactaaacataaaccaaaaagccaaaccgacgtcatgaccgtcatggctcacaacgtggaattgaagcggtgcttttgttttcaagagagaaggaagaggattttttttagagagagaagtcaattctgttttttgttgcataatgttttagcttacgttgtgttttcaaatattacaaccctttttccgtcaaaatgattcatatattaacaataacatgttattacaaataggaaacgagggcaatcaatctacagaaaatcattacaacaacgtattgcatttatcaatttcaaacacatactctagccaaaaaattaaatttgtgctacataaaattgcgaaaatcattacaacaatgtatttgcacttacaaataggaaataagggcaatcaatctacataaaatcattacaataatgtattgtatttatcaatttcaaacacatactctagccaaaaaattaaatttgtgcaacataaaattgcgatcggtccgcaattgtgacacttttagctatgaggaaaactcattggtttccacatcgagcttctagtgtcacctttcaacagggatgaggaaaacatgatggaatataaatgccagcgaaaatttaacccccaaaaactaagttggcgggattctaatccccagaaactaaatctcaacatagggagataagcaaaagacataaaactaaaacgatctaaacttgattgaaaggatttgaggcagagaaccaaatttcttactacccgagccaaccgagatcgcaaaacaagctggaagtcttcgaaggagctgacaaccaaaccataaaagttccaatctacaagcctaacttgataattaagagtactcagaagaaaaaacttgggataccttggatgacgggacagtggaatcttggaaaaaacttgtaaagaccgtcggaatcgtcggaccggaaaaatcaactaatggacgtgaaatggtaaaaggacccaaatctaggcggatctcgccctagatccgtttgttgaacctgtgtgaggaaacctataatttaggtcgcccaaactgaatcatcactacaccaataatgagtggcttagagccatcgcggtaaaggccatggaggactcaggcgaagaagaaacaagaacctgcaacaaaaactaatcaaccaaatcctagatctaaaaagaaaaaagacagataaagaataaaaaaatgaaaccaatccacagatctctccacacaagaaaaccaaactagataactaaacaatatctgaaaaaaccgaccaacgccgtgcccatggtggcccacacgcgtcggtcggagacgaggcacaaaacctgcggcaagttgaagaaagaaggaaaagagaattattaagaaagagaaaaaaatcaaaaaaaaaaaagaacaatgacctttttttatcttactattatgtttttttattgagttcaagttattccatagtcatttgaatcatggtttactatgaatgtcttaaataataagaatatctaaaatccatgtccataaaaaaaaagaatatctaattgttcacatattggaaaaactttgacttttcaatttgacaattataaaaagttcaaattatttaaaggtgaaaaatcatagagtcaattagctaactagccaaattcgacacacaaattagcaaaatagccatgcgtcagaaaactttagtaaatagcctttttttggggtgtgaaataaccaaaataatctggaaagataggcgggaactcgtgagttccgacactaggtgtctatatgtagggaacataaacatgcatagttaatgagtaacccgttttatttataaaacacacgccatttatatatgtttttgttcctgatgagccacataacttatagatttcaattaccgatgagaacataaacatgcgtagataatgagtaacttgctttatttattaaacaaacgatatatatagatgtatttgttcattttttttttaattctataaaccacataccttttagatttcacagatgcatttgatatttaaccactaacttatatcactagatatgccaaaaacggaccatatatatatacagatgtttgctttgtatgcgactagttattcaatggatactaacagataaaaaggtcattggtaactgtaacatagaatgttatttaaaaacaacacatataattcctatatgcagacgctgtctgaaaacaatgggcgtgagttggaaattgtgtattgggcaatagactggtcaaagtatcaacttatagagatcatacattacttgcaatgtttcgttatatcagtaatcattagtatgcaacttgctacataatatggtcgccaaatcttattttgcgatttgacaatgtaaatctatccgtaggaaaatatttgatacgtatctattgcattaaatgcggcgacagtgttatatacgggttccaatattgcattgggggaaggggtgaaataaattccaaaaacaacgtgtttcgtataaatataacataggataaccactaagcatccactagataaacgacacgttgcgcatgacgtctgcaataatgttaaaacacatgaattattgtggttatgcatgtaattcaaatacaattcagttatatgtttgatgcgacatttacagaagcgacagattccatcgattagcagcccttcgagagtttggagggaaatcataattattgaaaattatgtggtttaaaagcttgtaagcactgttgcggaaaatatcttaatatactgtagccctacttcgtagcgaaagattccatatataacaggagagatgagtagcatttaaaacacatgataatgagtaacccgctttatttataaaacacacgccatctatatatggcgttgttctggatgagccacataacttatagatttcaattactaatgagaacgtaaacatgcgtaggtaatgagtaatccgctttatttataaaacacacgatatatatatatatatatatatatgtatttgttccttttttttaattctataaaccacatactttatagatttcaattacagatgcatttgatatttaaaccctttcttatatcactagatatgccaaaaacggaccatatatatacagatgtttactttgtatgcaactagttattcaatgaagactaatagataaaatggtcattggtaactgtaaaatagaacgttatttaaaaacaactcatgtaattcctatatgcaaacacggtatgaaaagaataggcgtgagttggaaattgtgtattgggttatagcctcggcgaagtatcaacttgtagagatcatacattacattaaatgtttggttatagcagtaatcattagtatgcaacttgctacataatctagttggcacattttatttgcgatttgacaatgtaaagagttcgtaggaaaatagttgatatgtatccattgcattaaatgcggcgatagtgttatatacgggttccaatgttgcattgggggaaggggtggaacaaaggccagaaacaacatgtttcgtataaatataacaaaggagaaccactaaccatccaccagattgacgacacgtcgcgcatgacgtatgtgctagtgttaaaaaaacattatttattgttgttatgcatgcaattttaatacaattcagttataagtttgatgacgactgcttccgtcgattagcagccctgcgagagtttagagggaaatcataattattcaaaattatgtggcttaaaagcttgtcagcattgttgcccaaaaatatcttagtatattgtagccctacttgttatcgagacattccctatataacaagagagatgagtagcatttaacgatcacaccacttcctctttgaaaaaatcaaaaggaacaagtatacaacaaaggagaaagacaagttacagcaatactaggtatgccattaatgatagatttgttttacagagtaccctgtaaaatagaacgttatataagaacaactcatgtaatttctttatgtaaacgaagttatactgacgaatttgaaaacaataggcttgagttggaaattttgtattgggcttgatgttattcattcggttataagctcgacaaagtatcaatttataggtatcatacattacatgaaatgtttggttatatcagtaatcatcattacgcaacttgctacataattgggttgacacattttatttgcaatttgacaaaatgaacagtccgttggaaaatattagatacgtatttactacattaaatgcggcaacagtgttatatacttgttccaatgttgcatttgaggaaagggtgaaagaaagtgtagaaacaacatgttttttataagtataacaaatgaggacaacatgatgcactccccagcgagtcaccattaacttctccactttgaatagagacaacattggtctacaaaaacaacaagtgaaacaacaacgttaagaaaatgatatactggaaaaagcatgtctccattatattagtttttcagtctatagaaagtagttcacatctggaaatttgaaagaaaaacatgaatttaagaaaaaaactcgatagggattattgtcaatatgaaaatagagaaaccaagcaaccaatttaaaattgttttcaattacataatactaaaccctaagataatatatagggaacccaagcaaccaatttaatagatttttttgagaaaaatccaaaacatacaacagatagaaaacactgaaatttgaaagaaaaacatgaatttaagagaaaactagatagggattactgtcaatatgagaatagggaacacaagcaaccaattaaaaatcgtttttaattaaataatactaaaccctaagataatatatagggaacccaagcaaccaattttatagatttttttgagaaaaatcctgttttaattatatatatatatatatatatgcatgtatataaatatgtatttgtgtagttatatcactggatccgaaaatcaactcaaacacatctcgatccctttttaaaggtataaaagtatgaaatctaaaatgaaaacatagtatacagataaatcaatgactcaaaataacaagcatcattatataagaacaccttatagaataaacatagcatgttatctatataaaacacatgaaccagctataaataacatgcataatatgaacaaacctcttcttcttttttttaacccctaaacggacaaaaaagaatccacaaaatttgaggaaatttccagatctcgccttatctaacttcatgtagagagattaagaaaaaattgagggttagtaaagaataaatcaaaaagaaccaaaacttagatctggacacaatcggtaagaactctatgcgggatacttatgtaagtatacatgggaagaaatagaagaagacagagataaataatcggaaacccaggattgaacttaccagattcattggcgaataccaaattggataggaggagaacgaattaaaacttctctcgcaaacggcaaaagaaggaaaaaaaagattagcagctatataaaacacatacaaaaaactataaaacaaatgcaaacaaatgaaataacggagtacttaatggcagaccaaaaggtataaaagcatgaccctaccaaaaaaaaggtataaaagcatgaaatttaaaatgaaaacatagtatagagagaaataaatgagtcaaaataacaagcatcattatacaagaacacattatagagtagacataacatgttatctatataaaatatatgaaccaactataaataacatgcaaaatttgaacaaacctcttgtttttaaataaaaaccctagacggacgaagcagaatccaaagagtttgaggaaattcccagatttcgccttatctaacttcatgtaaagagattaagaaaaaattgaaggttagtagagaataaataaaaaagaatcaaaacttagatctggacacaaccagtaagaaccctatgcaagatacttatggaagtatacatgggaagaaatagaagaagatatagttagagggaaaaaagaaccgaactttagatctggccacaatcgttaatttctatgcaattgaagtataaaggggaagaaatagaagaagatcggcgataaataaacgaaaatcaatggaacgtaagacgttcaaaatcctcgatatcgccgaatctgcagtcatggaacgtaagacgttcaaaatttgggttagtatagtataaaagagaacagttcaaaagacaatatttacaaacctcaagtgttttttaaacaaaacccacagcgtcagccacaaaagcctcagatatcgcctaatcttcttccgtgaatagtaagagacaaaaaatgggttagttgcatgtaagaaacacagataaaggacgcaatatctacaaacctcatgggttattcaaacaaagcacatcaatatttacaaacctcatgtgttttccaaaaaagcacagaaggattcccaaaaaaaaccagagactttagccgcaaactctcgatggtcgcctaactttcattcatcaacagtacgcaaaacaaaattagggttagttaagaacgaaccgaactttatatctagacacaagcgatgattgacatgcaattaaaggtacaggggaagagaaataagaagagcgactgtaaataatcggaaatcagtggctctacttacccaaatcgtcggcgagggaagaccgaaaattaatccttcgattgtcaccggcgactgcaacgagaagacgatttgaaaaggataatcggaaacacaatcaatttctaaaaacaactactacttggatcgaaaagatgagagcaacgacgatgaaattaatcgccgccgagagagtttttttcggtgagaaaaaaaaaactcttttttttttaattttagggttattattttggtcgtgagacaaacttgggccgaataatgcaatagaattcaaatttcaaacccagaatcatacgcttcccaaacagtgtcttgtcgctttgatgtctaaggttatacatgtaatttacatgtgtttccgacatacccctgttgctcatgactattctcttaattttttttgaatccatagctattttgtgtatatactcataatcatatgggacacaaattttgagaatcatgcaaaatttctaaaatcgttaaattggcaaagcagaaacttcgaaaattagtatgggatttaactcgaaattacaattttttttttttttgcaaaaagatcggttctatttcttgcaaatattagggaccccaagtgatttgttttgttgttgtgttcctaaatactattataaggtcataatgttcgacacaaatattttcaaggtatctagtatctagttgtgacagctacctttcttaacatcatatttcctttaaaagtaaaatagcgtctcaactgtggatttccataattggtcagtagttaacaagtcacatcaaagttaatttagggtaccatagttttgaattttaatttagggaaactttttgtgaaaaattaagtagaaataaagttatatctcttcttattaaatggataaaagttatattacagaggattaatttacttataccaaaagattgtttttttgtcactatgttcagtaactaaaatacctgctaaaagccatttcattattccataatgcatactccaaaatggtcatataccctaattatgaaattatagtgctgctcttctaatatatgctatttcactaattaacacaaaatcgtaaaaacgccattccttctaagattcatatacgaaccaatgtatctacccccatctatactctgacgttgctttagaatcgccacaactagctaaactcgttacttagatgatactttttcctataatatatttccgattttttttgtgtttaatccatatgcatacattcgattggagaattaaaaagtgacacatcaatataagagggagagctctatctttccccttttaatacgaagaatctataagtttttaactttagcattttaaagtacttaattattatcaatacatattcaacggagacgtaaagtataagttagaaaataatagatttactaatcaaagattcagaaaatcaggtgagagaaaaaaaaaagacaggaacacgtttgggtttagaaaatgattagataatttggtgggtaaactttttaagaagaacatcaaaatcatagttaattatcagaatcaaatagactccaccataaagaaaatttgttgggtcaggttaatttgtcggcagggatcattcatttgcaattttttcatttgtttataataaatggctacctctattttctttaataatcgcaaaggtcggataaatacctcaggttataaaataaataattactttttgttgaaatcggataattatctattattagcacttgcactccaagccattaaaattttatccccaaattttgtataatttattcattaatttctctatatatatttttcatactctcattcgtatagtgaaataataataataagaagagcaaccctctccgttcttctctcttgttctttcttatacacatatattaatcaaatattatatgttatttatattatggtttataacatgttatcagtatgatgtctttaccgtttaagcatttatgagataagtaaaaattttattatttaattcgtttatgtttataaaacataaatattttagatatcgtaatttgtgagactatgtctttattcggattgatctttataagtggtaggctctacctccttcaagatcaaataaaataaaatgttatgtcttttccggaattaatcgttatatatatatggtaaactatgttttcttaatgatgaaataaaaagttatgctttttccgtgattgatcgttaaatatggtaggctttgccttcttctatacgatcaaacaaaagctatgcctattgaattctaatatgaaaggctatgtctcctgaattcttgcataaaaagatataatccacatgttattattgttctgaatttatatgcttaattatttttctttattttattcgtagagaataaatatgtgttacataatatttaaagacattaaaatatgtttttaaaattaaaaatatagttctgttctgagaatatgtgaagcacttgtcgatatatgtttaggcagtgcataaataatgggaagatctagatgagctagtctctcaactttcaaatgcattagattcataataatcgatgctttgtgttctccaaagtctcaaaaaaaactagtatagtttctaagataattatcttataattcttataattcttatattgagactataaattaatatggtgtcaattgcttgaccagagtggagacacacattgattaaatcatgtaaaaataaagatggcaaatttatttatcatatagtaaacatgaagtttaccaatgctccaagcatagcacgaccggtcaagccatcccggtatagcgataacgatatatacataaaaatcctaaaaggatttaaagttccaaaggcattagactcaaaatctaataaaatttgtacggtccaattacagcgatcactttacggattaaagcaatccagacgcatatgatataatcgcttaaacgattatttgttaaacaaatgatatatattaaagaaatatgcctcagtgtctttattatgaaatctccatcgagatttgtgatcattgttgtatatgttgatgacctaaactggaactcaaacaaaatgattaaatatcactagaaatttatgtaaagacagaagcttatttaagcaatggatgcttccgtccacatttcagaggtaacatttaatttatgataaatttattacgtaaattcacttaaatttatataatatggagtcgatggttgtatatctcctctttaattttgtggtaggttatgccttcattatatgatctttggctaaatccccattatttttaataataagctcattgtatatgatggtcgattttcacaatattccccaaattaaatcccaaatataaccgatctaaaaattagatcggtataagagaaatagactcgaaaagtcataatattgggagggataattacaaatctcacatttttaaaaggatccatgattaaatacatgatcccgttcggatattatatagatcctaaagtgggattcatttcgagatgaatgaactcgaagagttattatctcgagagggagaattaaaggaatctcatatcgataaactttgatgaatttgacacctagagcgaggtaactctggtgatgtcatatcctataatttatcactttaagataaagttgaacatctaaaaatgatgtttactctcaaattgagctttaatgaatcgtttctaccccaaatccaagagattgcagaacgattcatggtgatttaatctccatgtttttacatggaacatggagttttgcatgtagtaatgattatatataaggctaacgatgcataagaaatatttctctcatgttatttatacatgattagagatcaaatatttatcattttaaattttatgggtgtgagatatgttttataagtgctcttctaaaccacctaaaaatatcatccaaagaggatggaatttatagatgctggagataagttttcgctttattaatattgagcatcttttagagatgtgccaattgcaagatttgcaaatcatcatgttgatgataaaaattttccatcactatgggagaattattgaatagtttggatctttgaacaaataaatatgaacttaaaagttcaaaagttgaaaatgctcactgatatggttcaaattgccttaaacctactctctcaaataagagatcggttgtagtatttaagggtcgaatttcctcaaagttcttttgttcacacaatgagttgaatgtcaagattaagatagcagggaatgattgaaataaaatgtaaacaaagtaaaaagactgcagattgattgattgtaaacgatgaaataaagagctatgaatagggtattctcaggaaactattggttagtagatctaatgaaagctaggttgttatcgaaccattgttaactcatactctaattatggaataaccgctggtgttccgcgaagctccctatgcctatagctaagaataaccggagaagccgagagatatttaacctaaacatgcattctaaacgagtttaattgttcaccgtagtagatgggccgattcttattacacacctataaaccatgctcatcaaataatagatctaactacaaatacttatggtagatatatctattgtctggattcaaaatctagttaattactctagatttagcattaagattaatcagagatgaagaattctacagataacctagcaaaagacagcgatcaactaaataatatgaatccctaatgagaaaccctattcctaacaagcaaactactcagacatattgattgaaacaagcaacataaatgaataagaaaacataaacacagtaaataaaatgatagaatgaaagtatctcttcactatattgagaactgaattaatctctgaagaataagggatgaatagcttatgtttctctgaaaatagggatgaaaagaacttgataaaaggaacctaggtctaaaaaatgacctctaaatataaatataagccctataaaacgtccaaggactaataatgcaaatagggaaatcttttggggcaattttccacttctgtaaacttgaaagcgtcatggacttttgtgggccaaaactggtattgatcaacacctggagtgtgtcgatcgacactcccctgaatctggaatctgaaatcgtccttactttccttttccttagcttttgcttctgaatgtcttctcatctccattgttgtcccagtgcatagaatacctgaaaagactctaaaaagactcaagaaataacataaagactcaaaatcctaaaccaaaaacatagataaagttagtgaaaacagggttatatcaactcccccagacttagcttttgcttgccctcaaacaaaacacaagagccgaacccgtggaagaggtttgaaaacacaggaactcccaacattctctagtctattgccatgatcatcctaacaaaatccatatgcctagcaagtctaattaaatcctaaccaacatgtacttctgcgcaagcttacacaacattctagattccatatcttatttccacaactatatctactaggctttcatcgctgggtctcatcaaacaagcttacattcaagatccttctagattcattcctgtactataccatgataaatcgaccattctctttatattttttttctttggtgttctttctctccaagacttattcttttaagagagtaaacaaaggggaactcgcatactggatcgacaccctcgacatttttccaacttttgtaattgatcattccaaataatgtataataatgtggtcataggaaacattcctacccctatacactatctgaaaatcctgtcaatctctcattttctttttattattataaggggagaggaacacattctttttatcacattggtctcaatatcatgtatgaaaaagaagtcaagatctatgaatgctaatcgtttgaagaggtaaaaggaagagcagtgagattagctccagccttagtggttgtgttgaaaactaggatatcctcaagtctgttggtttgccatttagattttccaatagtcgtattgagtcgaacctgcagcattaatcaatcatgcaataatcaagagaaaaatagatcatgattcctaactaaactaaagaaaatgtttcttgttttttgtttttattttctttttttttttagaatgaaacgagtaactcaataaactgaaaaacgaaaaataataagaatcaaaaaataaaagcataattagtaagaacctcccccagacttaaacaacactatccccagtggcattcaaattggaagaaggcggaaaaaaataaatcaaaaataaaagaaaataaaagaaaggaaaaaaaaatatcaaaccagtgagttgcctcccattaagcgcttgttttgagtaaatagcttgacttgacagatttcaggatgtgggtggagtggtggaggattgctgctgcctccttgccctccaaggcggtgtgtaaactgatccggtctgggcagctgcgggtgtcgatcgacactcattggtgtgtcgatcgacactctcgtcgtttcctgcaaaatcaaaaggagaaacaagctttcgaagaactctaggcttgttaacttgcgaatcagacttcgaagaatctaaagaattaatcgagggtaaaacaggagaagagatagaagagaacttatcacagaggtctgaaatgggtgtgggctgaagagaatgtgcagaattctatgtctgtgaatcccgagggtgtcgatcgacaataggggtattgtcgatcgacaccgttactctacaactcccatttgtgagctaagcggatgggagcgttatgtgtggctttgtttggggattcagagcagtcggaggagatgtgtcctgggtggaggcaatgctactgataggcctaataaactctgtaccatccatgccaaactccatctccaagtcacaaatgttaagaaagatcttacctctcttcacatcaatcctagcaccagctgtagcatgaggttgatacttgatcccatatcacacaaagagcgactgaacctgcttgtggagatagagcaatcaggaatgaagctacctggatctgggatcttctcagtggtctgatctggagtgatgatgcagatgtactcagcaatgtccactctctatgccttctctttcttgaccgtaggcagcatgatggcactgatctcccatgtgagcagtttagcttcatcagagctaataccattgtcaacaaggcgcttgacataccttttgagtggagcagaggatgtctcaaaagcatccttaagaagtgaggtgaggatcttttccatgatagttgtgcacttagcagcgtggatctcctgcttagaacgacgctttcgtggataaggaacaggcggcgtgtaggcagtctcgggcttcatcgggattctcacttcatatggtgtagtccagacccaatgtcgatcgacactagaggtgtgtcggtcgacacctaagtatggaatcgtttgagaaaacagtgttccatatggtgtcgatcgacaccgggattctcacttcatatggtgtagtccagacccagtgtcgatcgacactagaggtgtgtcggtcgacacctaagtatggaatcgtttgagaaaacagtgttccacagggtgtcgatcgacaccaactatgcagctgcgagctccaactcgtcttcagtgtccaattcctcccacacatcatctccatctctgatcaagatggcataacagctcttcctagggttagcataagggtttccaggaagaaagtcctcttgtctcttgatagattgtgcagtttgagcaacctgtacatctagcttttttatgtgagagctcagattgttgatcttcccgttaaaacctgtgtagacagcatcaaacttgccattaaactcaacaacgagctttgtatgactctctagaatctactcaaacatggattctattctactctctgatgagggtggagagagggggggggggcttagtaagctgaaataccataggtcctctagaagttgctctgaggaaatgtcttctgaaaggcaggctttggagtgtagctcgaagaactctcattccctataaaccggttgccattgaagttaccctgtggctgcccaaacttcctgtagccctagaaaccgtggaaaaataggaatgggaaggaaccccatgtcaataagcatatttaggaatatgagaagccatatcaaggtaaaagagattttcatcttttgttaatatggtgctagagaagaatgtttatttgtgcactagtgttcagtggttgaaaagtttaaatttttctaaggtacaagagttacgcatcaaaagagttaccaacgttagaaagcaagtgtcgattcttaaaaacggtaagctggaagttttaatgaagggtcgtgtgcttgtataccgtaaatgtggatgtgatgtttgctagagctacaagtcagaggtttatatggaaataaatcaccgccaaaaattcgagaacaaattttatttaagtgggggagattgtaacaccccacttcaacatttaataggctatttgttttggaaatatgaggaagcccatttaaagcctagaggcatccatttataaaatcaatgagggttttatctctgtgggagtcctcatgtatgtatataaatacttacatgcatcgccgtccttgtcaagccgtaaaggaaagctgagcaaacaaaccccagaagacatcatcgtcgttgttgtgtcattatgtgttattgttcgtaagactcacgagaagaagaaacaaattaattaaaaaagaagaaaacggagacggaggtggagacgtcgcggtggagaagagatcatcaaggtcaagttttagtagagggagaattggattgtgttaataaggagaagcagtgatgagtctatttcgttgccaatcagagatgtggttgttgagatcagtcgaaggaaagaaaaagaaagaagaaaaatagaaaagaggaaagaggaagaacaatatcaagaaggtttattgcagggtgaattcccgacagaccagagggactcagataaggaataaggtgtctatggaaataaaacgctctcaagaatccacatcaactgacagatcttcaatcagatttaaactcaagaagtttctttctgacaagtaactgcaaagtctgtcaaatccaggaaatcctaaatgacagttcgagatggcttattgatgataacgtttggagcttttaatgaagtccgttcatgctgtaaatttgtggagttattcatgatacttctatctacataatcaacgttgggaatacgtttctaacggttagttcctgacttttgaatatgtttccaagacagttttatttgaagtaaatagtgatgagtttgtgttgttggttgggaaacgggttcggtttgagctgtgaatttgcaggaacctttaggactcacggattcaggtcttagttgagggagaaccaagctaaagcttatgagaatgtagttgtggtaaaggttgcctaagttaaaagaaaggagaagtgaatcttcatcttcattaagccaaagtgagggtggtatttgcgaaacatggtatcattttcttttgttatgcttcttgacgcatgatatgtaagcttagatctgattgtataggattagattacatgatgatatgactttatgattgttgagtatgatgtttgataatatgatgttatgtatgatattataagtaaatgtatgttaagtatgattatgagtatgtatgtatgatgaatgtatgactggggaggaggtatgggccgtggtctccctagtgatgtggacagtgatggaccgacgggttaacagctagtcaagaacggctgacgagcccggaatgagagtgtctgagccacgagggccagcttccatgtaacacccgcgatcctcaataggatcgtccggatcggggcctttcactccacctatgaggttctagtcgtcacgaggatgactggacctaacgatgtgtatgtttatattattatatataagatggttgtaatgaatgtgttattagatggtaaagcatgttaggttgattgcttgtgtcaaagtttatatgttatgatgatggttgtatagctttagaaagtgttctatgtttcagtgggcagagttgatttccttcactgagtattctttactcacccccctttttcccttttttctcaggttagtaagcgtgaagagttatgtgaaataatttgttcgtgtatgaagtttaaagaaaacatttttggcaagatcatatgaataacatgccgtcttggcctataaggcggggcaggtgttacacctctgccatttaatttcctaaaacagctccaacaatcttcttcctctcaaagtcagcattcttaatactgtttctgcaagataggttctctatcaaagcggttgcatcagccggatacctggtgttgaagtaaccatttctcgctgcatcgagagccatctgatatctccaatctactcctctgaaaaaggtaccaataagttgtacctcagtgaagccatgatgcgggcagtcccgttgatactccttgaaacgaacccaagcggcattgaaagcttatttctcagctcctaagacttagcatcatcatagaaattattcaagaatgctatcttgatgcttctccaagtcttgagggaacctgcttttagttgtttcagccaagaagcggcttccccaacaagtgtataagggaagagcttgcatagtaggtagtcctctgagactccattagccttgatgctcagaacgaggtcctcaaaacgctcgatatggtctattggctgctcatgagacaagccatggaaaggatgctgggaaactaaagcaaagtagcctggcttcagctcataatcgttcctctggaagggtgggggtacaatcgctgatcgattagcatagaataaggccagttgaaatctccaagagtacgacgtggttccctagctggaggaatagctgcaggaatctggggttggtgtcgatcgacacctctgttgtgtcgctcgacacaaccgcatctgcgttctgctcccgaaggtgtcgatcgacacctagttggtgtcgctcgacaccgagccctgctacgtttctggcagctaattgcgcattgaggcgcgcctgatcctcattggcgtcctcagggaggatgattccatgctcatccaatctctgattagcctcattgtaggcttgcccatcctcatctctcaaaactccttcctcatcaagtctgatgactttgttaaccattgctaatctctaagttttgcggttggtgcgttcaagttttcccaagtccagaacagacaagttgatcaactccttctgttgtgtgctccttgtttgcctaggcatacacatgacacacagaaaagaagaaacatgtgagtaacaaaataaaagtaaaaactagacgaaatctctaaactaaactcaatggtgactcccaagaactttggcaacggcgccaaatttgatatggttcaaattgctttaaacctactctctcaaataagagaacaattgcagtatttaagggtcgaatttcctcaaagtttttttgttcacacaatgagttgaatgtcaagattaagctagcagggaatgattgaaataaaatataaacaaagtaaaaagacaccaggttgattggttgtaaacgatgaaataaagatctaggaatagggtattctcaggaaactattggttagtagatctaatgaaagataggttgttatcgaaccatttttaactcaaactctaattatggaataatcggtggtgttccacgaagctctctatgtctatagataagaataaccggagaagccgagagatctttaacctaaagatgcattctaaatgagttcaattgttcaccttagtagataggccgattcttattacacacctataaaccaggctcatcgaataatagatacaactacatatacttatggtgtgtatatctattgtctggattcaagatctacttaattactttcgatcaagcattaagattaatcaaatatgaagaattc

SEQ ID NO: 1172 - DNA, 90707 bp, Arabidopsis thaliana
ccgttactctacaactcccatttgtgagctaagcggatgggagcgttatgtgtggctttgtttggggattcagagcagtcggaggagatgtgtcctgggtggaggcaatgctactgataggcctaataaactctgtaccatccatgccaaactccatctccaagtcacaaatgttaagaaagatcttacctctcttcacatcaatcctagcaccagctgtagcatgaggttgatacttgatcccatatcacacaaagagcgactgaacctgcttgtggagatagagcaatcaggaatgaagctacctggatctgggatcttctcagtggtctgatctggagtgatgatgcagatgtactcagcaatgtccactctctatgccttctctttcttgaccgtaggcagcatgatggcactgatctcccatgtgagcagtttagcttcatcagagctaataccattgtcaacaaggcgcttgacataccttttgagtggagcagaggatgtctcaaaagcatccttaagaagtgaggtgaggatcttttccatgatagttgtgcacttagcagcgtggatctcctgcttagaacgacgctttcgtggataaggaacaggcggcgtgtaggcagtctcgggcttcatcgggattctcacttcatatggtgtagtccagacccaatgtcgatcgacactagaggtgtgtcggtcgacacctaagtatggaatcgtttgagaaaacagtgttccatatggtgtcgatcgacaccgggattctcacttcatatggtgtagtccagacccagtgtcgatcgacactagaggtgtgtcggtcgacacctaagtatggaatcgtttgagaaaacagtgttccacagggtgtcgatcgacaccaactatgcagctgcgagctccaactcgtcttcagtgtccaattcctcccacacatcatctccatctctgatcaagatggcataacagctcttcctagggttagcataagggtttccaggaagaaagtcctcttgtctcttgatagattgtgcagtttgagcaacctgtacatctagcttttttatgtgagagctcagattgttgatcttcccgttaaaacctgtgtagacagcatcaaacttgccattaaactcaacaacgagctttgtatgactctctagaatctactcaaacatggattctattctactctctgatgagggtggagagagggggggggggcttagtaagctgaaataccataggtcctctagaagttgctctgaggaaatgtcttctgaaaggcaggctttggagtgtagctcgaagaactctcattccctataaaccggttgccattgaagttaccctgtggctgcccaaacttcctgtagccctagaaaccgtggaaaaataggaatgggaaggaaccccatgtcaataagcatatttaggaatatgagaagccatatcaaggtaaaagagattttcatcttttgttaatatggtgctagagaagaatgtttatttgtgcactagtgttcagtggttgaaaagtttaaatttttctaaggtacaagagttacgcatcaaaagagttaccaacgttagaaagcaagtgtcgattcttaaaaacggtaagctggaagttttaatgaagggtcgtgtgcttgtataccgtaaatgtggatgtgatgtttgctagagctacaagtcagaggtttatatggaaataaatcaccgccaaaaattcgagaacaaattttatttaagtgggggagattgtaacaccccacttcaacatttaataggctatttgttttggaaatatgaggaagcccatttaaagcctagaggcatccatttataaaatcaatgagggttttatctctgtgggagtcctcatgtatgtatataaatacttacatgcatcgccgtccttgtcaagccgtaaaggaaagctgagcaaacaaaccccagaagacatcatcgtcgttgttgtgtcattatgtgttattgttcgtaagactcacgagaagaagaaacaaattaattaaaaaagaagaaaacggagacggaggtggagacgtcgcggtggagaagagatcatcaaggtcaagttttagtagagggagaattggattgtgttaataaggagaagcagtgatgagtctatttcgttgccaatcagagatgtggttgttgagatcagtcgaaggaaagaaaaagaaagaagaaaaatagaaaagaggaaagaggaagaacaatatcaagaaggtttattgcagggtgaattcccgacagaccagagggactcagataaggaataaggtgtctatggaaataaaacgctctcaagaatccacatcaactgacagatcttcaatcagatttaaactcaagaagtttctttctgacaagtaactgcaaagtctgtcaaatccaggaaatcctaaatgacagttcgagatggcttattgatgataacgtttggagcttttaatgaagtccgttcatgctgtaaatttgtggagttattcatgatacttctatctacataatcaacgttgggaatacgtttctaacggttagttcctgacttttgaatatgtttccaagacagttttatttgaagtaaatagtgatgagtttgtgttgttggttgggaaacgggttcggtttgagctgtgaatttgcaggaacctttaggactcacggattcaggtcttagttgagggagaaccaagctaaagcttatgagaatgtagttgtggtaaaggttgcctaagttaaaagaaaggagaagtgaatcttcatcttcattaagccaaagtgagggtggtatttgcgaaacatggtatcattttcttttgttatgcttcttgacgcatgatatgtaagcttagatctgattgtataggattagattacatgatgatatgactttatgattgttgagtatgatgtttgataatatgatgttatgtatgatattataagtaaatgtatgttaagtatgattatgagtatgtatgtatgatgaatgtatgactggggaggaggtatgggccgtggtctccctagtgatgtggacagtgatggaccgacgggttaacagctagtcaagaacggctgacgagcccggaatgagagtgtctgagccacgagggccagcttccatgtaacacccgcgatcctcaataggatcgtccggatcggggcctttcactccacctatgaggttctagtcgtcacgaggatgactggacctaacgatgtgtatgtttatattattatatataagatggttgtaatgaatgtgttattagatggtaaagcatgttaggttgattgcttgtgtcaaagtttatatgttatgatgatggttgtatagctttagaaagtgttctatgtttcagtgggcagagttgatttccttcactgagtattctttactcacccccctttttcccttttttctcaggttagtaagcgtgaagagttatgtgaaataatttgttcgtgtatgaagtttaaagaaaacatttttggcaagatcatatgaataacatgccgtcttggcctataaggcggggcaggtgttacacctctgccatttaatttcctaaaacagctccaacaatcttcttcctctcaaagtcagcattcttaatactgtttctgcaagataggttctctatcaaagcggttgcatcagccggatacctggtgttgaagtaaccatttctcgctgcatcgagagccatctgatatctccaatctactcctctgaaaaaggtaccaataagttgtacctcagtgaagccatgatgcgggcagtcccgttgatactccttgaaacgaacccaagcggcattgaaagcttatttctcagctcctaagacttagcatcatcatagaaattattcaagaatgctatcttgatgcttctccaagtcttgagggaacctgcttttagttgtttcagccaagaagcggcttccccaacaagtgtataagggaagagcttgcatagtaggtagtcctctgagactccattagccttgatgctcagaacgaggtcctcaaaacgctcgatatggtctattggctgctcatgagacaagccatggaaaggatgctgggaaactaaagcaaagtagcctggcttcagctcataatcgttcctctggaagggtgggggtacaatcgctgatcgattagcatagaataaggccagttgaaatctccaagagtacgacgtggttccctagctggaggaatagctgcaggaatctggggttggtgtcgatcgacacctctgttgtgtcgctcgacacaaccgcatctgcgttctgctcccgaagtgtcgatcgacacctagttggtgtcgctcgacaccgagccctgctacgtttctggcagctaattgcgcattgaggcgcgcctgatcctcattggcgtcctcagggaggatgattccatgctcatccaatctctgattagcctcattgtaggcttgcccatcctcatctctcaaaactccttcctcatcaagtctgatgactttgttaaccattgctaatctctaagttttgcggttggtgcgttcaagttttcccaagtccagaacagacaagttgatcaactccttctgttgtgtgctccttgtttgcctaggcatacacatgacacacagaaaagaagaaacatgtgagtaacaaaataaaagtaaaaactagacgaaatctctaaactaaactcaatggtgactcccaagaactttggcaacggcgccaaatttgatatggttcaaattgctttaaacctactctctcaaataagagaacaattgcagtatttaagggtcgaatttcctcaaagtttttttgttcacacaatgagttgaatgtcaagattaagctagcagggaatgattgaaataaaatataaacaaagtaaaaagacaccaggttgattggttgtaaacgatgaaataaagatctaggaatagggtattctcaggaaactattggttagtagatctaatgaaagataggttgttatcgaaccatttttaactcaaactctaattatggaataatcggtggtgttccacgaagctctctatgtctatagataagaataaccggagaagccgagagatctttaacctaaagatgcattctaaatgagttcaattgttcaccttagtagataggccgattcttattacacacctataaaccaggctcatcgaataatagatacaactacatatacttatggtgtgtatatctattgtctggattcaagatctacttaattactttcgatcaagcattaagattaatcaaatatgaagaattctacagataacctagcaaaaggggacgatctactaaaccatatgaatccctaatgagaaattctattcctaacaagcaaactactcagacatattgattgaaacaagcaacataaatgaatgagaaagcataaacacagtaaataagatgatagaatgaaaggatctcttcactgtattgagaactgaattaatctctaaagaacaagggatgaataacttatgtctctctgaaaatagggatgaaaagaacttgataaaaggaacttaggtctaaacaatgacctctaaaaatatttataaatcctataaaacgtccagggactaataatgcaaataggaaagttttttggggcaaatttccacttttgtaaacttgaaagcgtcatgcacttttctaggccgaaactggtgtcgatcgacagtccctctgaatctggaatctgaaatcgtccttagcttccttttccttagcttttgctctagaatgtctcctcatctccatagttgtcccactgcatagaatacctgaaaagactctaaaaagactcgagaaataacataaagactcaaaattctaaacctaaaacatagataaaatctgtaaaaacagggttatatcaatcactatccagaatatattgcaaatcaaatgcaaacagctgataaatgagattttataaaattattgattctcatacaaataaatatgaacttagagagttcatagaaaatctcatattccagctaaaaatgctccaaaaatatatctctggcggatgacatattatcgtctataacacgttaaagaatgtaatagacaacttggttccaaatataatgaaaatcctcgaaaggagcaaattattatacagaggattaaactcttaaaagaggagcatatagactcctaaagaggagcaaaaacattccccatgaggagtaaaaagactgattgacatggttaataacgaaattaggtacctaaataaaatcatttataataattaagagatctcgattaaccatgtcattacgacaaatataaaaccaaaagcaaaggaaagacaatataatgtcgacaagaaaaatgatctatgatctagcgcgcaatataattaatgaggatcatgaatctccattctctgagtgtaaagatatatatatatatatatatatatatatatatatatatatatatatattggccattaaataaagagatagtcagtctacattattcttgtataacaaacgagtaatttctggacatatggtccaaacatcaaaaagagtattatgatacttaagacaaaacggtgtgtcgcgccgatatttatcaaaaccacttgatattgaattgatgctatataaatgacttgaactatgtctcatgagatgtctgaaggactaatctctgaaaggtatatgatattatattttcgggatttataagcacgatgattttgaacatcatcaaaactcttaaaaagttatttggaataaaacatcttggaaagataaaagtgtctcaagatattctggctaaacatctaaagtaattgatgttatataagttacttctaaaggaagtcgactctatatatttggtcatgaaacactatatataaatagcgacgagtatttatatattttttgaattgtacccagcatttgctattgatctacttgcaggattaactcatctccttcggttagacatcaagataagtcaaattatgtcctttattatctacaaggttattttggtttggacttattttattgtagaaatctcgagtttggtttagttagttttgcagatgaataatttatatcagattcatcgcaaaacaacaacctcgcgacgtttctagtagcagactttgttcattgcttgctcaagtcatgccaaaattattgcgattcatgaaatatgtcaaaaagatgtatggcttagattaatgccatcaacatatacaagaagcaaaagcaatatagtcaccaatgaagagccaacaacaagataatgttgcatatgttttccaatttcagaggaagctatgtcaaaagcgacatgacaatacatatttctctaagattcttctgttacattcaagatgtcaagaagaatcaggacgatgatttctgtacatttgctcaagaagcaatgtagcaaaaagtcgcttccaactaaaacattcagaaaatttcttcacatatcaaaatgcaacttttgaagaagatgcttccgagggagacacatgatgttgagcgtggttgtactctttttctcttatcatggtttttatcctactgggttttcccatgaaaatgtgtttaacgaagcagcaaagaacacgcaaaagatagacatgaaagtaaaggtctatctctcttctaaaaattatgtcatatattgacgagatcaaaaggagcaaagagaatgatcaagatgcatcatttacgaaagctatgaagaaaacacgtctcgttcgttaagggagagattgtattactgtaatttttcttttaccatggattttatcttatatggtttttccataataaaattgttaacgagacagtaataataatgataattaagggaaagtgttgagatcggataattatccattattaacacttgcactcccaagctattataaaactttgtccccaagttttgaataatttattcattaatcttcctatatatacatctcatagtttcatttgtgtagtgaaataataagaaaaagagcaaccctctacgttcttctctcttcctttgttctttcttatacatatattaaacaaatattatatatttttttttttgcattatagtttataacatttttatgattatctatcaccgtgatctcatctctttatccatataaataatttggggaccaagtattttgcttaccaagttatatgatatttatccatttctaaacttattatacatattcttcattttgtaaacgttggtgagtagatgtagagagagtagtaataaagttccactttaattatactctccattcatctgcatctcttcctctttattataaacttcattacttcaaatatatatatatatatatatatatataaattattatttattttataaacataaatgaattaaataacaaaaattttacttatttcgtaaacgctcaaacggtaaagacatcatgatttgtgagaatatatctttttccggattgatcgatataagtagtagggtctgcctcattcacaatcaaataaaataaaaaagctatgttttttctggaattgatcgttatatatatggtaggctatgtttccttaacgatcaaatgaaaggttacgcttttttcggaattgatcgttgtatatggtaggctattcctccttctatacgatcaaacaaaagctatacctattaaattcttatatagaaggtgatgcctcctgaattcttttataaaaaggctatagtccataaattattattattaatttatatgcttattttatttattttattcataaagaataaatatgtgttacataatatttaaaaacattaagatatatttttaaaattaataatatagttttcttatgagaatatatgaaacacttgttgatatatgtttagagagtgcataaataatgggaagatctaggtgagctagtctctcgacttccaaatgcatcagattcataataatcgatgctttgcgttctccaaaatctcaaagaaacttgtatagtttcaagatatttattttataattattatattgagactataaattaatgcgtgtcaaatatttgaccataatggagacacaaatatgtatcatgcaaaaataaagatggtaatatttaatttaggatgaatatttatataatatggagtcgatgattgtatacctcctctttcattctgtggtaggctatgcctctagaatcatatgattcttagccaaatcagcattatttattttaataagctcattgtatataatggtcgactttcttaataacctccaaattaaatcccaaccaatctaaaatgagattcggtccaagataaataagcttggtaagccataatcttgaaaggggtaattacaagtcccacatttttaaaaggatccaaaattaaatacataattccgttcggatatgttattgatcctaaagtgggtttcatttccagatgaatgaatttgaagagttattatctcgagggggagaattaaaggaatcccacatcgataataagtcgataaactttagtgaatttgacatccaaaccgagataactctaatgatgtcatatcctaaaatttatgactttaagataaagtggaacatctaaaaatgatgtttactcaaattaagctttaatgaatcgttcataacggaaatccaagagattgcaaaacgattcatggtgatttaatctccatgattttacatggaacatgcagttttgcatgtagtaataattatatataaggccaacgattcataagaaatatttctctcatgttatttatacatgattagagatcaaatatttatcattttaaattttgtgggtgtgaaatatatattataaatgctcttcttcaccatataaaatattatccaaagaggatgaaatttatagatgttggagataagcagtggtggatttagaactttttttctatatggggcaatattaattatctataaataacaaaagtatataatataacatagctaaaaatgttacatttactaatttttcataaattttgtatggttttgaaaatttgtttataatattataagaatatttaaactacatgtataaatatttacttgcagacatatatagccattaagaaaagaaaaaaaaaaactaaatttagagaaataaatataaattagtgttaatggtggaatactgaaattatgaaaggaaacaaaatgttttgttgagaggaaagaactatttattgcacgagtattaattagaagaagtaagataaacgaataagaaggaaaatagagagtgaatctaattttatatttagtcttagggtccgaatagtaaccgcgttttttgttgtgcgggcaaagcgttattacagtgcggtacggttcaactgcggtacgtgcggaagaaatatatttgcgggacaagtgcggtttatacaaaataagcggtatagaataatgtttgattggtgaaaaaatatttgcggtgcggattatagattatatatatatattaataattaattaaatttttatgttaataaaaaaacaataacagatatttatacaccagtaatacaaaaattgatcaaaatagaaatttaattttgtaatatacatattgttacatgcgtcgactaatttcatcataaaaaatattaaaaaatattatctattactttgattttcccataacatatttgcaatattgtctcttatttgcgtcatatgttctccatctgctatatctgttgcttctatatcatctaaatcatgatcaaaatctatgttgtttatatttgcctctgtcattacatctgcaaaatctgcatctgagaagtttgaaattctgatgaaattatgtaatcccactgtagcaattaccactcttttttgaacatgaacattatatcttggaaaatcagaaagaaacttccttttttttccaaactccaaaagttctctcgataacataacataaagatgcgtgacattggttaaacagttcatgtttgtttctaggaggaggaccagaatagaattgagacatatgatatctcacaactcgatttcgtgacgatctataaggagctagaaatccttgtttgtttgggtagccagaatcaaccagataatacttctctaacggaggcaaagaaaactcggaatcactttgttgtgctatttgtagaacagctgtatcgtggcaagaacctggtgctccattctagatatatgtgaataacatattttaatcacatattgccatgatattcaaggatgcattatcgtgccgattccaatacatttcctgtaactcaggctttacttttacgcacacatgtgtcccatccgtagctccaacgaatccactaaaatatggccaatatcttcggtctacttgaagtctttcaggaattcgatagagttcttctcttgtcggagttctaatataatcacatgctaataattctgttgccgtaagaacttctctaaattttctttgcacagtttcttgatttcgtccaaatcttaaaccatcatctctttgaactttattgtgcccacatatccgtagaaacagcgcaacactttcttcaatacttatattcaatgttggttgaagaccataatttgtttgcaacatattacacaatgtcgtgaaacatggaagtgacatccgtaataattgaagacaagcagcatcatcttactgtagtcgacgccatatatttctccatcccaaacctctatcattttggacgggtgctctttgaaaatatcggtcaaaataattcaaagctggttaaattactaactctttaaattgttcattttccaaattccacaattcaattctttcttcgtaacttagattgttaaggtcttgtgatcgcaactgacatatacgaaatgcctgaaattcaatacaaacgatttcttgcattagtcatagattattttacaaacataaattaaaaataaattcaaatttaaactaaaaaaaaaaacttaaattatttcaaaacataaatgagattgataaaccacaaataacacaaactaatcttcatctcctacatcactatgatgacttgcattggatccttgcggagttgcctaaatattaagagacctcctggtctaggtgtttgtcgcatttgtccagtttcaaaataatttgtgaaaccgagaccaaatgatgatgtttgttgaattattggtggagtttcagttgttgcaccatctacttgacctccaactgaaaatccatattgaacatttgttgaagtcgttccgcttgaaccaccttgttaaaaattttctgtttcccgccattgtggagcatttggtgatattccccattgtggaacatttggtggcgtgcctcactgtgcatttggtggtgttccccactgtggagcatttggtggtgttcctcactgtgcaacgtttggtggtgttccccactgtggataaatgggaccccaaaaaccgggtgaattttgccctcccaaattattaccaacggaggatggacttctagatgatatacctcctaaatgtggactcccaaatgaatggtctgaacccaactgttttagcacatcttggttgttgcgtgaaacaccagtcatagcttctaacagttgtaccttatcctcgtcagtgcttgcagctatatcaatgaaatatagtgtgcttgggaagatttagcgcgataaatatcgcttccgcctttttaaattcatcgtaatcatcttggtcaaaagcaccaggacgaagttgttgaaaactttgtcgttggaattctctgaagccagtgatgatgtcttgtattgttgtttcaaaggattgtcgtctctgacttcctcgtgaaccacttccaatagaaactcgtgagcttcctccagatctttgtgcactacttccacgtctagcggttgaccaaaaatttggcctacctcgttgttgccttctagcagcagaattttggaatatttcatcatcatcaatggtaacacgatacacttcttcttcttcttgcgtttcaggaacctcggtttgtggcatgttaccactgtcactatctgagtaatcttcaccttcttcatcaactccatgctcgtggatcaattgttctcttctttgacgagcagaatgttgagattgtgattgaacatcatgtactacgagacatcgttgcatcacgtcccaaaatacaggcggttttcggttcaagctttttgttaatttgcatccctgtaattttaaaataatttagatacgtgataccaaaattttgaattataattgattaatacaaatatttgatgtacttacaaactcttgttcagtccaccatgcgtcagatgcatttatgaaagatgtatcaggatcaaccgtgatgcctgtttttgtgcgtaagagctttccacctcttgtaactttttttgaatttatcaagcttgtttttgaaaaaactataagttatattcatgttgaatgctatattgaacttttcaaccatatactctctaccgatagcagtaggattcttgagagtataattattcatggcaattgcttcgtcgaacaattgaattaatgttttttcatgtatgtacgtccatttgtacttgtctttgttctacaaatttcgtgaatacaatgttatttattctatcaaattaaagtaaatttttaatatatatatatatatatataaaatactaaatttacccatattgttgtttctgtaggaggagttaaaatttcaatgggatgagttgaatctgttcgtctggaagggtttgtgttccgtcgacgattggacgccattctacattcaataaaatccaacaatttctaaattagaaaataaattattatatatgtatgtctcgtacttttactcttgcatctatttatatatatatttttttaattttatacatattacaacaacacttttatataaaatacgatatagatcactggttttatttgacaaattaaacgagttacacatgtatatttaacacgtatgctacatacacgtgtatatgagctaattactaagctagttgacaaactaagctagttacaaactaagctaattactatgcaatatacacgtatattacaaaaagtaagagcaggatgttcaatggattaatcatgctttcacataaaccggaatatgaattctatatacatttcattaaaatataatcttgttctaagttgatagtgttgtgtggttaaaaaactctataaacaatatacacaaataattatctttaatgggggttggcaaatttctttaataacaaagtagaaagaaaaaaagagtatgatgagagagaatgaatttttgtgttgtgtacgtgaattctctcttcactgatttatcaatatacagaaaaaacaattaataaaaaaaagaaattataaaagaagataatattgtacaagcatttttattggatcactgcttaaaaggagtgtgacagttttgaaatgcggttctgtgttattatcctttgaaatccgcatctgcttctttttttttttttgaaaaacgcaatttatttttttgttttattgattggtgaaaaatcacgttttacacactctcactttaaaatccgtaaatactatgtctccattcactgtcttaggcactggaaagaatttgtctaattttgccatgtagcaatcgagtaattataactataagcttaaaattttccatagtagtgtggggcacgtgcccatgtaggtttgcacctaaatccgcccttggagataagttttcgctctattaatattgagccatattttagagatgtgctaattgcaagatttacaaattatcatgttgatgataaaagttccccatcactatgggagaattattgaatagtttggatctttgaacacataaatatgaacttaagagttcaaatgttgaaaatgatcactattcagaataaattacaaaccaaatgcaaacagctgatgaacaaaattttataaaattattgatcctcatacaaataaatatgaatttagcgagttcataaaaaatgtcatatcccagctaaagaatgctccaaaaatatgtctctggcggatgatatattattgtctagaacacattaaagaacgtgataaacaactttggttccaaatataggtcatcaaaaataaaaagaataaattattatacagaggattgaattcttaaaagaggagcatatatactcctcaagaggagtaaagagaccgattgacatggttaataacgagatcaggtacctaaataaaattatttataatgattaagagatctggattaaccatgtcattactgcaaatatggaaccaaagcaaagcaaaaacaatataatgtcgactagaaaaatgatctatgatgtaacgcgtaatgtaattaatgaggatcatgaatctccgtgttgtgagcgtaaagagatatatattggccaataaataaagagacaatcaagtctatattaatctcgtataagaaacgagtaatttctcgacaaatggttcaagcatcaaaaagagtattatgatacttaagacgaaactgtgtatcgcgccgggatttgtcaaaatcactcgatattaaattaatgctatataaatgacttgaactacgtctcataagatgtctgaatgactaatccctgaaagatatatgatatcataattatattcccgggaagttataaacatgatgattttgaacatcatcaaaactcttaaagagttaaattagaataaaagatctttgaaggacaaaagtgtctccagatattccaactaaacatctaaagtaattgatgttatattagtcacttctaaaggaagtcgactctatatatatgttcataaaacattatatataaatgctgatgagtatttatatattttgtgaattgtacccatcatttgctatagatttatttgcacgattaactcatctccttcggctagacatcgagataagtgaaaatatgtcttatattatctgcaaggttagattgacttgaacttattttattctagaaatctcaaatttggtttagttggttttgtagatgaaagatttatatcagatcgatataaaattatatcgcaaaacaacaacctcgcgacatttcaaaagtagcagacttaggtcgttgcttgctcaagtcatgccaaaattattgtgcttcatgaaacatgtcaaaaatctgtatgacttagataaacgccatcaaaatatacaagaagcaagcaatatagtcaccagtgaagagccaacaacaagacaatgttgcatatgtttcccaattcaaaggaagatatgtcaagagcgacatgacaagacaaatttctctaagattcttctgttacattcaagacctcaagcagaatcaagaagttgatttccagtacattcgctcaagaaacaatgtagcagaaaggctcttccagctacaacattcagaaaggttcttcacatattcacatatcaaaatgcatcttttgaagaagatgcttctagagggagacatatgatgatgagcgtgattgtactcttttttccttatcatggtttttatcacactggatttttctatgaaaaggtttttaacgaggcagcaaacaacatgtaaaagatagacatgaaaataaaggtctatctctcttcgaaaatctttgtcatatattgacgagatcaaaaggagcgaagagaatgatcgaaatacatcatctatgagacctgtgaagtcttttcgaatgggaattcacgtcactgtactctttttctcttgtcatggtttttatcctaataaatttttccatgataaagtttttaacgagacaaaaatgatggatactctagggaaagtgttataaaataaacttatgattatccatcaccttgatctcatctccttatccatatatataactttgggaccaagtgtcttgtttaccaagttatacgatatttatccattcctatacttactatatatgcttcattttctaaactttggtgagtagatgtagagagagtaataataaagttacactttaattatactctccactcgtctctcgcctctcttcttctttattataaacttcattacctgaaatatatacatatatatagattataataatattaactttgtttgcgttatagttcataacaccttctaatttttacggtgttttcgaccatttctgttaggaataccgttcttctcaagtgaactagaatccaaaatcatttttgttcgccaatggatgatgaacaacttcataaaaaagggttaacttttgaagaaaaaaacatttagtttgtattttattacatagtatgtcgttataatcactttgtttagtctaaatcatttatgtgaatttttgaaaaagtagtttgctaaattccttcgacacttcataccacaattttgtataccagcatttagttggatttttaattagaattttggaaacaaaagtggatccactatatactaaatcattgcatgtctcttgaaattccggtttatgttagtaagaatttgcgagcttcgactccggttgtttttttcaggcttttgtaagcttataccacggtttaagtaatcagaggaacaaaaaaaaaaggtacgtgagattcattttgaactaaaatattctccctgttcctaaataattaatatattttgtataaagaaaattgttttaaagattatttcaatatttattaattgtaaactttaagaaaaataattgaatactagattttaacccgcagtacaccgcatgaacaatttatttttttaagttattatacataaaagtttgcaaattatatctatctataaaatatttttattttatagtttacaattgttattaagtaacgtcctgtcaaacccgtcccaccaacccgtcccgtaaaaaaaccatttattttgtaataattaaatgatattaaatattttaaaagttttattttagtaactcatcgtgtagttaatgtggagagatttagaaaagattgttaaatgtcaaatatttaatttgaagattttttttctaattatcaaaagcaaacattaaaatccagttgcaagcattgtaaataaattccaactacaggatttatttcacaaaatggctgcaaaaatgtatatgtagatatatcattgattacaaaaagtaatatatttataattaatatttaatatgtgtgaaaattctagaaaatcaattatttaggaataaaagagtttactttagcattttcgtattgtcaaattagtttagcattttctttagcatgttgatagagttttagagagaggcctaagagtttgaaatcaaattaaaatttgggctaaatttaagtgataatgaacccttatatatcagaaaggatgttggactttggtacattaggtgacggcccccagaagcatgtgtccgtgtctggcccatggaaagtggaagcttgcaaattcttactaatttatttttaggatgataattttaatttatttttttcattcttaaataaacagggttaatcgaaagaccaaaatttcacaaaaaatacaagaaaaagaaatacattttagcaatacaaaagacaaaactaaaaaaaaaaaacaaatcaatcatggattctacatcacaacataaaacgatatcttatcggaaaaacgcttgcatgtgttttagcaatacatatgagatgtaatatttacaagagaatattatgtgattagacacttttttaaaagtttgtccgtaaacattccctatttacaaagctaaggttatcaataaatgtatagatggttttagaaaataaatcacaagtctaacaaaattataaaacatgatcacaatcattttccaacatatctaacaaagatgtttaaattataagaacatgttgaagtttgagtgcaatgattttgatatgttatagttgagcgtggagaatgatttcaactacgtattgggtgtatattggacatatattaattctcccatgatcgaattggctccgttttttctttcttttttttttgtatcaagatatctttaagatttattagaaaaatgtattcaataatttttttatcatgtatataaaagttaatattttcagagaatttaacacgttgaattctcttcataaggcagaggaaaatgagagaggagagtggaaacataagtggggttgttgttgaagttcagtagacaaagcattaaggcagacaaaaataatgccccaattgcagcataactcttttaagttttcatcatgagaaaccagctctaactttgatgcaacttactctcatttctttctttctttcagattttcacacatgtaattttcttatcgtacgtttccccttttgacataattcattacaattgcagcataacttaaggtaatatatacttcttaagttgaaacatgtaagtcttgaatgttctatctgttgaaaaaatgcactaaactcattgaaaatattaattagttgtatatgttaactgaaaaaaaaaaaaaaaaaacagagaaaggtcgaaagatcttatatatgctaagtgttgtgcatagtgaagaggaagtccacaaaaagtgatagaagactagctgaaacgacacatgctagggtggtttgtgtatcggtcaaaagaactaaggggggtacactctcacacataacttaaatgatgtaagttctagatggaacatatgatgttaaagcactcaaatgtagctgaattgagtgaggtttagtaattgaagaggttcttattatggtttccgggattagttaggttgtttgttagagatcataataaccatcttatatagatttactatctatattacattacatgcattaagtttagatctgtaatgtgtttcacaaacacaagaaattagaatacaaaaccccaaaataagaccaaaaccttatgccaggtctttcaactaactagttgtagtcagctatagtgttcccgatggtcacaaagcatagttccggtagtaacatgtgacacttacaaatacttcagcatccctaattaagatctaattatgggctcccgtcatgcaaatgaacacaaagaaagtgtataattaaaaaacgattttttttttgtttttgtaaagaatgttgcatgaagacccaaattagatctatattatacaaataaaggctaatcgagaagttatgaaccctatcaaaaagaattgtcacgggatgatctctcttgtcaatggaagtagattattcataaaaattatccattacacatgaattatgggtaaagactggaattacactttacttctagtaagatcaaacaatatgaagcattagacaagcaactgagaaggtatgggcagttgatgtcccttataatagggtaaagtaacagctgatggtaagaaaccctcatggtttacttaaaattttaagtttccaaattaattatggtaaaagatggtatctttgaaatatgtcaagagatagctgaacgtatatcttgtccatgttgttatagatttgatctctctttacttcaatctcacacaatgaaatgaacaacgacttcaacacaaacacacacgcgacttgaaaatcagaatcaacacgaaagtaaacgagaacaagaggcgagtttgttaagtcggttcagctgatcgatgtgatcaagcttacgtccggagccgaatcaatccggaaaattcactatcaagaagtgtttgctcaaaaccagagcttacaatgtcaacaatggtggaactgaatctctctctctctgctctctctcactagattacaagaacaaagaaaaagatacaaagtatgagaatgatcgatgatctataacagaatcttgttaagtaacagaaaccctccactgcagttagagactctctaatccttcaactctgcttaaccggttttaaccacttcactaaaccagcaataaccagactcaatcctcaatgatccaattaaaccattaaaccaatgagaaacttgaatcataaccataacaggttttaacacatgtcttgtcttgtgattggcgggcataaaatcacctaaaactaaaacctacaccacatgtttgaaaactttacttattcgctaacaaaaacatgaacaatattttgatatttattttataaatgagtttctagataggatattagagtctaatataaatgtttgaaaaattctcaagtgatatataatgaaaaactttgattataatgaaagcgtctgatgtgatttatacattttcttttttgaaaggattttttatttattttatctatacatttacaaaattaagtagaatttataatgaaaacttgcaaattaataaaataaccaatgatttagaggtattatttaaaaattataatatattgtttatttatttcacttaatagtctatctatatgtcaaagtatgttgttagtgaacattaaagcatatatttttgagaactgactcagatgaaaggataaatttgaggccaagaaccctcttcctcaatccctaattcgaaaagaaaaaagaaaaatcgaacatgccttagactatctatgtggcacgagtaatacagaagacatttagcttttctactctgttttgggtagttttcttaggtttccataatatttttccttttcactgtaacttttttttttttctcgatcactaaatttaacattaaaaaacaaattgaggtgtttaagtgtgagattgaaatatgtggctttctagagttccataatttatttacgatagagtgactatgaaaatgtgtatttagacggttttgtttgctattttttgataaataaaaaattctattgaaagctaaagaattgattaatcaagttagtaagttacatagtccccataatgacccatcaaatgacacgccattacatatagtgatatagagttaccggaactgatggaaaagctcaatgattcatctcggtcgaaccaggattaaagagctagctagggataaggcaaatgggtcagtgaaatagttggaaacttagaattattgaccatttactacaagtttaaaattaccgaaacttggaaacagatatataaccgatcactacagtatcaacttttttctcaaaatctctctaggtagttgtcgtcgcaaacggcaaaacttagccaaaagaacatattatgtattgagttgtacttaaatattcagcgatataggctttcgtcaccatctctatggccccaactagacttatcacactcttgattgttggttctacgtacttaaccttttggttattggtctcaagttatatattgaagttatatattccattttcatataacacactcttgattagattacatgtacaataaaaaatagacgctatataaatgtatgagaagatgttttctgtgcatgtaaacctgttttgaagatgtcgtatcgagtatatgctcataattactagaaataataatattctctggcgtgggccatttcaaatgattccaaataagaaagagacataaatcacctcaaatgcctatgattattatatcttcatcgtgccctcaatatctacccaacttgatcccccgaccattttttcatcattgttttctaaatgcatacacgtacgtatatatatagtatgtatattatcgtgtctaaatttactaattcattctgagatgttaggttttgtttagtgttaatcaaactttaacgtattaggaccgtctggcctggtcaataataacattaaaaagaccgtttcaccaaattaatcagaagaaatattcaaacttcatatacttttcaatttcatatatatagcgatgactcaatatgtacattgaccattcttctctatcatgtaggaagtaggattagtgaacactttctagtttctactatacactctttcttttaaaataatttatcattgctaaattttcatagtaaactaattacaaaagggtttttttaagcaggtcacctaacatatcatcacttaaaacaaagaaacacaccgtgtggaatgacttaccagcatcctaatcctcaaaaggcaatcaaatttttataagatttgcttcacgagatgttagtaaaatatatgcaatgaactttctacctttaaatttattcagctactgcttaatattagaaagaaagtacccataaccaaaaaaaaaaaagtttaagtttctcacatataatttcaagaagaagaaagatcttaaaacttatgctgacttgatacgtactgtccaaatgtggtaaagaactagaatatgaacactagagctttttttttttttttgtagtaatatgaacactagagctggatgctatgtacgtttaatttgaatgaaaaagaaatatacttttcaacatattctggaggtgatttctcatatcagccacaaagcctcaaagacaacgagtatctgagatacaagctataaatcatctttgaacaaaaaaagaagaagctataaatcattagttggtttctcttaagcgttttagttttatatatttaattatgtataagagagaaggtaaaatttgtaacagaaagggacaaattacctaatgaattacaccgagatgatacactattattttaacttaaacaccactttttttaataggtttgacttttgatatgtgatcaaatgggtgctaaagtagatttaatatgttaatatttttgttacatgtctagaaaaatctaaatctgatgcaacaccaaaattttggttattaaattgtgtaaaattcaaactttctagggaaagagatatgttaagttgacttattttggcatgtcattggtaagatcaccttttttttttgttgaactggtgaagaactcttatcttttcttctttgttttttaggaactcttattttaaaattgattgaattccggaaatttacaaatgttacacattcttttttttttatgttaaagatgttacacattactatttcggtaaataaatttcgatgcgtttgtttattatatacatatatatttattctgataagccgaaatgtttacttttaatttttgtatatggcacaacctcgtgccttctacggaagctatagtaatgtttaaggagtagtaacgtaacccgaccgagagtaaatagtaaattatctatcgcagaatattcaaacttaaatagttacaagaatattagtgtttaatctagcgattgaagaaaaatcaagtaacgttaatgaaaacatccatcacattctttttacaaaacatcataatttacaggtcttcggagatacatatatagatagtagaagatgaattcaattcggacaatctgaatattgaactcaaataatcaaatccaaaaaactaaactatactttaatatcgttaaaaatgaatttatttttcctatatcttaaaaaaagaaaactaaatccgggcttggaaataaaacaatgttaaactttagttatttaatttagattatattttagttaaaactgttatccataatctgacaatccaaaaattatatatataacaaaaaaaaaaaaaaaattgaaatccatttcgaacgtcctagcttcactatacaatgtccgtaaatgttttggcagtactaaactactaatctgttattaaggcgatacttaatatgggacacaactctcaacgttgaaatgaatcaaacaaaaataatttgattatttcacgaaaacatctcattttgtagttagtttcatatgtaacatatatttttatatatatatatatatatatatatatatatatacacattgtaagagaaaaacatgtatgtgagtaattttgaatctctaggctctagctaactacgtcgaaaacattttaacaaaaatagaaaaaaaaaactacattgaaaaagaaagggacaaatactaagacctagctttttatttcgtacagacagggatggagagtagttaaaaaaaagttgccgggacattaattagactacaaaacctataatatatagagggaagatatgtcaaagtaacgatggaacaaaacacattacacgtgtgaactgtccttgtagaccaacgaaccaaatccgaattagattctcttcaagacctaagagccaaatttgtaacgtaaaaacatatacatagatacattatattacatacagtacttacaacatgtggagagaatcatataccccattatgggtcatcgtaacgtgtagacagagtataatcactagatatgagaataaatatttcgacggaatatatcattcgtaaaaaaaattatgataattcaatctcagtgactacaatctgattttaagataaggtttcaattattaaaaaataatgtaatatgatatttaattattggaatctgtagggcaaatccagggatcaactgttgttgttgtagtagtagtagtacctgaagagcctttgatcggagctgaagaagaagaggaaatgttattatgaatctccggtggcttttctgtccggcgatcaaactccgagaactgcctcatcattagctggtggttgtcatcatcagccgtaggatggtgattttgttgtaatgctccaagattcatcgagtcaaggtcgtgaagagaggagagtgttggttgatgatgatgttgatgagataaaagagactggaacgtagaaacttggtgagtttgagggagaggtagatcaggaaacgtcatggaagtagttgtgtggtgatgaaggttgagtaaagaagatgttgaaggattcaaaggtttttgagggataggacgaaaagggttataagtaagaggatcggaaggagatcggaaaatatcgaagcggcgagtagtggaggagaaagggtgagagaaaggagaggcagggacgccggtgaattcttgaaccatagctctgaagttagaagtgtcggtggtgagaacagttgtaggagctcttcttgaagctcttgttcgttttctagggtttcgggaagaagagggaggaggaggaggaggaggtggtggaggttgaggagggaggagatgagtttggttaagaatgtcgtcggagatgagattgttgacaaagtttagataagtagcggaggaggaggaggaggaagagagggttgttgggtcaccgtagtaggtggaggaagacggtggtggttggaagggtgggaggaagaaagaggagtgatcttgtggagcaccagttgatgaagactcgtgatcatcgctcgaagattgtaagcttccactgttacaagaatccatgtggacatgaaagaaacaagaacataaagacaagaagaagaagagaagggtttattttggtgaatctagggttttgagaaatgaagtgtatgggagaggagaaagagaaagcaaaaagttttttttttttttacttaaagaggttgaagggagaggtatggtgtcgccattgatggagagagatagagaggaggcggtggctggcgaagagtcaaactcaatatgaaagcgaaaacgagagagagagagagacaaatatctctttctttctctagtggggatgtgacgaatgtgaaaagatagatagtgttggatttttacaacataaatatatacacacacaataatcaaataaaatatacattggagtttggtccacttgtatcgggtactatataaaatcttacctagggtaaattattttcttaaaacaattctatccgaacaaaaatttagctacatgtaatgcttaaaaccaaaggaagtactaattgtggttatgacacacaaattaataaaagacataaattttatgtttcgtttttattaatatagtttaataaaacattactaataaaaaaactgtttttatattgaaaatgtaaatcgaaacattttaaaataaaatttaggatatacaaagacacttaatttaaagcaaaaaatagtaaatattgttactgtttaaagagtagtaataaatgttatttatttcaaaaaggtcggacatctctctactatgtaaattattatatatatatatatatattagataaggactcgtaattttttaatttataaaaaactaaaatcaagtttaacaaaacattaatcaacaatatttgtaagtagaaattgtttaaacaattaaaaatttttttgtaataactaatcaattaaaaaaaactgtttttatattgaaaatgtaaaacgaaacattttaaaataaaatttaggatatacagcaacacttaatttcaaaaaaaaaaatagtaaatattattattgtttaacgagtagtaataattgttaattatttcaaaagtttggacatctctctaatatgtaaattcttttatatatatatatatatatatatatatatatatataccatcgttaacatgtttgtttatacttatgggtatttatctatactatacggaattagaaagaagaatacatggtaaaaaacgaaaaaagagatttataactttatgttgattattcataaagtatttataagaaacactatatatgacatgtttatacttgaattttaagttaattaaatttccttcaaatatgaaacaccatttttctctttcaactatcctaaactttcacatttcattttatattaagactttaagagaaatgattttgtttttttacttgatagttcatataattttgttttaaatgcggagggatatgctttgaacccggtcattcacaattattttgtgtaaaaaataataattttacgcatagaatttgaaaatcatttctaacagcagatgatggctcttcaaagctgtgaattggcacattgaaatgaaaactctccaacttacagctccacatctgctactgattctacaattgggctgctgggcttcttacagctactactttagtaacttatgtgggctgaacataacattttggatctggttcagttactccatatttttatgtgggttttcacttgaaaactaggcgagcaagtccattgggggcacatggaagattttttttatcatgaatccttaacaaaataaggcaaaaattaaatgaaaaatgtgatataagtttgggaaaaatgttgttttatactgaacattcaaaaagtagccaatcaatacgtaaattctaaagtcggtcaaattaaacatgataaaaacgttgaccagccattttaacaaaaacaaaacgttaacctggccaaaatcacgaaacgttaacttgcattaatagatccgattaaccccgttagcagacgttaatgaattctgttaaaaccgaaaacggcgtcgttttgtactaaacgaaacaaaacaaaatccccaaatcgaaaactcaatcccttaatccccaaaacaacataacttgtgtcgttcttcttcttaagtaattactaaatttttgttctttaccacatattatttaattatttcatgataaatccaaaaacaaaatgtctttttcatttctgaagagttgtatttttttatcgcaacatttaaaatgttgatagttacttttttttttttatgtcttttcatcgtaacttttcgctaacattgtactttttcgttagtacatttttatcgcaatttctcgtttgtatttttgtcattttaagattgacggttatttattttggtagtatcttttttatcgcaacttttcgttaatatattaataatttttttttttcgctagtgtcgttccatcgtaactttctattcacattgacggttattttttcttttagtgtctttttatcggtttactctaaatgctgtgataaatcctgcatttagttcatgttttcgttccttataatgtgtgttctatttgtattaaacacagcttattaaaccaagcatagagataaagatggtggagaatataaaagtatatatatacatatatatatatatatatatgttaacacttagttaagagtgtttatgtaattagttttaccttaatcacttcttagtctctgtatatatatgtgtactttccattactatgaataataagaattactattctctatatggtatcagagcataaacgctcctaacaaaacctattttttttttcaaggccgccatcttcacacctctcgccatggctgctcaaaacgatgctatccctcttaattcaaacatagttcttaatcaacatgatgaatgtctcaacgctcataagcaacaactacctcatgtggagcttacaagttcacgcccaccttgacggacatggccttgatggtcacctcgacggatcgatcaacatccctccacccacgattacatcaaatggtgttatatcagagaatctgcagttcaccaagtataaaagccaagacaagctgatctactctaatctcattggagaaatctcaacaaatctccaacccttggtgtcacgcacgaccaccgccaatgagatctagaccaagctctctgacacttatgcgaaaccgagtcgcatccatctccaacagattagaaggcaaatcacaagctggacaaagggaacaaaaacaattgatgagtacatgaatggtctcacgatacgataggatgagatggccttacttagcagacctgcataccatgaaaatatcattgagaagatctttatcgggctgctagaagaatacaagactgtgattgatcaaattgaaggcagagatcatcagttacagaagttcatgagagattactgaatcatgaagggagactcctcactgttgctacacaaccaaccaattttccagtctctgctcatgttaacacaacaacaataacaaccgctacaacaacaatggatgacgctctaacaacaacaacaactccaactggcaaccatctcagtcccaaaacaacagtcgttctgacacccgtgtatcgaagccgttcttaggcaaatgtcagttttgaagccacaatgctaggcgatgcccccaactcaatcacttcagtccatgtcgtctctgtctcttaccaatccgttcaagccctcgcaaccacgtgccaatctcgcagttggttcatcttacgcgaccaacccgtggctccttgactcaagtgcaacacaccatctaacatctgatctcaacaacttagctcttcaccagccatacaatggtggtgatgatgtcatgattgcggatgggtcgaacatgaccatctctcatacgagttccactctcatttctaatcaaatttgatctttactttttgataaaatattgtgtgtgcttaatatacagatgaatcttatatctgtatatcgcctttgcaacactaatcaagtctctgttgaattttttccagcttcatttcaggtgaaagatctcagtacgaggtcccattactccaatggagaactaaaaatgaactgtacgaatgaccgatgtcatctcctcaagctgttgcgatggtgtcgtctgttggtccaaaaccaactctcacatcttggcattcaagattgggacatccttcttctgttttgcattcaataatttctcagttttctctactcgtttcttcttcttcacaaaaacttttatcttgttccgaatgctctattaataaaagccataaattaccttttactaaaaccttcattgcctccacacgacctcttgaatatatatgtaccgatgtttggacatcaccaaacaattactttgtcctcatagatcatttcactcgttactcttggttatatcctctgcaacgcaagtctgatgtcaaagaggtttttattgtattcaaaaacctcgttgaaaaccgattccaatgccgaattggtaccttgttctaagacaatggaggtgaatatatcgcacttcgtagcttcctcacagctcaaggcatctcacatcttacctcactgccacacaccccggaacacaacagcctcgctaaacgcaaacatatgcatatcgtcgagacatgccttacacttatgtcaacggcttctgatcctctcgccttttggccctatgcttttgcaactacgatatatttcatcaatcgcatgcctacatcagtcctctctatgcaatcactatttgagaagctatttgggacaacaccaaattatgggaagcttagagtgtttggctgcctctgtttcccttgattacaaccgtatacaagtaaaaagcttcaagctctgtctcaacggtgtgttttccttggttactcgacatctcaaagtgcatacttttgttatgatcaagcaacaagatatatgtatgcatcacgacatgttcaattcgatgaaaaaatgtttccagtctgtccaacgctacacctcatggtgcaagaagaaaccgtcaattctgaatctccatcagcacctgtcgtctcacctatacaacctgaaataccaattggccacacaccggttacattgccaccgtcgtaagctgaaaccccgtcgtgagctgcttcctcgtcgtcaccttcgtcttcctcgcgaaatgaagaagacaaccaaatcttagaaaatttgggcccaactcaaacaggcccaacaaccacttctcagttaaatccggcccgaaaacagctcctagcccacatcaacacaagcccgaatcaaaacagagaagaaatgctcacctcgtcttcttcacgacaaatcagagagacatcactgtcgctcagctctcaaactccggccagctcaacgggaccctcacgctctgaccttcacctctctccgtcgccgaatacttagttatcgtcttcttcctctaaaaactcttcttcctcatctacctcttagcccactactccacataaaaatggattgacacccacaatccagcaaattcctccacgtattgagcccaatgttccaccccaacatgagttacgagtcataactcagccacaaccaccaacagatgcaacaacatcacaccaagtcgtgtctcatcaatcacataaccaaaacgatcaaccttcagaaaatgtccccaacatgaaaacttgagccaaaaataacataaccaaaccaatccaaaaatttaatctcattgtttcaggtccaccatcgaaggaacctacaacaatcaagcaagctctcaaagaccaaaactggagtcgtgggtgctcatccgaatttgatgctctaacaatacaccaaacatgggatttggtacctccagcctctacacaaaacatcgttggatgtaaatgtgtcttcacgacaaaatatttctccaatggcgtcttggagagatataaagtgcgccttgttgccaaggtttccaccaacaatactggaaagactatgctgaaacattcagtccggtaattaagtccacaaccatccgtcttgttctcgatgtcgcaactgcaaaagcatggcaacttaaacagttggatgtcaacaatgcttttctccaaggcaaactcaccgaagaagtatatatgtcacaaccacctgggtttattgacattgataggccctcatacgtttgccgattgaagaaaccaatatatgggcttaaacaagcacaaagggcatggtatacgactttgaaacaatatttactatgttctggctttgtcaactctgtggcaaatacgtcgttgttcatacacacctcaggacataacatcacatatgtcttattgtacgttgacgacattattgtcactaggaacaacaacgttgtggtcaacaaatttttttcctcgtttgtagaacgcttctcgatcaaagatctgtcggatctccattcctttcttggaatcgaggtaaaccaaattgccaaaggtcttcatcttatgcagcaaaaatacatcacaaatcttcttattaagcacaatatgcttgacgccaaaccagtcactacgccattaccaacctcacctcaactcatacttgacagtggtgatcctctccctaacgcttcccaatatcgttctattgtcggcagcctccaatatatctccttcacacgcactgatatctccttcgctgtcaataaattatcacagtttgtccataagccaacacatgaactcttgcaggccgcgaaacgagtactccgatatctagctggcacaatcacacagagtatatttttacatgcctcctctcccatgactcttcatgcatttttagatgcagattggacatgtgacacgaatgataatatctccataaatgggtatatcatctatcttggctctaacccgatttcttggtcctcacgcaaacaacgaggtgttgcaagatcttcattcgagtcagaatattgagctgttgccaattgtgctgcggaggtacgatggctttgttctttactctatgaactcaaaattccgttgccaatagctccggttatcaattgtgataatattggagcaacatatctttgtgtgaacccgagtttctattcccagatgaaacacaatgctctcgattatcactttgtacgaaatcaaatccaagatggcttgctacagatctttcatgtctctaccaacgttcaattggcggatactctaaccaaaccactaccgagaacacgtttccaacatgcatgtcgcaagattggtgttattcaagtacctccatcttgaaggggtgtataagagtatatatatatatatatatatatatatatgttaacacttaattaagggtgtttatgaaattagttttactctaatcacttcttagtctgtatatatatatatatgtacttcccattactatgaataataagaatcatcattctctatagagaacacaccggatgatccaagacagaggaaaccagacattagtaaggccaaagaagtgttgggctgggagccaaaggtgaagctaaaagaaggactttctctcatggaagaagatttccgagcaagacttaacgtcccaagaaactaaaacgcacaagaaaacacagacgccgttttgagttcacgagagttgtcagctgttgagttatatgatggtgctattatactacaaagtggtgggttttggtttggtctcatgttcatattgcttttgttcgtagagaaataagttgggaatgtgtcctttagtgaggaatgactcttctttgtttttcagtatattgtgatatatttttttgtggttttaatgaaatttgttcacacttaattatctcatggaattacagttaaaattgtcttacactaactaaaatatacacattaactaatatgagtattgtgtgtcactatcaatttttttttaaaagtatttagatgtgaataaagaaaccaaatctaaatcgataacatcgtggcaaattaaacaatagtttatagacataaaagaagaaaaaggaaacatcgtggtaatatttggatattattagttagttagaaaataaagtaaaaaggaaactagcgatatagatttttatatttgattaaaaatcctctagcgatattactagataaaatttccaattctttttggggaaagtaataactaactactaggaaacgaaaacctctagtattatatatacgcatcataacgatacaacaacactatctctcgcattctccaaaatcacacaacaaaaatcttcttctaacttttgagagtaattctgtagatcgacgtaacacaatgacaaacatcaatcgcttatcaatgtcgacaatgttcaacgctttacacgaaatcctgaatgaggagcctttggcaattcctcctcctccttcacgtggcggctattcctacttccacatccgtacaacggagatggatttgcaaaggatgttcaacttcatgactggaagcgaagatttgaaagacgacatctcagtattagacacgggaatgcttgtggatggcatcttttttgacgtctgactccgattacttcatggtcatcacaagaaacaagaacggttccaaaagcctacagaaactcatgaggatgtcagatgacatggacgtcttcttctttgtggctatcatgcgcctcttcatccatgtcatgatcgacaaatacgcctcctacgtggcgatacaggggatgagaatttttaaacaggacaagagagagttgatgtatgatcacattcttcgatacgcgcttttcctggcgcgtgaccagtatggttgcattgcgctcaacgaaatcataaaagagttggacgatccttactatagagacgagctcatggacatagtctcaaacaacgctcttttgctaagcaacgatgcttatggcaactttgtggtccaacacgtgcttaaactacatgactcccgttgcacgggtaacattgctgataaactatgtggctactgcgttgagctctcgtttaaaaagtatggaagctacatcgtggagcgacttttggaggtgagggacataccaatggcaacaattgttctggatcttttagcgtgcaagacagagatgttgataaggttggcgaggagcgagaacgggaattttgtggtgtgcaaattactggaattaacaaatgacattctcactgctgatctattttacagtttggtgaataagctcaggccttatcgctttctcttgcataggtttcctgaaagcaagattgtagccatcttgggctcaatgcgtgtcccaaactagttaatgctcgttatgttttgagtgttctattttttctttattttttttttaaataaggtttgttgattagtgaaagtctctagtagaagaaatttgtcaatttattttggttttaaagatccaaatttgattctaactaatcaaacataaaatattgcagcttctatctattttacagttcaaaaatagtattacatgatatgtatatagacgaacaagttacatagtaaaagtctatttctttatgatcaattctcaaatttgtgtggtaattagcagagacgagtcgccaacaaaaataaacaaataacaaatcttgcatgaataataaccacaatcaaataatttacataaccaattatctataaggaagagtattgagtttataaactaatgtatatgttaagagtcacaaaactataaaaaaaaagaggccaattcttttgcaatacatcaacttaatccttaatatctctctccgaactgaagagacaaagcaccagttccacaattgtgatctacatcatattcagctcgtatttaaccaagtttcatacccacaccataagatgaaccatgtccctctcttctgaaagccgcggtcggattccctttcatatcctttgagcttcccaaatcgtttccatgctcagcaaatgcatacccttgtgtattcttcacatttactctaagctcagcaccaacctctacaattttaacaccaaaagtcactatgaaaattagttttaaaacgatttgaataagtttaggaatcatacttagctcgacaatgtttctagctgcaccaagctctcccttagtgtagcgaacatagttaggacctccaagagaaaaagcatcatagcctggtagatcacctacacatcatagcatggaaaactagacctggtggttgcggtttaccgggaccttcttctaattgcctcagaggaatgaatttttttaaggttagttggtggcggttgaagagtggagaattgcttcctatacctaagcattgatccacctggatgatcttcctctctccaacaatagctccattcacaaacttagtgttgtcttgtgttatgttaccttgtagaaatgctacacgatcgatgcccataccactgagagttgttggagatccattaacattgattgctccattaggtaataaaaccttactttttgaagagatttcccgttttcatctctagttgttatctcttccaacacaactccatatgttaatttactctgacgtgtgaagtcatgtgcgtaaaacaaacaacctagattgtttagatgcttgtgggagaagaaaaaaagttaatcatgagggacttagtaattacctcagttatagtgctttcacaccagctcgatccatcaagattggtgccactgcttcctcaaatccaggtcctccagtgagtactgagctaagtttactactgttgaagatgcttgttttgaaggtacggtttctaggattggaaacaccgtctagatatggatgtacatactcaagcttaaacgaaagatcatcctgcgggaaaaaccaagttatatatggaagttatcagaccacaatttgaaagagatatgtataagaagcatataaaaactaagtgtacctcaggattcaagaagttactagtggctattgaacctataagagatcgattaagacccttgatgtttggatgttcgaaagaaatagtcccgcttggctgagaagaagcctaaaaacgcaagataaactatagacatatagaaaattcagtggaaattaaaaattttaaaagttccaagtttagtagacaatgaacatatacaacaacacaaaccaatgaaggatatcctccgggatcaggaacaatactccgatctgcactaccttctactgatttttgatctgtctcttgaagcttgacctcaacaattacacctccttcccttttctcatttggaattggcatgatctcgatatttgagaacaagcctaaagagtgaatgttcctaacagcttcgtgcacaacttttatgttgagcacatgacctggacgtaactgttaaccaacaaaacatatattcttttcaaaagttacatctctcatctgaatcctctaaagcaagttcttgatttcaactcaagataccttgagctctcaagagacattacatgtcttggaatttgtatgcgcacgacaagaatttgtgtgttaccttcagctacattaccaagcttatcttgaaactgaataaccaactgagttatgtctccttccataacttcaaaaataagttccttactgttcaagttaccaaaactcacaacattagcaaaactatacccttggtctgggtaccatttaagaactcgttccttaaccttatgcaaaagcctcgcacttaaactccttgatctcttagcatatgcattgcctctcgctgaatcgatcccgaaagcaaacaaggcctagccttctcaatcctctgcttgtattccttctcctgacttcccaagtactcaatcatctttttttctgtcatgactgaatcaatctttaccggtttaggttgtgcaattaaccctacatttatgcattggaatctctctatggcttgtcaaatgctctctgcaaaagagattgtaacaactagggttccgtcaggctttgtcttcccttcgaaatcaactttctcaaaccatccacaagtagctagggtttctaactccttatataactgagctttattgtaattttctccttcttaaatcgataccatctcgtagaaagctttattgtaattttctccttcttaaatcgataccatctcgaagaaagaatcctctgtttcaacggtggcttttctctgccgatcaaaaacgataatatctgagattttgtactttttaaacccagttagcttgtttaactgtacaacaatgtgataggctcagggtgcctctggcttgtgtgagaagaagactaaggacatgcgaaagaaaggcaagaaagttagagaacttcttcagaaaggtgttatataaaagtggctaagtctcagtaagtctctgaatgaggtagagtgtttgcttctattctaataagtctcacatcacaaagtgttgcgttttgaacttgtaaggggtcttacatttaagggttttagtgggggtttgctatttaaaggaaagtttccctttagcgttactttaccaaaaacatttacaatcaatataaacttcttctctcatcttactctccgccgtttccggcgcatttctctatttccctctcttatttcttaagtttcagtttggttaagctcccaagcttaacattggtgctttccttgagagctaacaatggctccagaagatccaaaggccgttggtcccgagtcaaggttctgaatcgccaggactaagttcagttcacctcctcccgttgagattccttcgcctactctacccctcaaagttcgcgttaccaaccaagagaaagagatgactgtgattagagaaagggttcaacagctcctgagatttcagatctatggtcaaacaagagatggaagagagtcaacacctctctccttcttaagcccctgtcctgctccttagtttccaggaacgccgctacccatcgctgagagacagaacagagacatcttgcgcccttgtcctacaccggtaacacagtctaggccacaacacatgcactttaacaccccacctccagaacaagtgtatccgcaactacccccaagagcagatttgacagttaccaacttggagttatctaactatgaaggtggtaacccagatgactggttattcagattcgagcagtgtttttaaacccacaacgttcgtgaagaggaaaaacttgcaaaggtaatctcttctttaactggagattcaataacttggtggagatgttctaacgatagggaaaagatatactcttggaaggattttcaggataagtttaaggttaggtttaggccaagtacgagaagttctactatggatcatttgctaaatatccggcagacgagtactgttaatgagtacagaggcaggtttgaagagctcattgttgagttacctcatgtgactgcagatttacttgaatctgcttttctgaatgggttgaggaaacacttaaaagatcaagtagtgagatacagaccagtagacctcatggacattgtagagataacacgaatgattgaatctcaggacagagacaacactagctatcaagtccgtcaacaaaaccgaccttctactgcaaccacacaaccttaaactactgtgagggcttatgacaaggtgttgtcaaagagtcctatggaaccctataaggatactaaccctacttcagggagtggtattacgaacattggagaggtaaggaactccaatccttgccgttattgtgaagacaaatggttccctagtcataggtgtaggcatctagactgaagagtctgaatgttattgaagaaaaggaagagagtcccctcattgaagagctagcagagcccttaacaccagaagaaggtgaagcagatgaagagttacatatactctctttgggttccttgtctgatctttccagaggtaaatcgatgaagatcagagactatatcggaagtaccagtgtagtggtgctcattgattctggtgctaccagctgctttgttaatgagagattggtcaggctgaagattggcgcattatagagactaggggatttggagtcaaagttggtgggggaaacgtgataagaagtagtggaaagatagccgatgcaccaatagagattcaaggaatagaattcattgaagatttcttgttgtttgatttaggtgatcttgacgtggtcctaggattctctaggttggcaaggctaggtgacaggagggctaactggggaaagctcagacttagttggcatattggtaatacttgggtgactatacatggcgaccctgaaatgtgtagagaacaagtgtcattcaggttcatggagagagtcataagatacactggtgtggcttactttctggaattatccgttctgtttgatcacaatgaaccacaagacttgtcgaccgttgtgcatgctatgaagacagtcatggaaagttatgagtctgtgtttcaaatgccaaaccaattaccacccgctagaaacagagaacacgctataactgtgcaagagggtacttctcctattaacctccgaccctataggcactcatttagacataaaaatgagattgagaagttggtcaaggagatgcttgattcacagatcatctgcccgagtatcagtccatattcaagtccagtgttgctggtaaagaagaaagatggtggttggcgctttttagtggattacagggctcttaacaaggtcactataccagataggtaccctattccggttaaagaggagattctcgatgaatttaaaggtgttgatgtgttctccaatctagatttaaagtcgagatatcaccatatacgtatgaaagcaagtgacgttgagaagacagcctttaaaacccaccaaggccattgcaaatttttggttatgcccttcgagctaactagtgctccctcaacatttcagagcatcatgaatgatttgtttcgaccctatttaaggaaattcatgctggtgttcttcgatgacatcttgatttacagttaggacatggagattcacgtgaagcatcttgagatagttctacaactactacagttacacaagtttttcgtgaatgctaagaaatgtgtatttgggagtagcaagatagcgtttttgggacacattatatcatcacaaggaatggaggcggatcctgagaagatagaagttatggttaattagcctcagccaaaatctgttacagaactaagagggtttttgggtttaactggctactacaaaatgtttgtcaagagttatgggctcatagcaagacccctcatagatctcttgaagaaagatggctttaaatgggaggacaaggcgactcaagctttcaacaagctaaaagaggtcgtcactcagctgcctgtgctagtactacccgatttccagaaggagtttacagtagagactaatgcctcatgtactgagataggggttctgctttttcaggacaaaagacccatcgctttcctcagccaggcatcgattagatccgtctacaagagagagctactagcaatagtgatggctataaccaagtggaagcattacttaacaggtaatgagtttgtcattaaaacagaccaaaggagtctaagacactagttagatcagaaagcagtttctacgattcaacagagatgggcttttaaactagtaggactgaagtacagaatcgaatataagccaagtgtggacaacaaagtagctgatgctctatccaggaaatctcaaacggaagagtttattcaactcacgctgaaggctccacagtctttggatatttctgctttgaaagaagaagttaaggcagatccagagttaaacaagatcattgtagagattgaaaataatttgtagaagagtggggattacagtgtgagagaagggttgttatacagaaaaggacgattagtcattcctaaaggatctcctttcattccaaagctattacaagaattccacaccagtccatgggtggtcacgaaggagctctgaagacctttaagagactaacaagtgaagtttattggcgaggaatgagaaaaaaggtagtgaagtttatcaaggactgccaaatttgccaagaaaacaagtatttcacgctctcacccgctagtttactttcaccattacccattcctcaacagaaattggtctgatatcagtctggatttcgtcgagggtttactaagaacaaaagggttcaatgctatattggtggtggtggacagattgagtaaatatgggcatttcatagccttgaagcatcctttcacggccaagtctgtagctgaagtgttcattagagaggttgttagactgcacagatttcctgctactatggtatcaaatcgggataaggtcttcttaagtcacttctggacagaactcttcaagatacaaggtacatctctccaaaaaagcactgcttaccaccctcaaacagatgggtagccagaggtggtaaacaggtgtctaaagtcatacttaagatgctttgcgggaaggagaccaacttcgtggatacagtagttgccttgggctgagtattggtacaacatgtcttatcattcgtcaaccaagaccacacctttcatggcagtttatggtagagatctgccacctatgttgagatacgatgatgtacctactcccaatgctaacttggatgagcttcttaaagacagggatggaattctgaatgagttaaaggagaatcttaagtcagcccagaacagaatgagtaagtcagcaaacaagcacagaagagatgtggtattggagatagacgactaggtttatttgaagttaaggccgtacaggcagaattcattggtccacaggaaaaatgagaagctttcaccaagatactatggtccttaccaagttgtcagcaggattgggagagtcgcttacaaactcaagctgccggaacacagtcagatacacccagtattccatgtttctcagcttaagctagttgttcccgcaacttacacgcctcaagagttacctcaggtattgactccgtctctagaatgggcaacagaaacggaaaaacttctagatatcaggaagacaacgaatggagatggagctgagatactagtgcagtggaaagggctccctgcaacagaatctacttgggagccattggtcagttttgcgaaacaattcccaaaattcaaccttgaggacaagctcgatcttcttcgggggagcattgataggctcagggtgcctctagcttgtgtgagaagaagactaaggacaagcggaagaacggagaggaagttagagaagttcttcacaaaggtgttatacaaaagtggctaagtctcagtaagtctctgaatgagctaaaggctttgcttctattccaataagtctcacatgataaagtgttgcgttttgaacttgtaacaggttttactttaaaggttttagtgagggtttgctatttaagaaagtttccctttagagttactttaccaaaaacatttacaatcaatataaacttcttctctcatcttactctccgccgtttccggcgcatatctatattttcctctcttatttcttaagtttcagttcggttaagctcccaagcttaacacaatgttcgctggtaaaccgtaagaatcccaatcatgtgagtgttcttcgttggcgatagccactggtattgccagagcaaacaatcccctccaaaatccgccatctcctcctccaccaaatttccctcctcctccacccaaattccctcctcctccgccaccatttagaatcgaggcaagagaaaagagtcgtagaagaaacacatatgcggaggaagaaacagtagtgacgacgagagatatcgcaagtggcttacggagattaacattggacgaatctttcggcttagcggaggacgcagagacgataaaagatttcgcaaatgagttaaggagaaattttttggatgaaggctcaatcttcttccgataatgtaagtttgctgagcaagttaaggatttgaagcgaggggaagaagatgcgatgaaatgaagtttgggagaagaagatagagggttatattgacggtgagaagagagataagaagaagcggtagtgtaagctataggcccgcgataagctggccgttgagggcgattgtgggcatgacggagaggagaaagaaaaaggttttgacttgcagacaaagctagaaactttttgttttcggtagacttgtctttaattgtatagtagtattaaatggtttataccacttttgcgatacatacatatatgtgttcggccatattttttgaaaatgggcctgagttgatctcttaacatcatatttgatctacttatagtgaaacaattctttatgtttttttgccaaactaacaaatactaatatttaatcaggttctgtttgtggcataggttgatcatataatgtttttttattttataaaattatgtttaatataagtaatgtatggaagggataatagttttgtttttttttctttaacggtattgtagtttagttagatttagtggatcatataatgcttttgttattttataaaattatatttgaaataagtaatgtatggaaggcataatagtttaacttttttttgtcttcaacggcatgatagtttagttagatttataattttcttgaactgatttggatatagtttaaaggtattttttattttattttgggatcatttattttctaattgctaaaatattaaaaacgaatttcttagtaggattaggttttaagaaataatattttcatgggatatacacaaaatgttttgcaaaaaaaaaaaaaaagagaatcccaaccactatatatacacaatcaataagctctcagctgctcaccataaacctaatccttgaaaaccaaaaatgtgtcgatagagtacttcgaagaagacgaagggattcactttgatccatcgtacccataagtcatcaacgagtatcttaaaaagaagctaagaggtgaagaatgtggaggctttgtagtgatgaaggacgtttatgccaaggagccatggttgctggaccattccaacgatccttttttcaaggaagacgagtggtactacttctcggcaaggactcagatctccgagaaaaagattggacatggtaactactcgaagcggaagatcaccagagacgacaacgatggcatcgaccgagggaagtggagggtgaataggaaagaacatatcatcgacaagggggctatcattggatcaagaaaaacctaacttataagagcagcaaaagaaacaagaagcagaagagagaaggcgattgcggctggattatggatgagtttgtggtagtggacccggaggaagaagataagtttgaggatagtcgtctggaagattcagaagtataagaagtccaagaaggacaagaaggatcatcagcatgaagcatcttcttcctctaagccgcagccgatcaagaaaaagaagtccaagaaggatcatcatgacgaagcttctacttcttacttggagcagcagcctatcaatattgagtgtgagtctcttctagctgcttatttggaacaggagcagccactgctatgggatgttccgaacaaatcatcatcttcttgctctgttgcggaaacagaaagcagaatggagaaggagacatgattcaccaaacagacgcactcgcaacaaagaagaatgaacaggctgatgccatggatcaaccaatatccgttgctccggtagaataccctttgatggaagaattattagctgagtacagtgagtgatacgagtcagttccagaacttacttgatcaatatgaacctctctacaactctaccttcataaaccgttcaacgtgttcttatttgaatagctcttggataattttgtgttctcattattgaacattacattttttcagcaaataaaaatgtacattctttctagaattaattactcagatagcatagaaaatatgtttattcctagaatatcatacatattttttttaatagttcatatgttttgagtacttgtataaatacagttaacacccttgattattatttttttaattaaaattttttaattcgttttcacttaaaaataataaataaaaatttgattatctatatcattaacccaaatccaaaaaagcttttagatctaataatctccaacatggacgtagatcttcagatctatggaattttacatgattcgttacaggtttgagttaaatcaagaatagctactcttttactttgattttacatgtctctcgtttagtcttcctctcaatggatctatttggaaacatttctacttctatctatgttttgattcatacggtttagtcttcctctcaatggatctatttggagacatttctacttctatctactcctatgtatccctcaaacatattcttatttttcttaatttgattgttgatatttgaccaataaatttcatattgtcttccccaaaaatgtattataaatcagccgtaaagtaggcatgaccaaggttacggttattacggttacggtttattaaccaccggttatggttataatttttttttaaccttaaccttaaccgttatatatacggttaaaacggttacggttaaaacggttacggttaaatacggttatggttaaatacggttacggttatttgataattatgatacatataacatatgagacaaaatattatattttttaatctttataattaagtaaataaataaatagtgatatatcaaataatatttattttacgtgattatgtgtttcaaatatttatagtgaatcagctatctatttttcttaaataaaccaatgaataaacaaattaatggtcataattataatgattgaattaattacattttccaaacaaaaacaatatttaagagaagatgttgtgattataaataataatagagtataaataataataatatgaactacttatgatttgatttatggtaaaaagagtagtggagtaactacgatcgtagtagtgggcatattaaacgatttaagttactattttagtgataattatttatttagaattctacacaattataactatatttttaaggttttaacaatacggttaaccgcgcggtagtcagaaaatgtaggcgtgagaactcattggttggataaaatataaaacacaaaacacaacttatcgtttgtcgaaagttccttaatatgaagaagggtttactttgttcttaggacaaaaccaagccttaaagtcgtaaaactgaaacaagcatatcttggtgtctataacacatgtatataggtcggcctttacatttttgtttggggtaaactacagaaaatttgaatgcttccaagtgtatattataaactactaaaatacggttgatacaaagaaacatataaccatagttgttagtgatatatgaagaagttaaagaatgatatatcatatatccatttaagaagaacctttgaaatattaacttattgaaaagtgcctttgaaagattaacttagttttgctaacttataatggcaattggcaaaaaaatgtgaaagattaacttattgacataaacacaaagtagcttattttgtttggtcaattgtttacctaataagttctacgtaaataaaaagaaagaaaaaccaataacttttgtcgataaaacatgaagtattatttttttacagatttcacacaacttatagtttttcaaatgttctttaatatgaagaaaggtttagtttgttcttatgactaaaccaagctttaaagtcttaaaacttaaacaagcgtttcttggtgtctctaacatatcgaaggttgtcgaacgaattttaaatcagaaacaaatgtaagagacaaacattgaattgaggaattaacggtggagatagattaaaatttcctgggtttgagtgactcttccgcgtctttcttcttgtctcgttagccatggaggagacacaaaacaaatatttttgacagaaatttcctttgattttcctacgaaatataaatttggtagtaaattgaaaggattttggtaagtgttttttcttaccaaaattttgataggaaattttatcggaaaatacaatgttttcttgtggtataccaatgttgacgtcagcgctatgagcttataggtttatcgtgcgatttctgcaccaaagactgaaaacgtgacccaaaaatctctcttcaaaccataatcactaataacttatcaaaaaactgggaaaactaaggttctagattgattatccgaagaatattcaattgaaaatttaaccactttcaaccgtctttgtaaaacatgatttaatgtacataaagggacttaagatgtcgatgtgtggactgcatcatcaaccaagaatatcagacaaatcaacgtcatagtatagaaggtactttgttccaatcgaaatcataattaggaagttttctcataccaaaaaaaaaaaaaaattagtaggtttttggtttatgtttggtttgcttaaaaatcgtaaaaccgtatatttttttggttttcgaagaaaattttggatactcatatataaatatactaccgcgggtttaaatattttatttatttttctttacaataaaatataatttgtttttgttgttatttgtgttgattaattatcgataaggttgtatatgctttttattgagtcataattatgatattagtaagtctaatatgtgttattttatcttataggatttgacttgtgatagaacataccacgggataatattttattttttattcataatttggtttaaaataaaattatattatttaaacttttggtgttttcagattttatccatggaccatatgtaatttagtaacaacacaaataaaattatacatttaaatgtatcaaagaagaataacattaagaggtgtcaaagaagattaacacttatactattaatgttgaattttaatgtactttttgtaactaaaaatttaaaattgaaattgtatttgttatgttattattgtttgtttttgatttagtattgtatagttgtaatttgatttaattctaggaatacacccgtggtatccaattttatttttgtaacatgctattataattttctcaattataaattttgctagtattattagattgacaaatagtgtaaataagtgtatgtgacacttagggttctaatgaggactaaaatattacatgaccattaagacctagttagttaaataacccaacaccatacaacataagaatccaatttgaataaagaaaaaccacccaaagaataattaaaaaagcgaagtcgtagccaaactcatcccataatataaccccgtcccgttaaattaaacataactttggcattttcttataaatttcaaatatttataaaatttgaaacttcaaaataaatttaatatcgacccaaacttcatcattgaattttgattgttatatctagaatttctccggtagtatatcgtcccgtattaatatatttaatatatatttataattttaaatttcttgtaaaatttaatttataattttaaaacttatgaagttttggagaaaagttaaaatatttataatttttgaaactttgtaaagtttctatcctttaaaataaagaacccgagtaaaccggataactactttaattttggacgcctataaatcaagcttccttcttattcgtaactggaatcattttggccttttttatagtatggctctgaaccaacatccaattttttaagcgatgtgggatattgtatacatattatttcttcattgattgaataatatatatccgttttaaataatttgaattacgtcatatacagaaaatatataatattttattaactatttctattttatataaattcaaaataaattaaatataatatcaaataaatttgaaagaagaatcatatatttatgattaaattaggtaaatatgttataggaaattagttaaggtaaataacaaatatggttagtttagaaatattttatatattaaatttggtaattaaattaatttcgtttttaattattatttttggtagaaaatagtaataaaaactaattatggaagatccggttgaagattttcgggtcaaaatcaaataagaaatccgacccaattagatttcttaaaatgtacttcagaaatgataagtcgatttgttcattttatattgtgtttaataatattcttcatatctttctttttgggcttataattatttgaattctattctttaaattattttggtttataaactagattttgattctactctttgaattttgtttacttatttagtgatatactaggtgatcaaccgcgctacaccgcggttttttcggatttttttgtattgtttaattcaaatataatttttatttatctaatcattcacttatgcataagcaattacttttagtattaaaaatatttttttctaacaacattctcaacaatgcatcatacacataattcatcaacgtatttgaattactcctgttaaatcaacatttttagtcaagatttaaataaaaagatattattaagttatagtaaaatagacaaatagaaccaaactttgataagccttattgatttgttgaaacataaatgtaaaataattttcttctttcaattttcattgttgccacttttgcaaaagaaaacaaaataatacgaactccataaccgaaaaactctatcaccgaggatttgagtccaagaatttgatgctagagttctcaagtacttctcaccatttttaatatattatatagaaaaagaacaacctatgaaaactattagctaatccactatacaattatttaatcatattttgacttaaaattataaaaattaggggaaaatatccaacagtatgagaaaatcaattaaataatttaatttaagaaaaagacatacaaaataaaagaaaattattattgatacaattaattatgtaaaatgtttataatatatataattaaataataaatcaccataaaccattaacttacattaattattaagtggacatatggcaacatgcatctcattcttgaatacacataatttataaacataggttagattttcttagtcaaatcagtgcgcttctaaagatcgctatcactcggggtacacatcctctggtgtggattctcgcataaactttcaccccctataggacgctcttcagagaacagaggcaagaaataccctctaagcccctctagatctcatgattgggacaaagttgatagtagaagagacgctgccaggatttcgtcctcttttggcaatacaaatctacaatggcgagaaaaaactacttctagatgcagtccaagacgggatagctttgaagtattgataacacgacgttttagcccgttttatctattgttttcttatgtttcagagagaatttggtgtcattctagagctaagaggagaaacacgtattctaggtgccaagaaggttttaagagttttgaaactaaaagtatcaaaagacaatcattccagtacttcaaaagtttagcatccgaccgagatcttccccatcacggaaacgagatattttgatatgtatggaaagttagaagagtcaagatttacgtcgaagtcgaatcaaagcaatctatgaagccgtttggaagatatgacccaaagagtgaagacatgtcaagaaccggccgtttggaaataataagtccaaaacacatccggccgaggagacttgaaccctggcagctccgagtagctcaccaccgaccattaggtcatgcccaagtccttccctctttgcgccaccttcattaggctgctgccctgaagcccactactcggcccgatcacttacttatccggcgaaatgacgttcttacccctaaacctaattcttggccctcaagtattttcctcaagtataaatacttgttctaagccctaaccctagatgtgccttcatcacctgcgaaccctagccgtcgcctagagctgtccactcgccgccgcacctcttgaagcttgaagaacaccatctctctctttctctttctcgttttcgtgtaagactatttaaagtagagctttgcctcttgtattctacatccaaagaagtaatctctaaacttttttttaagttttattcatcttttgttatggtttactcaacccaacttttgattagctcctttgccatgagcgagtacatctctagttgggtttgagagggtttcaaaggggaattcatggggattaatagatcgaaagtctaggttggcggtttctatggcttttttgatcgtttacactattctttctagttgagtttaatcttaatgcttgtatgtccggaacgccacttagtacttgaccttaggtatttcattctttggcaaaatctcgtatgaatgcttgaactagctcaactgaataaagaactataaccgttgcacacccgccgagtgatagggacttatggactagaatcgaatttgaacttaatgctttgatcttgtattttgaaaccatgttagcacctaataaccgatagggcaactgagtatgcaggatattagtgataataaccggctttaacctactaaccgttagggttagctggtcttgatagagttttgtatgtccgagaatttgggagtaaacaaacctagccatgttatcacctagattgagatctataccttatttattgaaccatgacatccggcgaaacccccaaagacctaacgcttctcttttattgcttaccgtttagtttagttacttgtcttttattttggttactcattgcatacaacaacccccactcttttattttggccctagcttcactctcttcttaagaatttctctgaactacttctctccttatggattcgatcctaaaatactactccaatatattgtgcacttgcagtagtcgtgtggtctttcagataaaagcctgaggcaaaataaaacacgcatcaattctccaaaataaatgattcaatttcacataaacagaatcaaagagaaagtttccggggaccgtgggtatctgtgatagtgcccaaatctgacgcgttcggtggcaaaagaaaagcgtatgattaatagttttctctaccacgcaatatttgacacatcctgtatcacattttaaacctcttttccgcagattatttgtgaccgacacacaacccgcaaaaaaacaaatccacaaaaatgacgtaatttaaacggacattgcacattccatgggtatgcttttagctctttgatgttggggcctataaaacatgaattggcatccaacgtacctaaacgcatagtatgattatcaaattcaaccgtatagtttctagactttgtgaaatgtcaattatcaaatatgggaagattctcaaaaaagccttactaaataaatttttttctgttgctagaaaaagattcaaattagattgggttgaaaataaaataaaaaacaaaatctacttttttccgatgttctccctttgctataacgactgtcaacagtgtcaaccaaatcgtcaaaaatttttaaattttatttatgtaaaattcctgaaaaaaaatctgatttatttaataattttcaaaataatacttgtactttttgctgccagaaaaatatacttattaatttatctttaaataaaaagtaaaacctagttttttgttctaatattatccattttgtcgagatttgacatagatccaaattttaatttcactcagtttgtccaaatgatatcaataaaacaagaattattcttcggattggattcattgcaagcaaaaagtatgagaataaaacagacccaacaacatcttaaagcccaatagcccattaacgacctcgtcaattcccctatcttaaaaagacttttagccagtgaaatcttctggtaaatacaacagtagttcagggacatttccatatctaaggtttctgctgaatctttagttgttacctctttgctttcaaaacatgatcaatttgataggtggttagatgtttttattttaagttttgttaggttcggtttaattgatccggattgaacagagataggaccatataccgcaatgaaccggtttaaatttggtgaattaattattattatgttaatttgtgggggtgacataattaatttcaggtgggaggaggaggcctaacaaaatggatcagcttattagacataatatcaattgctttggttttattcgtggcattggcgtcaatctggtttgttactcataatcccgtaagcggccaaaaattagctaatgagactcatcaaaaactgcttaaattcccaagtccatggttaaataacctcacacatgaggcccaaccgatacgtcgcaaagggcctaagcgggtcattgaaggtccaatccttgcatgcgttcaacatcctaagtctgagtttgtgcctgaaagtgagccaagaagcattgatttgcatataggtcgacgcttatggttcaacgaagagcaagtggccgaggccgaaccaagctttgtggtatgttgagtgaaatgtatgtgacatcaacatctttaattatatgctaaaataaagttatatcaaaaaaggtgtttctaaaaaaatctcttaggtcatagatttttttttctttcaattaattgtataaattgcatatggtcaacattttcttatctctaataaataacatgatgaagatttgtgtggacattcacagttagtcaatggatgcattatcgcattttgtgaagagacatcaaagttcattgatttctttcttagatcgaaccatatcgaaaagaatgtgtctttactttttaccattttacttttcttttttttttaccttttctttctcttatagattaggtggtaaatgaattgataattaaattataatcagcataattgattttaatattaacataataatttcacaattactttttttttccagatttcataactcaaaattttagagtttagtcactaaagcaagatgttttctgaatatatatttgggcctctatcaaaccaaaaacaaatctttttcgcgtgaaataaatctaaaatctcttaataaaaataagttttttttaaaaaagggccttttatccttaagattttttaaaattctaatgaatctatatatgacatttgcctgggggagagaagagtaaatagatagttaataaataaaacatatgcataataaatagacccaaataacgtactggaagctttcctacatcagaagcaattttctgaactatttcttgatacaccggttcttgaactcctgttaagtatactgtggacttttccatactaatctttaggagaacatctattcttctacaatcatgccatgacatggtcgctggattttcggctcgaagtgttatagaagcatcggtatatacaatttggagaaaacgaaatggccggagaatgcatggtgaaaccccaaacccagtagctagactcattcagtggatagataaacatatctgaaacacattttcagctattaaaaagaagggagataaaaatacgacaaaggacttcaaatgtggttcgcctttcggtcttaatactctttagtttccaaattattcagatgtgtttgttgttatttaaattaaaaagcggttgcacaagttgtaaaacaattattttttattttgaattttaacattttattcaaaaaaataaagctaagatcattgacaaaaacttttctttcatgtatagtaggtgatggaaaatcatgctccttttagtataataattggactcctttcggcagtttgacacgttcctacgagcagatgtttggttatgtggaggcgcttgtagcaacaacgctagatcctctatgttaccatcatcagttcaaatctcagaaatcaatagagattgattcatgtgggttagaaacttaaggccatctcaaaattatgattacaaattaagctggaagtcttgtggcaggtcgaataggatatctgttttctatgcaaaatctacggtgagtcaagagacaacctacggtgagagatgggccctttgaaagcttaatcatctttttatgggtttcaagttttaacacatgaccaagattcttatcgtagctcaaatctcatactcaagaagcttcaatgagtcctctaagacactttgtagctcaagcagtcatttattcaaatgaaaaacaaatttcaacttttgaggcatgtgattcttcgtaatctggtcagatgctttgttttaccttttatgcgctggttttaacttttaacatactaaaaaaaaaactccctctgttcatttttaattgattttctagagaaaaaaacacacatattaaataaacatattacataaatatattagttcttgtgatttacatttttcataattttaaaccaatgaattcaattatttgtcttaaagttgaaaattcatcaataataactaataaatagtacatggaaaaccttaaaaattaacctttttgaaagatttttttttccctaaaagatcaagtaataacgaacagaggaagtatataataatattggtataataaacaataagaaaaaaaatattaaaattttcttaattttaatttctttgttagcttttcaagtttaaaatatgaaaatctaggttcccaaatatgtagaaaaattacttgtctcaaaatcttgaattggtagtaaaatttcaatttgtgataactaataactgcaatcactgtataccaaagaacagatattgtagccaaaccaagagcaaagacaggagaaattaggtaatagatgaagtaggagactgttaaaactccaatcatttgggcgatgcttcttcctaatgcttgtgaattgacagagggggaaaattcagctggaaaaaaacataaaaatgccatgatggataccccatatatcttcactggaatatggtaatgtgcaatcattataagattggctcccaagattaactcatacatgattctaccaagctttcttgattcccacctatatccatatgttagaaaattccacttcaatgacaattttagatttatactaatactcttttcttaatctttgtatatatatagataattttataattctttttgtgtgaaaataaaagcgtaccaactgatatgagtttcggcatgactatcatcaagtagaagttcagtatccagacatgtggtggggtcgtagtccgttattttcggtaaacaaatcgtaaaaacatatagaagtataagtaacagaaaaaatataaagtataatatgcctatatagcgttctgttggactatcacttgactcaaagagcatcgagaggagaataaaatatccaattgcatggctgattcgccctaataccttgctaatgcaccagatcaaactaggatcatctgaccatcgacagatgagagagagttcgcagatcccaaaacttaagtacaagaggaagagtggtgacaatatgatttcgagaactgtattgttatatatattcactgccataatataccctataatcagctcatgcacagttcgagaatagctgcacgatgcccacctaacaaattccaaatgatatttttttttcgggttacaaattttagtttatataatcgtataataagtatcacaaatcatttaaatcaaaaatgtatatcacaaatcatcatgtaccataaaatccattgtggaggaggggtgaactcatcatctatacctctagctttgttaacattcatctcctcgcccaaacaatacttttgtcttaacaatacttttatccaagaaacataatattttctctctcgtctctttggtttaattttgtttccgtagtggatttatagagtattttcaattagtcagattttcttttccttttttttttcaaacgtgtatattttcataagacataattttttccctatttgtttgatttaatagataaaatctacattaattcaatagtttatctgatttagaaaatgcttttttgatattttctaaaagttctatccaatgtttctaatatatttatgttaaatttctatataaattcagaagaaagtaataaaatataatcagtatatgtaagagatcttatccaatgtttctagtattctcaaaacgtgttaagaaaatatgatataccattttttatttcttttgtttgataaaaaaatatctccgatcaatttaattttttattaacaaaaataattaaatctgggtaagtaagtgggtagttgcagattatttgtttaaaatattagttttaaatgcgtaagctgtacctgtaaaattttaaccgtaattttaaagaatagaagattttgacagtaaatttatgattaataaaaatttgaattttgtatttataaattacatttttaaaattataaaattatatatataattactaaaattatttaataacaattataaaacaaaacacaaaataaattatgcacatctaagtaatgaaatatatatataagatattcgtctaaatgtataaattactttacatgttattcatataactatattttagattattagttgaaaataatcgtgacaaaaaattagattagctgcgcaaaaaggcaaatatgtcatggtaggtgttcaaaatcgattgaattaagctcatcaacaattgacttaagtttaaaaatcgattgattttgatgcttctttgcattgaatcaattcacgaatctccaattcgcctaattccttaaattaaaatccattactccacaaaaattgtaacgttctgaccgcccttaccagtgggctccatttcctctctagggcccatgaacccacatatgtccgactgttggtctgctatttcaggaaaactttaaagacttatttaccaatcctacaaatcaccacatgatctttccttatgttttgttttcactcacacagttccgacaatcactttccagaaggttactcatcctgaaacctttctagctcaagcatgcttaactgtagagttctctcaagatgtttgacccaaaagataaactgcactttggtgacataagtggccaaatcaattcttttaaaacccttatgcatgcaccaccatattcctgaaactggagtgttacagtaatcgtttaattttgtcaacaaaattagtgaagaagaagatgaagaaattggaaataatggtgaaagtgaccgatttaatacatgtttgaagatcaaacgacgaaaacttcgtcggaaatgaagattggagctcggaagttcttgccgaagcttcacgaagctctcgccggatatgacgatcggagatcagatctctcgctgatgatgcgttttctacgatttcttatattcgatcaaagattttaattatattattatttaaattatttaaaaaatataaataaagaaagaatgctatttgtgtcccaattgaaatacttttcgaagcaatttctctctagtatttattttttatacatgcataaaatgtatgtaaatatttttttttaactaaaactactatttactttttctaaataacaatttatggtaagaaatgtttagtttattttaattaaaatttaatatacaataaaaaaaaacctcgcatgttagacaagtataatctattgttatttataatcatgggctttttggtttcaccattatcgttgccaattattattttattattttcgtttttttctaattatatcattttgttgtgtgatgatgtgtcatttatacggagagagttgactaactttatgtaagttcttcaacttctaatttataggttaataatacattaattatttaattttacatattatttaattttacatatttaattgtactattactaaatttattttagtattacatgatttttttaataaaatcattttaatagttttctcatgatcgaagattttttttgtaatccaaacttaaagtatgaatgtataatagtcgtggattagtatataatgatttgagaaggttattttcctaaattgatatttatataataaatcaccgagggtgaagaatacgtaaatctaaatgacgagagcttatagtaatgagagcttgtaatgacgagagaactagctggagctttcatgtatatggaacctatgttaaatcacatcatcataaaattatatttgaatttaccatatttttatctagatgaatacccgcacgtatgtgttactattttacaaatattttatataatatcttttcatataaagtaatttgaatgcattgtttttgaaacgtaaatatgacttgtaattttttttttaaagttcagctatattagtacataagaaaaaccaatgacatgagtctatatatgaaagttggtcatctttcttcatatgattgacacatcatcactttaccatttttcatgtgtctactaactaataaatgtaaacttttaaattctaatttagagtttaataatatatttatcattggattttacatataattttatttacccattaattgtactaatactaaatttattttatcattacatgttttttaataaaattattttattggtttactcatatttttcgtaatcttaacataaagtatgagtgtataatagtcattgatatacaaatcatatatatgaaaggagctcaactctctccatccttccgccacgtcagcattttaagcttttctagagatgacacatcagctttctaatcttccaatcaaaacatttcattaatatgatttagcttttattttttatacatcagcttctaattataagtgtagaatagagtaaacaaaatagctcatgtcagatgggccatgtgtgttttagaatctattagaatgcaatattaataggtcgggcccatttcagttatggcttaatgtttctaaatccaacaacatagtctccctttctatacatcatatgtatttagaaaaacgttttataccttttaactgcaagaatggataccacaatagaagctacacagaactaaatcaatgagcaagcagctgtaactgtcttttaaatagattcacaaattatttcactaaagaatattcacactcccagcttatgggattacaagctttcactactataagctctaaaaatattcaaacagacattgcttatattgaatgacaattttcatatatatgattatctctatactacgtttacttttatttatgctgcaaatttttttttgtaagaatatgtaataacctgaaaaaacccgaacaaaaccgaatcgagatacttataattttgaaatggtctcatttttatagaactgataaaccattaaaaaaaactgaactgaaattaaaccaaaaaattcgtaattcacccctaattttgaagttcatagccatttgcagtttgattaatttggatcatcttgtacttttatggttttaatgatctgttaaaatagtgatccggattttttttaccagcatgaagacgttgggtccgtaaatattggtttagagatattattgggctttggttgggttcaattgctatatagacattaaagccatctactgtatagagccatcacctttatctttttttttggacgttaatcaaaaaaccaaaatcctcgactttaaaagaaaaaataataatttgtaatttatttcatttactcttttgtcaaatgaaaaattaatataaaaacttcaaaagatacaaaatttaaccgcagaacgagttttttccggaaataaagtcttataaaaagaaaacacacaaaaatgaaataaatcgaaaatgaaagttttacaaattgataacaagcatctctttggtttaaagtatctttttaggcgttagcttcgaatttttatcatgtctatatagaaactgttaatattaataaatctataagccaactgcataaacgtatttagacacaataacaagtcaaatgcattcaacagaactaagtagtataaataattaatacacgtacgaaaatagaaattagaaacaattatttacttttcttcacacaaaagttttcgttaatataaaatattgttaggtaaattatatatgttctgtaccaaatctgaataaaaaaattagagacacaatcgacgaaagctccgatgtgggaggaggaggggaccatcttcaagactgacacgtgtatattctttctaagtgatctccacagacacaaactttggaagctctaattagttccactaatctccataattacttgtaattattttataacaaggattaagaatcccacatttgagttcattggaatcaactccaaaccattataaaaaaagaagatatcatacacatgacacattaatatttgtatcatctcaatttttattggctagtgattcaactatcactagttaaattatgcaactcatcatgttttcagctataggttcgaggtcttggagcttactatatattgatatgtccaatttatactttctagattgaaagtaaactagtcagcttgttagattaaatattatccttccacattttgaactatattcaaataattaaatatagacgagttttaaacacaataaccacatgataaatgataaatgatatgtaaattgcttggttattcaacccggtaatgatttttttagagaagttataaagtgtgttttgtagattattaaagtgttatgaataagttaaaactacatctagatagaaaacccgatttgataaacgagtaatatctagaagctgagtttggatgccgcatcgaatctagatgcagcattccagctacacaaatgatgggaggttaaacatcacaaaacatatgttaaagaattcatagattcattaaatttgtaagaagaatttaataaagctttcaagaatctaacgctagcaagttaattattcatgagaaactaggtaattttaatttatagacagactcttagcgtttagtatgtgaggcatgaaataatttggaaagaacgaatagatttgggaaagatcgtgaaaatgtgaataaatcaacttttacttttccaattataaatattgttagattatgatcctttgattagtgtaggtacttttataagatgctggtaacttggatacatgtttctcgaatgaatgatttgtgaaattagtgcataggcttaggaattagaatcaacttttcgtacatgtgattatttgatggaccaccaatatattataacaaagcaaacttaggaccatccaaccatccaatcaatatcaactaaaatgtacatacatagctacatcaatatctatatttatgtgtgtatttgcaaatactcaataacatgtgcatttctagagagcctatatatgtaagatagtgtaaaggcagattttggtagggtttagtgagtgaatgaaacaaagtgaacacatgaaatgacttggaaaggtaaagatagtgaagaaaatagtgataaaagtgggaacgtgttatatgaatgtgtaggtgtccccgtgaacttgtaaaattcgtgccaaaagtctatatcgtcaatcaataattggagtttatggcacatagtttatttcaagtaaagaactcaatgatgtgggtttcaaagtggttgcaatttcttcttcttcttcttttggttttattatctttacacatgtgataaaagtatcttcaccttttgttatgtataatttctttctcttttcttggctctatgcattataaaacctcttcgattgtacccttttcttagtttgtttatccactaagtttaggaagtggatttcgccttctcaatcatatttgtttagttgaattttgatctctcacatataaaaattagggttttatgattaatagttttacgacttgatcataacaaactttgattaaattttatgaatccataaaaagatatatatttatgaaaaaatagatgaatgatgagctataaaaatgaaaacaacgaaatgttgtattttcactctaagatatttaagtggggttcctttcataaaatagagaaaatgagagaattagtcaattacttaaaatgaaaagtaggtatgggcgtttgagtattcagatcgggtctggatctggtttttcgggttcggattttttggatttagaaatttaaaacccgttcgggtattttaagacttcgggttcggatcgggtttttcggattcgggtttacccgaagtatccaaaactcaaaattttgtatcaatatattcaaattacttgaaaatacacaaaaaaaaaaacaaaaacaaaacatgagtatttgctatccaaatctatcgaaaagtaggcaaagtattcaaaatatataaaatatcttaaaatccaaatattttaggcacttagattgttgtaaatatgattattactaataaattatatctatatatacgtacttcgaatatgttccggtacttgatctggttcgggtttggatcgggtttgggtttttggtttttgaagtttaagatccgttcggatattttaaaattttagattcgggtttggatctgatttttagatagagttcagttcggttcttcgagttcgggtattttgtcgaggcctggtcaatcatattcatttaaggaaatattattgaaatacagttgagctcacatggtcgttaatctacttgtaatatcttacatacaaatggcagcatccccaaatcccaactgttcaattttcgatagcttcactatctttgtttttgttatcatcattccaacttgttaaatttttattgagacctccatacactttaatcagattttctattatattttcatgattttacatggggctcttcatcacgcattggctacagacttcatagttttcatgattagagaattatatataggttatagctatttttttctctctctctctattaaattccacacttgatgcatgccacctgaagcaaaccctaccatttgatctcaataataaatatagaggtcaaagtaaaaacatgtacaatgtttcttttacaaaaataaaataaagaagaggtaattctagtttaaaagttggtgacatggatgcttgcaagctaaggcttgggcaagagtccaagctttttgacaaagaccctatttttcaaggcctacaaaaatcattttaaaaagtatgtgtcagtttttatatcaaaaagcatttttaaaacaatgcaatttgttttatcttatttatttgctatgttggttgaaataaaatatttcttacgaaagctgcattcctttaggttccaaagtgtacctccacatgatattgtgtatatggtagggtacattttcatcaatctttagtaagtctattttagtgttgtcaagtctgaaattcgtttaaaatgttagttcggatgtagaattaccattgaattgtgaccaaaaaaataaaataaatacttaccattgaattagcgtggatcaacaaaattaaatcttttactattattattcctagaaaccattaaaatacgtttagttttggttatctattaaaatgaatactaagaagctatatatgtaatctgaaattagatatagtttagaaaatttaacatcatgactattttgctttttcaaaatagggttttctcaaagtttccaatttttacaactttacctttcacataaaaattttaaaataatactataaaatccaaaataatcttatacatacattgtaaaattttcacaatcacatacatttgatttttaaaattctaaaaatagagttgaactcctcgtcttgaaagcttcgatttgatatattatttattaaaatttaagaaatctgacaataacgaaaaagagttatattgaatattattttagacttcacaaaattattattcatttttgtggtgggttgtaaaattgcaaacattgggttttttttataacaatacccttcaaaatatattatatgaattatatgtatttctaatgggtagatgtacattatacatatagaagaatgatggaaacgtttatcgacattgcagcttagttactgtgatgaagatcacttcagattgaggatgaatatgagcgaggaaagcaaataataaagcggtattctactatatatcgaaaggcttatggagagaagcatcgtgtcattttttgttatgtgatggttttgtatttgatcgattatgtgtatttacttgtgttaaaagaagcgttaggcgctaagtggactggtgatctaaaacctagtgtttggacgaatcactaaattatactatttggaaattggaaaaatacatttaaacaaaatttatgaaattttaggtagtcgaaatggttagcgtcacataggcttctaacacttagacaggggtctagacgaccgactagactgttttatagaatattggtactatttgatatgtattcttggtttctaaattaataacagtagacggtattaaaaagagaatgatgaaaatattatactagcaaacttacttttttcttggttaagaaagttcctataaacttacatttgttcatgaagagtaaaataattaaaaaaacattgatcatatatacaacaatttttgttgcatagtgaaaactaattcatttattaattgaaaataaatttatgtcaggaaattggctatcttcctcttagtgacatttgtttccattccacgagtcgctgcaaaaactctcctacctgttcaaaacattattcaaaaaaagaaaagttgttagtcctcaagaacaattagagagtaataaaccaaaactcaaagaacaaataattaatattacctcggaaggttcttgtagagaatatgtagcactcgtttcctttggaattttggacacaagtataccaaagccttgtcctttgtttctcaaaacctgaacccaaccaaaattttaattaatttatctacaaaattaagttctaaataatgaaaatatttaaggttttatagtaattttgcagatggtaaatttaccttgaaagcatcctcgtccgtacgatcatctcctatatagatgggcaaaacatcgttagagttagcgaatcctaaggattcgagcaagaactcgagagctttgcctttatcccatttgatggttggtcgaatctctaagacttttcttccttgtgtcaacctcagtttcggatactcactcaatatcgatgtcacgtgttccgctaccaatccccagtcctatcattacaaatgaaccatacgttataattacttttttgactatgaagaaaatatttgtaatcttgatttattttcttaccttttgatcaacacaacggtaatgtacggagacacaaaacttgttgttctcgacgtttgctccttctatgtctctcattttctctactagacacttagagacctgattaagagattcgtatttttttccttagttagagaccaatatgttgttatactaagtagcttgaatttgacgcatagattataaatatagaaatagaaaaaggtaggagaccttgtcaatcataggcaaaaactcattcgccgcttggaaaagaactcctttattgttctatattgttccaaaaaacattaagcccttgttagtctctttatgaatcaacatactttaatatataaggttttatgattataccttgttatgtttgtttcttttggaaggtcctttgatgtccattccatggctacctgcatagtaaagtccgggaagtttcacaaatctacgaacctaccaaatataaaaacgaaaaaaaacacgttagttatgtctttttataaccaaaaagatcctaaaccgaaacaaatgttttattcaaatattaaaacgtaccttatcacggcatcttccagtgacaatcgcggtcgggaaatatctagccacgcctttcactgcctctctcatctgagaatcaaaagttgtcagaaaaccaaaaaaaaactaaaacaagggaatgaagaagtaagaagggaagcaaacctcttcagacatgtaagctcgatcagggttttcaacaatgggggataatgtaccgtcatagtcgagaaacatcacgatttgtttcccttttgaagcttcagctatctcttcaaacatggttaaagctgacgggtgttgagccatccaagaagagtattcatcctcctcatcggactccgggaggggagatatgttccccggtcgggtacgggttggggaagaagccctcatggcttcgatccaagtgtggatacgggtttgactcgggtcggcctctagcttctgcacgagtttcttccggggaatgctgatgtatcggccacctccgggagaaaacagagattggtttggaactctaaccgcaactccgatgctgcctttagcatcagagattaaggcattatggtttgtcattaggggcttaggaaaaaaaagaaagagcagatgttatgaaacagaggagaggggtttggtgtgagaaagacaagttgtcaagtcttaatacatgtgatgataatagactaaatgtgtggtcaatttataaacttcctctcaaagagtaaagagcttcctccacatcattccatttttttattattattcctagtttttttttttttgggtcgcatattcctaatttttaagttgatgtagatacaaatttgcaagttagaggattttggtccattaattagtaaatatttgacaatatttgtagcagacttataaagtttaataagttgtcaacaaatgtgtagtatttaactcaaaattcaaattcaaattcgacaacactgagataatataattttcatgtcgcgtgttttttttttattaaaagaaaaactaatcatgtaagtctatggtgaaataaagaattttattatgaaaatacaaattgagcaaaaccttgtatcgaaaatttgatctctttagtctcaacaaattctggattttcctaaacctatattcttcggtgttattctgttgtttctttgtgtatatattagtgttattttgaggtttcgattgaattgaggtgatagtatataataatataaatgagtgatttgccaaagtggtagcttttagtgcaagttgcgttctctcggtattctcttcttttcttcgctaaaatatagtttaattgttatggttagagaacttaagaaaataattttattatataaactatcgttttccaagttaataatttataggattatgttatgtatcaaatctattgttcagatattgatttgtattaaaaatatttactattttaaaaataattagaaaagctaaaaaaaagaaatataaatatttaattaactttaattttcaaaactaaacataatataaaatgacgtgttcagtctattgtttacaagttgacatgtgttaaaaaatatttttttcttaaataaataggaaaactgaaaaagtaacatatatatctaataaatttaaatttttaattttcaaaactaaaaaggaaaattaaaatctaagatggactttttagaattaaattgtattttattataatcaaattatatttgaatttaatacaatgaaattaaattgtatttgtattatgttaaagtagatatttaaattgtaagattaaaatttggatttaagaaaatactaaattaaatattaaaaagtgtatgaattactatttaaaatttaaatatcatcaataagatgaagcgtataaaatgaaaatacagtttattatgcagaaatagatagttaaaatgtatagaaaaatcgaatgtatatgattgaaattttatttaatacaaaaattactaaattaaatattagaaaaaatgtgtggatcattattaacttttcaaattttaaatattatcgataaaaatttaaaattttattttacacctacctatttagacgagttttatctaatatttttataaaccagaacttggtttgatatataaacaaaagaagcaaatataatatacttgaaaatgaaggtttatttattagatctcggtagttatcgttaaacattttctttataaagtagttatgagtctaacctatatctttggtttttagagtcgccgtggaagagtacgatctcttaaatatttgattggtaacttttttggtaaacatcagagtaaaattaatattttttgtgctaatagtgtctaccaatcactaccctaaagtgttgagttcctcctatcaacgaaacaaaactgttggaaaatctacgcaagcatatgattgcatacgattataacgtctcttggaactgtattactgctgtcatatcgttacatgactgttttatacagtattattatgcggcgttatattgttatatgtatgcactaaatcaaattttctcttttggtatccatgaagggcactacaagttataaaaaaagcttatactttagtttgtggaccatcgagttattggtttataactctttcttttttttggtcattaatttataactttcgtatgagaaattaaataggataataagtgtaaatgagtcagcacgttttggcttattacaaaacaaatatcacgaaactattcaagaaaattaacatctccttcctcgacaaggacatacgaatgcgacatgataattcattgagaaaccttattttaaaactatataatgaatttcgatttctctttcggccaacagtaatcttttctttaaaacacacacacggttacattgtcatccacgaaattgtttgtgtttttaatataagaaacgaagcttcctgacattttgcatgccaaaacatcgttgttaatattcatattaaaggcaatgcattaattttgttcactctttttgtaattttgtaatgtgatattcgacttgaattctaattctaatgttatacggtaaaagatgggaaaacaaaaagtgatgcacgcgtgaaagtgtaaaacagaaaaactcgtagtcaaactatgaggcatgcgtgtacatatatgtgtacgtaactttggtatattactatatgagagataaaagtctttagtcatctttagtctatacgcatacactatcgaaatccgggttctatgtacatttttgtcaaaagcttggaaaaaggggttaggccaagattgtacataaagtaattattccgaaatatataggcattattgccatatgcatttttatatacatcatatagtacatgtgcacaaatgtagtttccttgtaacttcataaaaggagacttttaacgtcactacacacggattttaagtttctcttattggtcgcattagtttcgtaaacggtcaatatattcttacggtctaagattcgtttttagacaaaggaataatgttcgtacaaaaatcattggaaaagttgtctaaatacaaagataggagaagaattgaagaaatgcctcccgtgagagtatatatttgttacgtcatcgtcttgcatgcatggagccacgttagcatgaccttgaatttgtatgaatgattctaactaattacatgtacttgaaaactaaatataaatcaatctaaagagactttaaaaaaagagagaaaacgaaatgcgaaatgagacggtatattattggtcttcgtggctacttgtcgtaatgcaattttataactgtagtatccacgtgcgtttaacttactatattgtacagtataatgtaattttatgtatttattatgtcgtaggtatgaccattgaccattagtttcttttacgtgtagaatcatttattgacttctacgagaagtactgatgcttgacggtcttgagttactatttgtagttggtaacgaaggagaacatatatacatgtgtcgttttgtgagacgtgcttgtctcgttttacgtacctaatcttctcttccgcgactcttttttctccaatgtaacacttttgctcccatacgtaacaagctagttattctgtttttgaattaatggagaatgccatcaaaaatcatttgaggtcattttaattagttaaggggaatcacttttgtacttggttacaaacacactcattccttaatgaagttaacgcaaatcatcagaaaaataagatcatgtaataattagagaaaatcttttatttgaatgatactacaaaagataatgaattattattttaacaaaaaaataatagtttttcattcaatggatcaatctgcatgaccaaaaaaaattaaactccatatttttctttaataaggaagtcttagatctttttaaaaactccagtcataacatgattgtattcatgcactctaaatttctatcatatgcctttgtttggtaccttctctttgtagtttcaatcttatttcctgagtttgtttgttatgtttgtaattaactaatttttcgtcaatatgttttaattaaagtttaaacattcacctttttacataattcatttttgccacaatgtgaaatctaagttctgtgattctgacgaaatatcgtataaagcaattttgatgtacactatactaatttcctaatttcaaaaaattacatatacacctaaaaatatatcatgctaaaagaaattacttgtcacgtagtagtagttaatataaaacatctaaatgctcaaaaatcaatcttatttgagcaaactaataagttatctaattgttcttccacattttgtcatttagtgcagtttgtctttataatatatgttctctattaataatgtctatttttttctcttaatatacttatattagtggagtgtgatttgttgtgatgtgatgttacatatcgtgctaatttatgattgggcccacgaaattatgttccacaagtgctaagcccacttttctttaacatccgaattcgaacctttcatgtcatgttcgcatatccatcaatttatttttcacttttcttccactctttttcatcctcatgtaatcgtacaatatatttatatcgactatatcaattggatacacatcatatttcatatactaaaccttaaactacttaaagcaacgatcagtcgatcacaatatgtttttcatacaaatataaataagactgaaaatattctcatagataaaactgtaagaaatgtgagtgttgagaatgttttgtcttagacattcgtatttgtaaaggcattgttatatacaaagctaagtttctaaatgatatacagacactaatgatctatgtcttcaaagtacgatatgtaagaataagatatagaacgtcaaaacagttattgtcaaatgtgaaggattcaacattcttaatgagttgccgattgaactgacttagtcatggaattgaaagcattgtttatactaagttctgcaacctaattgtttctagtttagaaaacataaagcagcctactagtttaatacacctaattctccaaatatccatgtgtgaagctttatatcttatgtagttttgaatgcaagttttgtaaagtttttaggtcgatagaaaaattgtcgtttagagagtggagattaagatctttggccagatagggatattatttgatatgctataagagtttttcattatttaatttacgttcgaatcattagtggctcttgaaactaaatgagaaaacctttgatgatcaccaaattccatagctcttttttttttggcattacatatcaagaagaaaagccttctcgcttatcacttctaaagtcattcacaatgttaatatctctaatctacatatttggtatgaatatcctgcaaggtcatgaccacgggatattgtggaggctggtcgaggatcacatgctccttataggtctttggagatgttaccacgagaggtcggtcaggctacttgaaacaataactcggccacaatagtcctcataaggaaaaatggaagagtgttcaataaggatttcaacctgttttaatcaaattgataaatcaatattcgtaatgtttactgaaaaaatattatttgtagttaaagttacattaatagtaagctaaataaatataattttatagattggagtatgattcacaaatatatagtagttttataaaatacacaccatagtaaatatatgtatgtgtatatatatgatatatcaatttaataaatgttaacgtagtgtttatttgataatgatttttcatatttaatattcttataaagaggcttgagactgtgattgtaaactgtaactttaattttgattttataattaccgtaaattaatatataaattatatattttagaaaatatcatggtaagaagaacaaaaagaaataggtatcaggtatgagaatatgtatgagagtttttaaaagaaattaaagtggtaaagtgtgattgggaaaattaggatttaaagacagaataatttcattattctcaatgtagaccaaatcaaacgttgttttagttgattgttttgtttttaatgaaaagagaacggaatatattcaaatcttacgtaatattcttgtgcatgataaattagagatttatttctatgacaaccgaactaaactatcagaaaaaggagagggacaggaatctttttgttcatgtaacttttgtttttgattaaaatacatttattcttcattttcaaaagaaaactgaaattcttctattttgattaagctaaatatgtatattaatgttatggaaaatgaaataatcctaaattttctgttatatgaaaacaacccaatcaaaattatgaaagttgagtgaaataaattaatttgccaatcattccaaatctgattcataaaatggattttaagatggttaataaattatttgaacgagcaccataattattttgctattgaaagctcatgactattgtacagtttttttttttcttgcttaatatgtaaatctatctacatatatatttttggggaagatttgtgtcgaaaaatcctttttcaatttcgatattgtatgtttagtccctacaaaatcaatcagacaagattgtctgcgttaggacaatgaccaaatttttgatgaactatttacgttttgcactaattacttacctaaacaaaaattattttgcactatcctcataaattgcacacattaatcccttgaatctctactaattcaatattacacgaaataatatttcctaaaaatccgaacaaccaaatacttaccatatctttacttacttcattccaaaatctctaaatatttactacactcttaccaaatattcgtatttcgatatcacatttctataagttaaatgattattaatcatgcattaattccataaaccttaaaagaaccctctatttatcatataatcttacatatggtatagtcaatatatttttacacattctacaaatcatcatcaattcaaaattccaatatatcacctcgtaaattaaatttcgccaactataatattattcaaattgttatttattattgccttccaaaaaatttatccgatcgaatcatatattctctccacttctcattcatagcaattaggtttcctgatttacctatatcaccttaacttcaaaatctttaagtatttgcttgccagtcaagatataatctaaatcccgcaatattctatcttataaaccaccctaatctttctgttttgcatgtacaagcgtaaaaataagggtaaatacatttaccatatctcgacagtttgattcagaatcaaatcaaaatctaaatacggcattttgattattattttgtacttatgatactcaagcatattcctattctaaaccattcagaatcattctgttttcaaagaatatacactcaaaatctttggaaatcaatgtttaaagattcactcggctactataaatacgcttctcatatccttccatttcatcatcgctcacaccgcaaacgagaaatcaaagcaaatatacattttgaaaaatggctgcgacattcgcataccttaaagacgtgaggccttacaaaaatgcatggagagtccaggtcaagattcttcactcttggaagcagtacacaagcaacacccgtgaaaccattgagttggtcatctctgatgaacatgtaagaattactcttatctatgcaaaatttacgtttacatatacacaagtactaatatagatttatgttgtctttgtcataaggggaaaaaaatgcatgctaccgtgaagaaggagttggtttctaagtttgttcacaaacttattgttggcgaatgggtcttcattgagatctttggtcttacctatgcgtctggccagtttcgtccaaccaaccatctatacaaaatggcgtttcaggttagaacagaagtcatgggttgtgcttccgtctctgactccaacttcttgactttggcgtcattttcaaaaatccaaagtggtgagcttaaccctcacatgttggttggtgagttttctgattctatattatgcttttgcattattccattcacttgctatcattagattatgaacacagtcatgtttcactgcagatgctattggccaaatcattactgttggtgagttggaggaactcaaggctaacaataagcgtacaacaaagattgactttgagatcagggatcaaatgtaatgtttatatcttatttgtttattgcgatcttatttgtttattgcttatcaaagaaagtgtttgtttcgattcatttgttctaatagggatgagagaatgcaagttactttgtggggaacatacgctcaggaggtttaccgagcatgtcaggaatctgagggaaagaatgtgatttttctcattcgttttgccaaaatcaagagttacaagggtatattcagtttctatatcacctgttcctttcctttccatattgcatgatctatggtcaattaaatgttatgagactgcaagtgtgaagagtttatccaactcatttgatgcatcgcaagtacatgtcaatccggacttccctgaagttcacgatttcagtcaaacgtaagtgcatctactctcaacacactctacttttagttgacttctttatgtgctattgattatctttttatccaaatgcagacttctaaatgatggtgctatttgtgtgttccgtgcaagagtcccacgttttgagatggttgcagttaaaaggactgactacagtgagtacacaaggaataccattgaaaatctgcttagctcgactgaggttatattcagctaacttatctcaaagtttagaaatctaactatcaccagtatctaatgtgttttcatattttgtataggttggtaaagtcagagttttatgcacaatctatgcagttgatacagattgggcttggtattacatcagttgcaagacatgtaataagaaagtgaatcatattcatgctggtgttaatggagtgaacaacaagggtaagaagcctagattctggtgtgatacatgcacgtctgttgtaaccaatgtggtctctaggtaaatacattttttgaagcttatatttacatagaatactactttgaaatattttattctaacagtgtgtatagttttttaattaagttcgtaacattttattatatgcaaggtacatgatctatgcaaaggttatggatagcactggtgaagccaaattgcttctgtttgattcaatttgctctgagatcattggcgagtctgcagcctctgtttttaatggatctgttgatgaggtttgtttcttaaagttttcccgtgtctactttatgtatactgacatataattatatagagaactcaaatagccattcacactctttcagattgatgatccagaagatcttcctgattctgtaaagaatttgattggtaagacatttctgtttctggtgtgtgttgagaaagacaacatcttggatggaaaagaaatctataaggtttcaaaggtgcttctgaaggatggactaatagaggaacaattactagaggattctgctgaacatgtgaaccctgcatccattgtttctggtgatcaggtaattcacacaacatttaatgttacattattcattacaatcataaattcttaagagttttggacatttctaactctatatattgcaggttctacttatgctagagaatggtaatggatcgccagactctaccactccatcttcaaagcgtgtttacgctagagaaacgagtggctctgaaggttcttcaagttcaaagaaggtgtgtgttgtaccattagacttggagaagtctttatctgaggatgctgaacatggagttgccctgaatccgcaggtgtctgatgcaaaagaagttactgttccaactgaagtcaaaacatcaaatgttactgttgcaacagagaatgaccaagcacctgtcccagctgctgtcgttgtgaaacaggaagtcaagaaagagatggctaggaacatggcttctgtaagggtcaaagtggagaagaacaagtgatctgcttatctatttcttttaataagtgatgcttcttgaactgtgtttggtcactgtagctatgttttgcttttttttgttttttttgttttgggattatgttcgtgtttttggtttctaagttattcgaattcatgttatgaattatgtttcatctttaagtttggagttaatcttaataatattctttttctgcttatatgttcgaacattattaattttgtagccatctatatgattacaatattatctcagttgtaatgttacagttagagggtccaaataaacttaccatttcaagatgtatatatgtattcgattggcttcagacttctacttaatgactttagtgtatacctttatcaataagttaaagtttcattaacaatttgctattccaatcttttagatataatattatagatttcaaactatattataaaataaaactaaacaaaagatcaaatcaatattatgtcaaagttctgtcaatcttttgacaatcttacatatagactcactatgatgaacatctataactgtctagatactaggaaattttattttttgtaatcattatacatctatatctacgatatcttattagattttctcgatatgtcatattgacgtcatcatctagaacccgcaaaacgattcgtatttccttattttaaaagacatatgccattcattgtatcttttcaacttatatatatattgagtaactgttccttttccatctcaaccctagaaacataaagcataaagcataaatccaaagagacacatccatggcttacatacacaaactcgaggatttgaacttgatgaacaatcagaattgggttatatgcgtgaaagttctctctatttgggatcatcctccaaacctgaacggtgatgttacaaccatgattttggttgatgcaaaggttagtctctcaaattcatctgctcttttagattttttttttttttttttgtggcttggtctattgcatgtcatcaaaatatcttgcgggttctacttagttgttttattttgtcaacttaacagcatcacagaatcgttgcaaccatacgtagattgaatttgagggaaaaatctaggagagttctccaggagggtttgtggtttaacatctctcagtttcgtgtgattccgtctacacacagagtagaaacgtatgtgttgaaccgtctccatattatgttcagatgggataccgtagtgttcaaaatgtcagagttagtgaaatctgatttcacagactatctgtttcccaatgaacttgaggactctgctacagacaatgttgttgatgttactggtatgtttaaaacgatcctaattctttagatcatttcatgagtttatattttgagtactctgctgcatacaatacctagctgattttttgttttcatagatgctattggtgtggttgcaagcgtttcttctatcaagaggtttccttatgtccgcaacaagggtgagaccgactatgaggctagatacgtttctttcgagcttatggataattggtaagtttatagattatagatttagcattagttcatctaggctgcagactttacatgtagattattgcttgtgattatttaccatagtctgccaatggtatagggaacaaaaactcaagtgtgttgctgttggttccatatgtgaagagtttgtcaccaagtggtctaggcgtatcactagatcaacatacaactatgaatcagttgtatgtgctgtacgcttctggagaattgcttctgttgatggttagtattctaaataaatatagataattgtattgatttaggtcccatgaaacctgtgtttacatttaaattcttttctgttttgaccaatgaaacctttgtttttcctagtgtttaaggtgaaaacgtcttaaagagtgagtttggatgctcccgtctacatatagacccaagcttcccttactttgattttgcaagttatctataagtataccaattgttttaaatttctgtagtttacaattaagaacagttacttagttttataatctattgtctttgtaccaggcggagtttcaaagatgctaatgatcaagaagtgacaatggaaccacttactgaaggttgaagctatgtagttcgaacccttttgttctctaccccctctgtctccgaaaaaaacaattacgtttcttttgcaaactttgttatgtttccagtactttaaaacatgatctttattttttggatttaaacatatctattcctatctttaatgcatgatgatattttgttctctaagtattcaatttttaatttctatttcgtctaaacatatatgatattgtcattaatttagaaatttaattaaacctgtaacagattcagaacattagcagaatattggttcttggagaatcattaaatccaaaatatatgacatttgagaaaggaaaacatatattaccaacttcgatttggtacttcaaattggttacataatttgtaatcgtttggtatgttgtgtaacaaagtaaatatactttatgtagaaaatgcgagaacatagtaagttgatatatttacacacctatcaaatatttccttaactaacaaacagatcctctctaataaagtatggactctattacgtttactttcaaccattctataaaatattatgtcagttatcttaaattactcaatactcatgacagtctagagtattgaaatgggaaaaaagaaaaacagccatgctctgtttgatctaaattcacctccaccttcagagaagataccacgtttaggtcacataacagcttcacaaagccaacttactcagcttaatggatctaattctaatggttctatgcctattagatcagctttcaatacagttttcagagatatcactaatttgccactcagttttgatgttaataatcaaccatcttcttctacacaaccatttgattcagcaacttctatacaatattcacatggtactgtcattactatacaatatccaactttcagattctatccactttagaagattttaaaaatggttgtcacagttattaagaatgtgtttgaactactcgcaggttcagttgaaagatcaggacttaactcgattggcagagaaaattttcatcggcataagacagcttctactagaccatttagtgatctcaccaagccaaatcttcaaccatcacctcaaaatttatatgcaacgatgacaccagctactgcatatacattgaacacaggttagttgttatatatgtatcttttagttctccaaactactctgtctattatgtaattcttaacttttaaatatttgaatcattaatctaaatcttattttatgtattacaaggacaagacctgagtaatccatattcatgtataagcaaccaaacacaaacaccagtaatgtcaacagagtattctcatgtacgaaatttacaagcagaatttgagaaagcatcaacatctgctaccaatccgagtaagaatatataggtttcttttcatttatattaaagtatcattttatataaggtgtgttaatcttatagatattatatttgatcataggagcagaagctaaaatcaattcagatactagcagtgatgatgaaaacatggccaatatgatgtttgatggtgcagtatatgaaagtgatactgatgtggatcaaaattactctcttagtagcactgacgatgaaagtgaagacccaaccacaatgcaaacaaaatctgaatcaatggctaatgtatctactcatgaagtagaagacattgtctcacagttaagtgaaaatgacatagaacttgatacattcagctcacagatagatagatttatgattccaacagaatctactcaaacagcaaatgtcccagaatctgctcctaagaaaagaggccgtccaagattggctgtaaccaagcgaatgagaatgaaagaaattagacaacagaataagccaggtattgtttgttatctaaattattcattatcatacatttatttcagatattgtaatgcaaacccaaattatagttgtttcaggttatcttgatcacggtgatcctacttacaagtgtaagtattgtggtgctatgatgtggtatgatgagcggattagaaaaaaggagacaaacaaagaatctgttttcactctttgttgtggagaaggaagtgtcaaactgccatttctgaaggagtccccacatcttctcaagaacctcctctcaggaaaccatccactctctaaacattacagagacaatgctagaatttttaatatggttttcgcaatgacctcctttggtggtaaagtagataaatctatgcctaaaggtagagggccagccatgtttagattgcaaggtggaaattaccatttgattggtagtttaaaacttactcctggagattacgctaagtattcccaactatacattattgatactgagaacgaagttgaaaacagagctactgtcatcaagtaacatagctcatatcttacatcctttacatgtctgtttaggttatgcactgatatggatttaaaatagtttactgttgttttccatctaatgtagcaagggaaaaaatgctaagccggcatcaggaaaaccaaatttggataagaatcttattgaagccattataaagatgcttaaccgttgcaacccttacgttagaagatttaggacagccagagagaggattcaaacaaatgatgaagagccatttcacatgcgtattatcgcagatcgtcaaggtgttgagggcaggacatatagtatgcctaccacatcagaggttgcagccttgatccctggtgattttcgacatggcatgcctgatagggacattgttataggaaaaaaatcaaatggtcacctaaagaggattaaccagattcacatttcctatttggctctgcaatatccactaatattttgttatggcgaagatggcttcagacctggaattgagaagtgttctaaatcaaaaagtaagaagaagaataagaagtgtatcagcatgagacaatggtttgcattccgtattcaagagagggaagttgagtgccaaactctattacgttcaaagaggttgttccagcagtgtctctgtgatgcttataccactattgaatctaacagattaaactatatcaagtttaatcagtcgaaacttcgatgtgaaaactacacatctgtaaaagaagcagctgcagctggagcaaccactatggaagaagaaggtaaccaactactgattccagcttcattcactggtggtcctagatatatggttcaaagctactatgatgcaatggctatctgtaaacattatggttttccagatcttttcatcacttttacctgtaacccaaagtggccagagataacaagatactacgataaaagaggtttaaatcctgaagacagacctaacattatagcccgtatttttaaaatcaaactggattctctaatgaatgatttaactgtgaaaaagatgcttgggaagactgttgcatgtaagtatggtttagtatactacattactatttatcaaaatcatctaattcgaaagtactcattctgttttgtttgtgcttgcagcgatgtatactgttgagtttcagaaaagaggcttgcctcatgcacacattctcttattcatgcatgctaagagcaaattaccaacagcagacgacattgataaacttatttctgctgagattcctgacaaagaaaaagaaccagatctatacgaagttatcaaaaactccatgattcacggtccatgtggttcagcaaatgtcaattctccatgtatggttgatggagaatgttctaaactttatcccaaaaaacatcaagatataaccaagattggtagtgatggttatcctatttatagaagaagaaaaactgatgactatgttgagaagggtggtattaaatgtgacaataggtatgttgtgccttataacaagaagctttctcttcgttataatgctcatatcaatgtcgaatggtgtaaccagaatggctccattaaatacttattcaagtatatcaacaaaggaccagacaaagttgtcttcatagttgagccaactcagcagactacagctggtgactctgaaacgccacagcaagaacaaggttcagctgagaagaagaagaacgagatcaaagattggttcgattgcaggttagtctatttctttgttatttcttaattatttggtttggtttcatattgaataaaaaaatcattctaatacataatgaattgtttgcagatatgtttccgcatctgaagctgtttggagaatttttaaatatccaattcaacatatatcaacgcccgtccagaaattatcttttcatgtagaaggaaaacaaccagcttattttgatccaaagtcaaacattgaagacgttctagaacgagtagcaaatgtagactctcagtttatggcctggctcactttgaatagaagaaatgctgttggaaaaaatggtaagcgagctagagagtgtttgtatgctgaaattcctgcatatttcacatgggatggagaaaacaagtcgtttaaaaagagaactaggggtttttcaataggtcgcattcactatgtttcaaggaaaatggaagatgagtattttctcagagtactcttaaacattgtgagaggtccaacgagttatgctgaaatcaaaacctatgacggtgttgtatacaagactttcaaagaagcatgttttgcacgtggtattcttgacgatgatcaggtttttattgatggcctggtggaagcaagtcagtgttgttttggagattatctcaggaattttttttgcaatgcttcttctctcggattctttgtctagaccagcacacgtcaggtcacaaacgtggcatcttttagcagaggatattttgaaaacaaaaagagatgagttcaaaaatccaggtttttatattttttaccttccatgtttccttacttatagagttttaatgttttcacgttatttgttttaatgttttcatctaaaattttgcagacctaacactcactgaaactgaaattaagaattacacactacaggaaatcgaaaaaattatgctttcaaatggagcaaccttagaagatattgatgagtttcctaagcctactagagatggtattgataattcaaatagactcattgttgaggagttaagatataaccgtgaatccaacctataagaccagcatgaagaatggaaacagatgctaactcctgagcagagaggcgtatacaatgcgattacagaggcagtttttaataatttaggtggagttttttttgtgtacggttttggaggtacagggaagacttttatttggaaaactctgtctgctgctattagatgtagaggtcagatagttcttaacgtcgcctctagtggcattgcctctttgttgttagaaggtggtcggactgcacattcaaggtttggtattccattgaatcatgatgagttctctgtatgtaagataaaaccaaagtcttatttggcaaatttggttaaagaagcgtcttaagttatatgggatgaagcaccaatgatgagcaggttttgttttgaagctttggataaatctttctccgacattataaaaaacacaaacaacaaggtttttggtggaaaggttgttgtttttggtggtgatttcagacaggtgcttccagtaattaatggtgcagggagagcagaaatagtaatgtcatcgcttaatgcttcgtatctttgggatcactgcaaggtgttaaagttgactaagaacatgagactactagcaaacaatttgagtgcaactgaagctaaagaaattcaagagttttctgattggttattggctgttagtgatggtaggataaacgagcctaacgacggtgtggctacaatagatattccagaagatttgttgattaccaacgcagacaagccaatagaaacgatcaccaatgaaatttatggagatcctaaaatactacacgaaatcactgatcccaaattctttcaaggcagagctatattagctccaaagaatgaggacgtaaacacaatcaatgagtatttgctagagcagttggatggtcagtgcacttttacccttcaatttaaagtttataatcttcatatgcaatatatttttaaaagtatatacaactgacatacattctatttgttttattgtttcagctgaggaaagaatttatctatctgctgattccatagatcctacagattctgattcacttaacaatcctgttatcactccagattttttaaacagtatcaagttaccaggtttgcctaaccattctttgtgtttaaaggtcggtgctcctgttatgttactacgaaatttggatcctaaaggtggtctatgcaatggcactaggcttcagattacgcagctatgtactcagattgttgaagctaaagttattacaggagacagaattggtaacatagttttgattcctacagtgaatcttacacctacagacaccaaacttccattcaagatgcgtagaagacagtttccactctctgttgcattcgctatgactataaataagagtcaaggtcaatctctagaacatataggactttacttgcccaaaccagtgttctcccatggtcagctttatgttgctttgtctagggttacctctaaaaagggtttgaaaatcctaatactagacaaagatggtaaacttcagaagcaaacaaccaacgttgttttcaaggaagttttccaaaacatagattgattacattgctgccagtctatgttccaatcttttgagaaaggtattcttcatcaacctttattcactttatatactttcatttatggctgttaaacccccacacagtaactaacaagtagtatttgatctataatgtcacaggattatttacattatactgctgaagaggattaactagattcgcattactaaagtagtcatagagaaggattatgacatcttctccgacttcaagttcctcatattttaataaggcaactatgttagtatgtcttaactaaattggtttgattgaatatttaaaaattagttttggaatttaaacataatcaaccattaattatattcttgctgcatccaaatactttattggaattatctactaacatatatgcaatcattagcaacaaagactttactatattgtgattggctacagaatcggttagcacataattagagattgattaaatgatttaaacggatatatagcaagaaacctttcgtatatattcactgaatctatattcatctttcatcgtgcttcttcaatatatatataagaccaatatttggttaacttccctcaatctatcttttctaaaaatctgaacaatcaccatccaaacttccaatgaccgagagaaattatatcccagatctaaatttacacagaaacaatcatattctatacgtaaaaatattaagcatgtgggatttgcagtctatgatcaaaccaactccgtgtaccatgatcctatgtgatgtgaaggtgagtatctatgatgtatttttgaattgttattttggtttttgctttctattattttccaacaaattttatatggttctctttttattcagggaaacaaaatcgatgctagaataccttggggcgagtatatgtccaattttaagactagcctatttgaaggaaagtggtattaccttcaacactttcgattgaagagatcaacaacaataccaaagtacacagattttcactatgaaattgagtttatgtggcacactaaaatgtgggctgtaagtgatagagcagaacaaagttctctccaattcatccatgctgatgaagtcaatggagaatctgaggatcatgtagtcggtaatataagtcttaattttatagtataacatttcttgcaattgtaattccttagtactaatattttgattaatactgacttattgttctgttattgttagatgttattggagttataacaactgtctcaactgtgtcgagttttccatattgttgtcctgaaggtgaaacagactatgatgccagatatgtgacatttaccatccgagataatcagtaagttaacaatcatggacttatattggtatagaaattagttaggaacagacatatatgtgtagtatgataaatttgtattctccttggttgtagtgagaggatcataacttgtgttgctagagggagtgcgtgtgagtcttttctatcaaaggtttatcgacttattggttcaaaaacttacaactatgagccactcactacagtgctccggttctttagaacttctatgtttaaaggttagtttatatatgttaatatgttatactcttaccttagaatgttaaatcatgtgatatataactaatcaacagaatgataacaaatattataggatctaaggccttaatcagcgagtatgggtgttcaagggtcttcattgaagaagagtttccagactttgatgtatcatgttacatgtatgtgaaagacattagatactggtgatagtttgtttattagatactaagttattcaagaagtttgacatctttttatgtttttgttacaacaatttttttgcagctgaaccagtaggaaatgttgatgggaggattgagtatgttgctgaggaataatcctagagtcagattcgtcggaagaaggatttgtttaatctatttaccttgctttcaaaaatcaaactattcattcttaagttgattttgtttttgtcttttgaactattgttgacaatttagtaagaatgatcataaattgtgttcattttgggagagattgtttcagtttaactaagtaataaaaatcaagttttattacataaaacgtaaaattataacacatataaatgaacataaattgtgttcatttgcggtgtttaaaattacagtcaatgataatctacagttacaatccaaatattaaattccataccaattgaatcatatgtgtttacatgtaataaaataatattgttatttacaaaagaattc

SEQ ID NO: 1173 - DNA, 112862 bp, Arabidopsis thaliana
gaattcctctctggcaaatccctggtataatctacgtccttatttcttacaggcagcggttcctcttctttatccatgcacacgaataatgtactgtctgtttctctttaatttcgtagagataagacggttctatggaatagaacatggtggaggttatgattcttggcgaaaaacatctgttgtagccttcccttttgattttgataaagctcaatctataaggccaaaaggtcattgtgtggctgtacgtgtgacaagtgaggatcctgatgacgggttcaaaccaaccagcggtagagttcaggtaatgtgatatctgtggaatgcaaagtgaaagttcattcactgagaactctgtgggtaacacttgtatgaacttgcaacaggagttgagttttaagagcaagccaaatgtgtgggcgtacttctctgtcaaggtaattatatctatagagactctgctatataagtgtttcacaatgttttaaattttacgactacttttttacagtctggtggaggcatccacgagttctcggattcccagtttggtaagttgaatgaaataaatgtatttgggctgctaggttcttttcttgagtttacaaaaattgaaactttctttaatcttccattcaggacatgtttttgcatttggggaatccagagccctggcgatagcgaatatggttcttgggctaaaagaaattcagatccgtggagaaattaggactaacgttgactacacgatcgaccttttacatgtacgtttcttcttgcacacaaacttacactctgtgtatgcaataccctgacaagatcatttcaattgtcaaccaggcttctgattaccgtgataacaaaattcacactggttggttggatagtaggattgctatgcgggtcagagctgagaggcctccatggtatctctctgttgtcggcggagctctctatgtaagaacctctttctcagagatttatttgtcttgaaaagtttctatctggtgacgaaatgttctatctgtccagaaagcatcagcgaccagtgctgctgtggtttcagattacgttggttatctggagaaggggcaaatccctccaaaggtaatccaataccagggatctcttttgcctttctagtaatgttcttgtagcttactttttctctcttaacttgcagcatatatctcttgtacattctcaagtgtctctgaatattgaaggaagtaaatatacggtattcgcctactatcaaaattttacgtctctgcaatttcgtattttcctctgccatattatttttgcgctgaagatattgttaccaggcttactaacatgaacataactgttctagattgatgtagtccggggtggatcaggaacctacaggctaagaatgaacaagtcagaagtggtagcagaaatacacactctacgtgatggaggtctgttgatgcaggcaagttttctgcctttgttctatattacaagacaaggacatacatgtgtcgcgcagaaaaaaacttctggagaatctcacttccttttcttgttttcactgtcattgcagttggatggcaaaagccatgtgatatatgcagaggaagaagctgcaggaactcgtcttctcattgatggaagaacttgtttgctacaggtttctgctaatttttttgtgtgtttaccattttacttcacgtttctctgaagtcatctttagcttttaagctgtctgtcaattttggcttattcagaatgaccacgatccatcaaagttaatggctgagacaccgtgcaagttgatgaggtatttgatttccgacaacagcaatattgacgctgatacgccttatgccgaagttgaggtcatgaagatgtgcatgccacttctttcacctgcttcaggagttatccattttaaaatgtctgaaggacaagccatgcaggttcacttcattgctaaacaaaaagcctacagttctgtttaaattgattaacccatccattatttttttcacaggctggtgaacttatagccaatcttgatcttgatgatccttctgctgtaagaaaggccgaacccttccatggaagtttcccaagattagggcttccaactgcaatatccggtagagttcatcagagatgtgccgcaacattaaatgctgcacgcatgattcttgctggctatgagcataaagtagatgaggtaaacactgtttgtttttcctatttgatccaacttttctactagattatttgactatgagatagctcatacgttgcaggttgttcaagacttacttaattgccttgatagccctgaactcccatttcttcagtggcaagagtgctttgcagttctggcgacacgactacctaaaaatctcaggaacatggtaaacacctgtgtagtattcataatccggtttcttatatattgatatttgttttgagttcaagacttttaatcatatctaaataaaactctttatcagctagaatcaaagtatagggaatttgagagtatttccagaaactctttgaccaccgatttccctgccaaacttttaaaaggcattcttgaggtaattgactattatttcttccattagaattaccatcctgtttcttactctctgaattttttctgtctacttcttgcaacaggcacatttatcttcttgtgatgagaaagagagaggtgcccttgaaaggctcattgaaccattgatgagccttgcaaaatcttatgaaggtggtagagaaagtcatgcccgtgttattgttcattctctctttgaagaatatctatcagtagaagaattattcaatgataacatgctggtattatatggctcaatagctaattaacagatttttggttactagcgatgtctgaggcgtctaaataatcattttatttttcttgaataggctgatgttatagaacgcatgcgtcagctatacaagaaagatctgttgaaaattgtggatatagtgctctcacaccaggtctgtgatcatctttctcagaccaggtttttctttccgtcatgactatgtcactgaattggttcttcttttcagggcataaaaaacaaaaacaaactcgttctccggctcatggagcagcttgtttaccctaatcctgctgcttacagagataaacttattcgattctcaacacttaaccatactaactactctgaggtgcgtttggttgctttatgttttataatatttttgtctacactctcaactaatgatcagtttgtgtgtgtagttggcgctcaaggcgagtcaattacttgaacagaccaaactaagtgagcttcgttcaaacattgctagaagcctttcagagttagaaatgtttacagaggacggagaaaatatggatactcccaagaggaaaagtgccattaatgaaagaatagaagatcttgtaagcgcatctttagctgttgaagacgctctcgtgggactatttgaccatagcgatcacacacttcaaagacgggttgttgagacttatattcgcagattataccaggttcgagttcattcttccgcacccttattgttcaaaattctttttgtactgcaattgattacagaaaattttgacttcattttaacccgactcttgtcatcagccctacgtcgttaaagatagcgtgaggatgcagtggcaccgttctggtcttcttgcttcctgggagttcctagaggagcatatggaaagaaaaaacattggcttagacgatcccgacacatctgaaaaaggattggttgagaagcgtagtaagagaaaatggggggctatggttataatcaaatctttgcagtttcttccaagtataataagtgcagcattgagagaaacaaagcacaacgactatgaaactgccggagctcctttatctggcaatatgatgcacattgctattgtgggcatcaacaaccagatgagtctgcttcaggacaggtacttgacacagtataaactagctttggtgatatagtgtctagctaatctgttatcatttctggtttgtttatctcagtggggatgaagaccaagctcaggaaagagtaaacaagttggccaaaattcttaaagaggaagaagtgagttcaagcctctgttctgccggtgttggtgtaatcagctgtataattcagcgagatgaaggacgaacacccatgagacattctttccattggtcgttggagaaacagtattatgtagaagagccgttgctgcgtcatcttgaacctcctctgtccatttaccttgagttggtatgatcatgacgatgaaatttcttgtttaaagcatatcatattctttttaatggctatttactgtttgtctgatgcaggataagctgaaaggatactcaaatatacaatatacgccttctcgagatcgtcaatggcatctgtatactgttacagacaagccagtgccaatcaagaggatgttcctgagatctcttgttcgacaggctacaatgaacgatggatttatattgcagcaagggcaggataagcagcttagccaaacactgatctccatggcgtttacgtcgaaatgtgttctgaggtctttgatggatgccatggaggaactggaactgaatgcccataatgctgcaatgaaaccagatcacgcacatatgtttctttgcatattgcgtgagcagcagatagatgatcttgtgcctttccccaggttgctatggctgtgtccttgacaagttattgtttgtaatgtcagacaatatcctaataatatcaacgtgtttcttacaggagagttgaagtgaatgcggaggatgaagaaactacagttgaaatgatcttagaagaagcagcacgagagatacatagatctgttggagtgagaatgcataggttgggcgtgtgcgagtgggaagtgcggctgtggttggtgtcctctggactggcatgtggtgcttggagggttgtggttgcaaacgtgacaggccgtacatgcactgtccacgtaagttccgcttacaaaaaatttggttgtacaaacaatacagagagtaagagtacacatctcgatgacttacctgctgtgatttaatatttcagatataccgagaagttgaaactcctggaagaaacagtttaatctaccactcaataaccaagaagggacctttgcatgaaacaccaatcagtgatcaatataagcccctgggatatctcgacaggcaacgtttagcagcaaggaggagtaacactacttattgctatgacttcccgttggtttgttactgaattcataagattcacacatacgcttactcttttggctatttccaaccccccttatgttatttctttccttttcaggcatttgggacagccttggaactgttgtgggcatcacaacacccaggagttaagaaaccatataaggatactctgatcaatgttaaagagcttgtattctcaaaaccagaaggttcttcgggtacatctctagatctggttgaaagaccacccggtctcaacgactttggaatggttgcctggtgcctagatatgtcgaccccagagtttcctatggggcggaaacttctcgtgattgcgaatgatgtcaccttcaaagctggttcttttggtcctagagaggacgcgtttttccttgctgttactgaactcgcttgtgccaagaagcttcccttgatttacttggcagcaaattctggtgcccgacttggggttgctgaagaagtcaaagcctgcttcaaagttggatggtcggatgaaatttcccctgagaatggttttcagtatatatacctaagccctgaagaccacgaaaggattggatcatctgtcattgcccatgaagtaaagctctctagtggggaaactaggtgggtgattgatacgatcgttggcaaagaagatggtattggtgtagagaacttaacaggaagtggggccatagcgggtgcttactcaaaggcatacaatgaaacttttactttaacctttgttagtggaagaacggttggaattggtgcttatcttgcccgcctaggtatgcggtgcatacagagacttgatcagccgatcatcttgactggcttctctacactcaacaagttacttgggcgtgaggtctatagctctcacatgcaactgggtggcccgaaaatcatgggcacaaatggtgttgttcatcttacagtctcagatgatcttgaaggcgtatcagcaattctcaactggctcagctacattcctgcttacgtgggtggtcctcttcctgttcttgcccctttagatccaccggagagaattgtggagtatgtcccagagaactcttgcgacccacgagcggctatagctggggtcaaagacaataccggtaaatggcttggaggtatctttgataaaaatagtttcattgagactcttgaaggctgggcaaggacggtagtgactggtagagccaagctcgggggaatacccgttggagttgttgcagttgagacacagactgtcatgcagatcatcccagccgatcctggacagcttgactctcatgaaagagtggttccgcaagcagggcaagtctggtttcctgattcagcggccaagactgctcaagcgcttatggatttcaaccgggaagagcttccattgtttatcctagcgaactggagagggttttcaggtgggcagagagatcttttcgaaggaatacttcaggcaggttcaactatagtagaaaatctgagaacctatcgtcagccagtgtttgtgtacatcccaatgatgggagagctgcgcggtggagcgtgggttgttgttgacagccagataaattcggattatgttgaaatgtatgctgatgaaacagctcgtggaaatgtgcttgagccagaagggacaatagagataaaatttagaacaaaagagctattagagtgcatgggaaggttggaccagaagctaatcagtctgaaagcaaaactgcaagatgccaagcaaagcgaggcctatgcaaacatcgagcttctccagcaacagattaaagcccgagagaaacagcttttaccagtttatatccaaatcgccaccaaatttgcagaacttcatgacacttccatgagaatggctgcaaagggagtgatcaaaagtgttgtggaatggagcggctcgcggtccttcttctacaaaaagctcaataggagaatcgctgagagctctcttgtgaaaaacgtaagagaagcatctggagacaacttagcatataaatcttcaatgcgtctgattcaggattggttctgcaactctgatattgcaaaggggaaagaagaagcttggacagacgaccaagtgttctttacatggaaggacaatgttagtaactacgagttgaagctgagcgagttgagagcgcagaaactactgaaccaacttgcagagattgggaattcctcagatttgcaagctctgccacaaggacttgctaatcttctaaacaaggtataaaacgaaaccctccagaaaaacagaggttttggtcctctagtattcttatctgtatggctcggtttttaaaggcctaagtaaatatttgtgatgcaggtggagccgtcgaaaagagaagagctggtggctgctattcgaaaggtcttgggttgactgatatcgaagactttagcttctaatccaagaaagatggacatttaaagtttgcttgtgtccatttggaccatcttccttatatttgttggtcacagttgtaaatgttgttgtagctttgtcatttccgtataaacaaattacgcaataattcattcaacatgtcactcttgcttcatatttatacactgaaccaagacaatataatagtctaaatataaaactgatcttgcttaaccaaatactgtaaagctaagaatcccaagacaaattatatagtctaactgaaagtaaacaatgattaggccacgacaaataaactgaaccgaatgtatcgaaccgaaactgaagcaaaaaaaacgaaccaaactaaaaattggaaaataaccgaatgcatactaaattttataaccgaaaccgaaaagatacgtaccaaaatattttgggtaaccaaaaattttcaaaatataaatatattttcaaaaatattagttatttctagattaaataattaaaattagttgaaaatatataaaatagtaaaaatactcaaaaatatccgaaaatatccaaaaatatttaaagaaaaataactgaatggatactaaattttaaaaccaaaagaatcggaaccgaaccgaaaccgagccgaactttcaaaataaccaaatggatactaaactttagaaccgaaaaaactgataactaaataaatatattccgaaaccgaatatataatcgaatgcccaagactaacaatgacaataatcaaaaaattcatggggaattggcaaatataaccaacaaaaatactttaattggtaaaataacacttcaaacaatagaaagagatattatgtataatatatgtaatattgacaatatatcctgtgtttgtacatcacgctctccttcttctttcttcttcaaaagacatcctagtgaataaatcttttttctcttttgtgcagtgtgctcctttcatctctctctcccctttcttacgaatctttacatacatcaccatcaactgaacaaaagtcaaaattatatatgggtcaatcttaaatgtcgataggatcacccaaatctgatttactctattttataacaacaccattagctagaaacccaaccattagcgcaacaatactctgactatatttattctttgttagccagagaatactagtaaaatccggtgaaatcctttcgccaattatgttaaattaatctttactttcccatcaaagttaatatgagaattttaatttttaaatccatggaaaataaaattgagaattatgaaccagcaaattgacgatcatgttatggatttcttagatctagaagcgataaagggtttaggatggtggaaattctaaaggggaatagccaataaatcgattttgattttggaagatttttgagagatactattctattttgtgaatatattatttatgtataccttgtactatatacgttttaaaatgagttgtttgttttgattaaggatgttagtgatttgatcattattttagattaaaatccttgggttccctatatattatcttaggatttagtatccttccatcaaaaaatatttaattgattatttggattcatcggaatcaaagttttggtttgaacaaatatatattattttatttttctatgatgatatgtatagaatttggtatcactattcattttttaagaaattcgtatccgatttttaaaattcaaatcatattagatacacaaaaaaatctgtttttttaatagtattattaactttaactaagtaatattgttaaaataatatagtaaacaatattaaaagggatggacatattttaatcatatttctctttcctcttctccacataactcaaacttctcttcctccttaaaaagccacatcagcataatttactacgcttctgttttcttcacgcgccttaatgctgaatgaaagaactgggtgaaggagtgtgttgtcattacacaactcacttgtgttacttatttaatatcttttcagaatttggttatttagctaattcacccaaaattcattctcaatagattttattattttaaagatcttccttttatgacgataattaaaagtgttgaccaaccatcatctggctttaaaagcccaaattaatcaagggattagtccactaataacggggacagttttttttttataatacttatactaaccttgagactatctggcttggttaccaagttttgtgaaaatggagatgagagctttgggttcttcgtgttctactggtaatggaggttctgctccgattaccctcacgaatatatctccatggatcacaacagtttttccgtcgacagtgaagctgagaagtagtttgagaaccttcaaaggagtttcgtcaagagtgagaacctttaaaggagtttcttcgacaagagttttgtctcggaccaaacaacagtttcctctgttttgtttcctaaaccctgatccgatctccttcttggaaaatggtttctttctctctatcttttgcttaacttatgattgcattttttcgcttttttcctatacatttgacatgaatttgtctgtcatctctatgataacgctggtttcgaatcctagcttacattgagttccaacatgtttgtgggattaaccaatttgtttatgttctcccaagtcattttggttgcttatggttgttttacagatgtatctgaagctgaaaggacagtagttttaccggatggatcggttaacggggctggatctgttaacgggtatcatagtgatgtagtacccggtagaaatgtggctgaggtcaatgagttctgtaaagctcttggagggaaaaggccaatccatagtattctggttgctactaatggaatggcagctgtgaagtttatacgtagtgtcagaacatgggcttacgaaacatttggctcggaaaaagcggtaaagttggtggcaatggcaactcctgaagacatgaggatcaatgcggaacatatcagaattgctgatcagtttgttgaggttccgggaggaactaataataacaattatgctaatgttcagcttattgtggaggtgattagtgcaactttttggaaaatacttatgttttgttattcgtcattcatatatgtatataaatgatatgtgcagatggctgaggtcacgcgtgtggatgcagtttggcctggttggggtcatgcatctgagaaccctgaattacctgatgctttaaaggagaaaggaattatatttcttggtcctcctgcagattcaatgatagcattaggggataagattggttcgtcgttgattgctcaagctgctgatgtacctactcttccatggagtggttcccatgtaaatgaagctgaacttgtttacatgcatagaagtgttgatctgtttcatagtgatgatgattgtttttgctttttcaggttaagatacctccggggagaagtttggtaactgtccccgaggagatatacaagaaagcttgtgtttacacaacagaagaagcaattgctagttgtcaagttgttggttatccagcaatgatcaaagcatcgtggggtggtggtggtaaaggcattaggaaggtctgcttctgtagatatgactgtcactttttccactaagccaaagtgtacttattgtagtttttcattttggtaaggttcataatgatgatgaggttagggctctattcaagcaagttcaaggtgaggtcccgggctcgccgatatttataatgaaggttgcttcacaggtaatggctacttaactatatcttttgatctcaatataactgattaacttagtaatacgtgggatgttctttatatattgtgtagagtcgacatttagaggcccagttgctttgtgaccaatatggaaacgtagcagctttgcatagccgtgattgtagcgtccagagaagacaccaaaaggtatgttactggtttaaaattgatcatatctctttttattactcaacaatcacgaaaacaagaaccatttattgctaatttgctatagagtctctccataagccaaagacttcgaaaactaacaaatggtcaacaatactgccgtagtgagattcagcttgtcctcaagctgagatgaaccaatctatgtcaataaaaaaaaaacagatttcttcatttgcaaccggttctttaacctctctttgtaatggcatccttttagtcctccggtgcacaatcctctgtgaatgcacattcgctacacaacatatccatctacttgcattatagtcacaattatgaattaatagtaatcttaggtgtacctttgtggattatttacgctcattttttaagggttttgtaaaaaaaaactttcaaagtcgtccattttgcaactttatccttcatgtccaaaaaatggaaaataatcatataaagtctaaaataatacgcaatatagctattttttgttattgtcaaattttaaaattttgataaataatatatcaagtcgaagccgatgaggagttcaactatatctttaaattttcaaagaaaaatgtatgtgatcgtgaaaacgtttacaatatatatgcagttgcaaaaataactatatctacatatacatttttgcagccattttgtgaaattcatcatggagttgtgacttaatttctactcaatgccattagcattaaattatttaatttcctatttattattttttcctttaaattcatgatttttaaaatcaatcacattatcaattatcaatcaaatttaatctaaacaataaacttcacctcaatccctaaaaattagcttaaacatatttcgacatctaaattctaaatcaacttcagtccaagcttctcatcaatcccttaaatatattgaaaaaataatattcccgagaattaagtcttcgatatcttcctaatcatactaaccttatttacaaggaatgccattggcattaaatcttaatattttaaaaaataatttaagatatcaatcaaacgaaatcattcctaaaattttcggttttaatttgctgtaaaaaaaatcggtttcaataatacattatgatcattagttttgattctttagaataattcattacagtgtaataaaaagaatcaatctcatattttcaattagtaaaatgtacatgtattaagttaatattattgtttgaaataatgttaacaaaactacccaatctaggctattaaatgaagtgaaatacagttagtccaaaaatccaagtacatatcaatcacaaattatgattaaactaaatatttatttataacattatctatattttttaaaaaatgaactacattttgtagagttattttgtttaagtaagaattacaaaaaatgccattacctaaaaggcaaaaaaaaaattaatttttgaaaaataattattgaaatatttaaactttataaaacattattaatatttaaacttataaaaagtaatatttactagaattatatggtaggacgggtttggatcgatattaatacaaatttataatatcatcaacccaaagtaataataccgtttaaatattattttaatattttatcagcattatttttaacagtatttatataaaattattaactttaattctaaaaacaaattgtaaaatataatattattgtctatactaataaaaacatgtatgtcgtaacacattttaaatcttaaaatagagtaattgtacactaaattatatatgtgtatatatatatatgtatatttataaatatatagaaatggtttatatattaaaaaaatacaataataataggttatataataatgttaatcaattaggcatattacattttttatagcccgcgggttaaaatctagtaacgtattattttaaattttctaaccttttgtatttttttggatgtgtgaagagtaaaattgcaagtgcgatttcaaagtatttttttgcgcaaaactctttttttttaagttcaaatttaatgctatttttctcctgaaaacgattccccaaaaccagattttcccatacgttctatgttgatttttttgtctaagagagaagaaaagtgagtgagagattacatcgaagaacacaaagagctacgaacaattcgtttcagctttctatattaattagcaatggcagacgaacaattgagtttccgacacactggaaaatccagcaaacgaccagagacgaagaagacgaagaacatcgatttccccaaatataaactcaattgcgtccaattgaaccattcttcccaattcaatccacaaatcctatcgccattgcttcgatcctaacgcaccatgttcgatattgaaatacaccttgtctaattatacttatacagtttcaattttacagtccaattttattgaatgagtgcgttgcttttttttttttttatggtttgttgaatcacacagatcatagaggaaggtccaatcaccgtagctccgcaagaaaccatcaagaaacttgaacaagcagctagaaggttagctaagagtgttaactatgttggagctgctactgttgagtatctctatagtatggacactggggagtactacttcttagagcttaaccctcgcttacaggtttctttccatacacaccatagctacctttccttttcgaatgaaagattttggtcttgaaaatcgaatgttcgatgtcaggttgagcatcctgtaaccgagtggatcgccgaggttaatcttcctgctgctcaagttgctgttgggatgggaattcctctctggcaaatccctggtatggtcttgcatcctggggcagtggttttttttttctaggctatatgcttatgtaatgtactgtttcgcttttgtttgatagagataagacggttttacggtatggaacatggtggaggatatgattcttggaggaaaacatcggttgtagcctctccttttgattttgatgaagctgaatctttaaggccaaaaggtcattgtgtggctgtacgtgtgacaagcgaggatcctgatgacgggtttaaaccaaccagcggtgaaatacaggtaatgtgatatatctgtggaatgcaaaattttaaagtctatgataactgtgcgggggtgacacttgtatgaacttgcaacaggaattgagttttaagagcaagccaaatatgtggtcgtacttctctgtcaaggtagtttatatctacgagatgctttgctatattacgtgttttggtatgtcttaagttttctgactttacttttatttatatagtctggtggaggcatccacgagttctcagattcacagtttggtaagttaaatgaaaaatttgggatgctaggacagttcttttcttgagcgtatacaaattgaaacgtcctttaatctttttttcaagacatgtttttgcatttggggaatccagatccgtggcgatagcaaatatggttcttgcgctgaaagaaattcaaatccgtggagatattaggactaacgttgactacacgatcgaccttctacatgtatgtttccttcttcctacatacaaaagttatactgtgactgtaatgtaccctgacaagatcatttcgttgataaaccaggcttctgattaccgggaaaacaaaatacacactggttggttggacagtaggattgctatgcgggtcagagcagagagacctccatggtatctctctgtagtcggtggggctctttatgtaagaccctctttctcagagctctgtttgtcttgaaaagtttttatctggtgactagatgttgtctttgtccagaaagcatctacgaccagttctgctgtagtttcggattacgttggctatctagaaaaggggcaaattcccccaaaggtactccaatatcagcgctctcttttgtctttcttgtaatgttcttgtagcttacttttctctctcttaacttgcagcatatatctcttgtgcattctcaagtgtcactgaatattgaaggaagtaaatatacggtatgcgtctcctgtcaaaagtttacttctcttcattttttttatttttttttccctttaccatattatctctgcactgaagatgttgtacccgaggctcactaattgaacatacctgtgtctagattgatgtagtccggggtggatcaggaacctacaggctaagaatgagcaactcagaagttgtagcagaaatacacactctacgtgatggaggtctattgatgcaggcaagttttataactttattctatactacaagacagagacatacatgtgtcatgcatagtaacttccttttaagaagctcacttccatttttggttcactgtcattgcagttggatggtaaaagccatgtgatatatgcaaaggaagaagcgacaggaacccgtcttctcattgacggaagaacttgcttactacaggtttcaactgaacggtttttctattttaccgtaatacttcacgtttctctgaagtcatttttagcaataagttatctgtcaattttggcttgttcagaatgatcatgatccttcgaagttgatggctgagacaccatgcaagttgctaaggtacctggtttcagacaacagcagtattgatactgatacgccgtatgcagaagttgaagtcatgaagatgtgcatgccacttatttcacctgcgtcaggagttatccatttcaagttgtctgaaggacaagccatgcaggtgaagaaccaattcattgctaaagaaaatttgtttcttacagttttgtagaaattgattaacccatccgatattttcttgacaggctggtgaactcatagccaagcttgatcttgatgatccttctgctgtaagaaaggccaaacccttccgtggaagtttcccacgattagggcttccaacggcaatctccggtaaagttcatcagagatgtgctgcaactttaaatgctgcacgtatgattcttgctggctatgatcataaagtagatgaggtaaacgctatttggttttcctatgtgattcaacttttctattaaataatttgattctgagattgctcatatgttttgcaggttcttcaagacttgcttaattgccttgatagccctgaactcccatttcttcagtggcaagagtgctttgcagttctggcgacacgactacctaaagatctcaggaacatggtaaacacttagatactattcgtaatccgttttcctttactgtgatcttgttttgagtttctagtcttttaatgctttttgtttataattctttatcagctagaattgaaatacaaggaatttgagattatctccaaaacctccctgaccccagatttccctgccaaactcttaaaaggcatccttgaggtgattagctactgcttcttattctagacctactgttctgtattctactctaaaatactttcttttcggtccattttttgcaacaggctcatctatcttcttgtgatgagaaagagagaggttcccttgaaaggctcattgaaccgttgatgagccttgtgaagtcttatgaaggtggtagagaaagtcatgcccgtcttattgttcattccctctttgaagaatacctatcagttgaagaattattcaatgataacatgctggtaatatatggttcaattgttatcaaacgggtttgtgattaatagttatgtgtgaggagtcttaatatgcattttcttatcttgaaaaggctgatgttatagaacgcatgcgtcagcaatacaagaaggatcgattaaagattgtcgatatcgtgctttcacaccaggtttgtgattatccttcgcacaccaggtttctcttgtctcactatgttattgaactggtatgctcatcttttcttcttctcagggcataatacacaaaaacaaactggttcttcgacttatggagcagcttgtttatcctaatcctgctgcatacagagaaaaacttattcgattctcagcacttaatcatactaattactctcaggtgcgtttggttcctttatgttttatgatacttttgttgacattcgtcagctgatgattgatatgttcgtgtagttggcgctcaaggcgagtcaattgctcgaacagaccaaacgaagcgaacttcgttcaaatattgctagaagcctttcagaattagaaatgtttacagaggctggagaaaatatggatactcccaagaggaagagtgccattagtgaaacgatggaaaatcttgtgagctcatctttagctgttgaagacgctctcgtgggattatttgaccatagcgatcacacacttcaaagacgggttgttgagacttatattcacagattataccaggtaagagatcattcttcctaaccttatatttaaaattcgttttggagtgcacttgattagacagaatttgttttgactccattttaacttgtctcatgtcattagccctatgtcgttaaagaaagtgtgaggatgcagtggcaccagtctggtgtcattgcttcttgggagttcctagaacatttcgaaagaaaaaacactggcccagacgatcacgagatatctgaaaaaggaattgttgcgaagagtagtaagagaaaacgggggactatggttataatcaaatcgctgcagtttctgccgagtataataaatgcatcattgagagaaacaaaccatagccactgtgaatatgcccgagctcctttatctggtaatatgatgcacattgctgttgtgggcatcaacaatcagatgagtctgcttcaggacaggtacttgacagtcaacacatcatgactgtttacaccagcttaggtcttgtagtgtctaacctaatctgtttttttttttggtttggttgtctcagtggggacgaggaccaaactcaggaaagagtaaacaagctggccaaaattcttaaagaggaagaagtgagtttgactctctgttctgcaggtgtcggtgtgatcagttgtataattcagcgagatgaaggacgaacaccaatgagacattcttttcattggttgatggagaaacagtattatgtagaagagccgttgctgcgacatgttgaacctcctctatctgtataccttgagttggtatgaccatgatgatgaaatgttaattcttgttttacagcatctcgcatttattttaatgatcgtatattgtatgtctgatgcaggataagcttaaagggtactcaaatatacagtattcgccttcacgagaccgtcaatggcatatgtatagtgttacagacaggccagtgccaatcaaaagaatgttccttagatctcttgttcgacaaactacaatgaatgatgggtttctgttgcagcaagggcaggactaccaacttagccaaacagtgctctccatggcgtttacatcgaaatgcattctgaggtctttgatgaatgcaatggaggaactggaactgaatgcacataatgctgccatgaaaccagaccacgcacatatgttcctatgcatactacgtgagcagcagatagatgatcttgtgccttaccccaggtttttatggctctgtcttttaaaagttatcatttgcgatgtgttagaactttatagtaacaatgttcaaaatgtttctctcaggagatttgaagtgaatgcggaggatgaagaaactacagttgagacgatcttagaagaagcaacacaggaaatacataggtctgttggagtgagaatgcatgcattgggtgtttgcgaatgggaagtgcgactgtggttggtgtcctcgggactggcaaatggcgcttggagggtcgtggttgcaaacgtgactggccgtacctgcactgtccatgtaaattcagcttacaaatagtttgttgttggtaacatacataggtacacttctccaaaccttgactctctgtgattcatgtttcagatataccgagaagtggaagctactgggagaaacagtttaatctaccactcaataactaagaagggacctttgcatggaactctgatcaatggtcaatataaaccacttaataatctggacaggaaacgtttagccgcaaggaggagtaacactacttattgctatgacttccccttggttagtaactgaattctgaagtttcacacttagtttattcttttggctgtttccaacccaccttatgttatttcctgtctcttcaggcatttgagacagcattggagctgaattgggcatcacaacactcgggagttaggaaaccatgcaagaatagactcatcaacgtcaaagagcttgtattctccaatacagaaggttctttgggtacatctcttattccggttgaacgaccagctggtctcaacgacattggaatggtggcctggatcttagagatgtcgactcctgagtttcctatgggacggaaacttctcattgtcgccaatgatgtcacattcaaagctggttcttttggtcctagagaggacgcatttttccttgctgtgactgaactcgcttgtaccaaaaagcttcccttgatttacttggcagcaaattctggtgcccgactcggtgtagctgaagaagtaaaagcatgcttcaaagttggatggtcggatgaagtttcccccggtaatgattttcagtatatatacctaagctctgaagactatgcaaggattggatcatctgtcattgcgcacgaagtgaagctccctagtggcgaaacaaggtgggtgattgatacaattgttggtaaagaagatggtcttggagttgagaatttaacaggaagtggggcaatagcgggtgcttactcaagggcgtacaatgaaacttttactttaacctttgttagtggaagatcggtcggaattggtgcttaccttgcccgactgggcatgaggtgcatacagagactagaccaaccgatcatcttgaccggcttttctacactcaacaagctgcttggacgtgaggtctatagctctcacatgcaacttggtggcccaaaaatcatggggacaaatggtgttgttcatcttacagtctcagatgatctcgaaggtgtatcagcaattctcaactggctgagctacattcctgcgtatgtgggtggtcctcttcctgttcttgctcctttagatccaccggagagaactgtggagtatatcccagagaactcttgtgacccacgagctgctatagctgggattaacgataatactggtaaatggcttggtggtatctttgataaaaatagctttgttgagactcttgaaggctgggcaaggacggtagtgactggtagagctaagcttgggggaatacccattggagttgttgctgtcgagacacagactgtaatgcatgtcatcccagcagatcctggacagcttgactctcatgaaagagtggttccgcaagcagggcaagtctggtttcctgattcagcagccaagacagctcaagcgctcatggatttcaaccgggaacagcttcctttgtttatcatagcaaactggagaggtttttcaggtgggcaaagagatctttttgaaggaatacttcaggcgggttcagctatagtagaaaatctgagaacatatcggcagccagtgtttgtgtacatcccaatgatgggagaactgcgaggtggagcatgggtggttgttgatagccagataaattcggattatattgaaatgtacgctgatgaaaccgctcgtggaaatgtgcttgagcctgaagggatgatagagataaaatttagaaggaaagagctgttagagtgcatgggaaggttggaccagacgctaatcaatctgaaagcaaatatccaagatgccaagcgaaacaaggcatatgcaaacatcgagcttctccagaaacagattaaaacccgagagaagcaacttttaccagtttatacccaaatcgctaccaaatttgctgaactccatgacacttccatgagaatggctgcaaaaggtgtgatcaaaagtgttgtggaatggagcggctcgcggtcattcttctataaaaagctctatcggagaatcgcagagagctctctagtgaggaacataagaaaagcttctggagacatcttatcatataaatctgctatgggtttgattcaggactggttccgcaaatccgagattgcaaaggggaaagaagaagcttggacggacgaccaactgttctttacatggaaagacaatgttagtaactacgagcagaagctgagcgagttgagaacacagaaactgctgaatcaacttgcagagattgggaattcgtcagatctgcaggctctgccacaaggacttgctaatcttctaaacaaggtatgaactcaaacactagagaaaactgagcttttggaggccccctaaatgaattatgtgtgatgcaggtggatctttcaagaagagaagagctggtggacgcgattcggaaggtgttgggttgatatatctatatgaggtttagcttctgttccaataaagatggtgttttggagttgcttgtagcattagatttgaacggcttccttgtatttgttagcgcgcacaatttagttcgtaaaaattcattcgacagcccaatgttgcaaaagtgggacagagataacttgcagaatatatatcgttgttgcttctactatgggaaacttttggtggttgatgtcaagattctagtaaaggaacttaaaagcttgtgacaagatcataacacataaaataggagttttgaatttagacacaattaaattttttttttctcttttctcaaagtgtaactttatgtatcatttaaaagaaccatacatggaatgccaaacacttgtttagcccaacacattctactcgattacatattttgcattttgaaacttttaataatctcaaaccacataagagagcacttggaacactacagacggtaatagtagtgcgcttcagcttcttgatctgatgagaaagggcgatatgaaaaccaaccattgtcttgaaaacatttcaacaactggtggtgctcaagagagattaactcaatatctccagtttcaacccttaacactgcattccatctgttttttttttaccaaaataagaacctaagcttttaaacgatcctagcaaactcaaaagaaacatatcaaactaacaaggaactcatgaaaagaggaactccagcagaaaatttcaactaaaaataaaatactaaaagggagaaaactaaatctctcacttaacccctgttctaagaacatttacacttaacgagcaaaccagcggagccatgagtgcaatctaatcttacccaaaacttctactagagcctcaaccattgagatcctaagagcatcctcaacaataagcttttattaaaaacctcttaacaacaacaaaatgaaccaatgtataaaagacatgtggcttaggttgtttagttgagtattaaaaaattctcttcattctcttagttaagagcctctcttcattttctctcttcttttctctatgttttgatttttataatattttcttacaaaccccattcatcttcgatccctccattgaggatggtctaaagcttaaaagaaaattaaccacaaagcaaaacaaagatcgaatactagctaagaatttctgagtttaaccctaaaacaaaccaattaaaggacagctggcccaaagtaaacaaaagaaaggccttattgaaatacacaagtggtccaggagatagatatggtcaaacgatgaaagaatgagtaattgaacacgaggaaagaaactatatcaccctttaaagatgacgccattgaagccacgtgtaagcatatccttcactcaaacaatgactctttggattcactcaggaagaaagattccgatcaccggtaatcaacgtcagagaagtatccgatcatctgtgaacaacaacgaagagaattctcccgagaccaaaatattagactttggtttatattggtttgattctgttgtatatacctaaccggtttgttccgggttaattaggttagatagggaaagtgtatataaactcttgtattcacactttaatgaaataagagaaacattttccactttcggctctcagctatttcctcttttggatcttcatcgatcttgtctatccaaagctttgagctctctttctgttcttcattacttctaatatggtatcagagctatacacttagcttgtttcattctctgattttgttttgtctccgatttgattcttcacaatccgacgatggttaaagctgtcgttcatcgcagtactcgccgtccggcaagctcatcacgcgcaggaagcacctctcgagcaggaagcttaccacccattccggaagcattgtttgctccgtttggttcctctgttgtgatgaatcctgacagcatccactctccactgtttcttcataacgccgaccacccagggatatcgattgtctctgagcagctagacggctcaaactacaaccagtggagctccgcgatgaagatagccctggatgcgaagaataaaatcgcctttgttgatggatcttgccctcgtcctgaagaaggtaaccatctctctcgaatctggtctaggtgtaatagtatggtcaagtcctggatccttaactcagtcaatagggaaatctatggtagtattttgtcttttgatgatgctgctcaagtctggaatgatctgcacaatcgtttccatatgacaaacctgcctagaacctttcagcttgttcaacaaatccaggatctccgccaaggttctatgaacctttcaacctactacacaactttgaaaaccctttgggataatctcgatggtgcagaggctagtgaaccctgccagtgttgtaagaaatcaaactgcgatggtcaacttgctgctaaatccaaagtgaacagaggacggattatcaagttccttgctggtctgaatgagaagtactcaatcatttggggacagataatcatgaagaaacctctccctgacttagcagaagtttacaacatcttggatcaagatgatagccagagacagttcagtcacaatgtcccttcagctgtctttcaggttagtcaggaagttgttcagcctggtgtgttgccttcttcctcgaccatgaatcaacttggaacgttgaatgctgttcaaaagaaggactctaagcccatatgttctcattgtggctacacaggacatacttctgagcgatgttacaaactccatggctatcctgttggttggaagaaaggaaagtcgttctatgagaaatcacaacattcttctcagtcttcacagccccctaagcccaattctggtgtcactgcacaagtaacgggaaacagtcagagcactcctgcaggtctggaaagtctcattgggaatttgagcaaggatcagatacagaatttcattgctttgttcagctctcagttacaacctgctactccagttcagcaacctgcttccatgccctcttctcacagcaatgatccatctggtattactttctcatcttctactttcagcttcattggtattctcactgtctctgagactgaaatgacacaaagtacatggattgtggattctggtggcacacaccatgtttgtcatgtcaaagatatgttcattaatcttgacacttcagttcaacatcatgtgaatctgccaaccggcaataccattagagttggaggtgttgggaatattgctgtaaatgatgatctgatattgaagaatgttctgtagattcctgagttcagactgaatctccttagtgttagtgcattgaccatagatattggtgccagagttgtgtttgattcgaattgttgtgtggtgcaggatcttaccaaggggtcaacgattggaagaggtagaagagttggaaatctataccttctggacgttgaagattcagtatctgaagacactgtatctacttcttttgttgcaaactctgttgttgatgcatctgtttggcatcaacgacttggacatacatcttttgattgcatagacttgctcacagatgtacttgggatttctaaaaccaagaataaatgattgttacattgtgatatttatcagcgtgctaaacaaaagaagttaacttaccttagtcgtcacaatatttgcttagcaccttttgatttgctgcacatagatgtctggggacccttttctgaaccaacacaggaaggatatcattacttcttaaccatagtagatgattacacacgtgtgacatgggtctatctcatgaaatttaaaagtgatgttctcaccattttcctttgttttatcacgatggtagagacacaatatcaaacaaaagtcaaagacgtccgatctgataatgctccagagcttaaatttgaggaactatacaggagaaaagggattgtagcataccactcatgtcctgaaacaccagaacagaattcggttgtagagagaaagcatcagcatatcttgaatgttgccagggctcttctctttcagtctcaaattcctctctcatattggggtgactgcatacttactgcagtcttcattatcaacaggacaccatctccagttatctccaacaagactccttttgagatgctgaccaagaaagtgcctgattatgctcatctaaaaagttttggctgtctctgctatgctagtacttctccaaaacagcgtcacaaatttgaagatagagctcgtgcgtgtgcttttctaggctacccttctgaatataagggttacaagcttcttgatattgagagccacactatctttatctcaagaaatgtggtcttctatgaagatttatttcctttcaagaacaaaactgcagagactgaagactcttctgttttctttccacacatctatgttgataggaacaacagtcctcctgctcaggcattgccaatccaagaaacaccaccgttagatgtccccgcaacaaaatagaattcacgagtgtcaagaccaccagcttatctcaaggactatcactgcaatgctgttacatcctccacagatcaccctatatcagaggttctgtcttactcatcactatcagatccctacatgatatttatcaatgctgtgaataaaatcccagaaccacacacgtatgctcaagcacaacaaataaaggagtggtgtgatgctatgggaatggaaatcacagctcttgaagataatggcacttgggttgtttgctctttaccagtgggtaaggaggctgtcggatgcaaatgggtttacaaaatgaagttgaatgcagatggtagcttggagagatacaaagccaggctggtcgcaaaaggctacactcaaactgaagggctggactatgttgatactttctctccagtcgctaagctcaccactgtaaaattgctcattgcggttgctgctgcaaaaggttggtctctcagccaattagacatttccaatgccttcttaaacggtgacttagacgaagagatctacatgaccttgccacctggatactcatcaagacaaggggactcctttccgccaaatgcagtttgcctgctgaagaagtctctgtacggtctgaagcaagcttctaggcaatggtacttgaagttctctgagtcactcaaggcccttggatttacacagtcttcatgtgatcatactctctttaccagaaactctaagaattcttatatggcagtactagtttatgtagacgacattatcgttgctagtagctgcgatagagagacagaactgttgagaaatgctttgagcgctcctttaagctaagggatttgggaactctcaaatattttctaggcctagagattgctagaaatgctgatggtatctcaatctgccaaagaaaatacacgcttgaattgttggctgaaactggtctccttggatgcaagccaagttttgttcctatggaaccaaatcagaaattctctcaagaagatggtgagttgatcgatgatgcagaacattatagaaagctggttggtaagctcatgtatctcacattcacaagacctgatatcacatatgcggttcataaactctgtcagttcacatctgcacctagagctccacatttacaagcggtctacaagataatctactacttgaagggaacagttggtcaaggtctcttctattctgcgaatgtggatttaaagttgtctgcctttgcttattcagatttcagttcctgcttagactcgaggaagtcaacaactggatactgcatgtttctcggaacgtccttagtgtcttggaaatctaagaagcaggaagtagtctccatgtcttctgcagaagcagagtaccgagcaatgtctatggctacacgagagataatgtggctcaggtaccttcttgaggatctttggattgatgtttcagaggcttccgtattgtattgtgataacacagcagctcttcacatcgcgaaaaaccttgtttttcacgaaaggacgaagcatatcgagcgggattgtcaccatatcagagaaaagatcattcttggtttgataagaactcttcatgtaagaacagagaaccagttggccgtcattctcaccaaggctttgtttcccggtcagtttaaacgacttctaagcaagatggacatcattaacatttatgctccatcttgagggggactattagactttggtttatattggtttgattcttttgtatatacctaaccggtttgttccgggttaattaggttagatagggaaagtgtatataaactcttgtattcacactttaatgaaataacataaacattttccactttcggctctcagctatttcctcttttggatcttcatcgatcttgtctatccaaagctttgagctctctttctgttcttcattacttctaatacaaaactaatccaaatatccagttcgtctagacttcccgagttcatcttgaattagtgaagaaaacttaaactaagactagatctagagaacaaactatagcagtgaaccgtcatgcttcaccaagcaaaactcaacaccttcaatctgatttccaaatagatgaagatctccatcgttaatgtgaagaaaacagaaatcaggtggacatgatctagagataaactctgcttgatcttcttctctagacttttctgttttatgttcatgccaaacatcaccagaattatcttgtctacatctgaatccaagttgtacacaccgaatgaacaaaaccaaaaacacaacagaaagatagttgtaccataagcgagataaaccggacaacaccggggctcggaggtaaacgaaagctaaccatcgtcgctagaaaagccgatcgatgctagatgtaaagccgaccaaatatcgttttataagccggagtatgtcggacgtaatgccgaatttcgtaccggacgacaatgatctgttttgatgctttctctctctgaaagatattaaaaatagaaaagagagagaaatcacgcttcttgacacagttacagttccatattacagttccatattactgaaactgattttttgtttgttatatatatatatatatatatatatatatcttattatataaagtaaggttttgaaagttactaactcacgagatcataagacgtttcaggtctatcattgagatgttgacatgtgtcaagaaaacatttttttttttaaaagaaataaacatatttacatatactaatttatatttttatattaaaaaaatttcacttataattttcttaattaaaagagaaaaactaacaataagatggagtttatataattaaattgtatttgtattgcaaaattggattgtatttgaattgcaaaattggattgtatttgaattgtatacaatcgaattaaattgtattgtattatgataaaatagatatttaaattgtgttgtaaaatcgaatttgtaagattgaaatttggtttaaggaaatattaaattaaatactgaaaaaatatgagttactatttaaattcaaatatcatcaataagttggagtgtatataattaaaaggcagtttattatgatgaaagagatagttaaaatgtatagtaaaattgaatgtgtatgattgaaattttatttaattcaaaaattattaaattaaatattagaaaaagtgtgtggatcactatttactattcaaattttaaatattatcgataaatatttgaataaattcatatcttacacccgtctatttagccggaccttatctagataataacaaatatttattatccataaatgttaacaaataatttctattaatatttcaaaagttagtaactcacgagattaccaactattaaaaaaagagaaattttacaattaattatctattatagaagaaaaaggattatatacataattctaccaaaaaaaggaatgtaacacatccacctctatataacaaagagataggtcctgaatgttttgtagtatttttattggtttttagtttttggtttttggattttggtttttgtagtttttgatttttgttgtagattttagtttttgcaaaatccttaatgaaaatttatttagtttttaatttttcaacataaaaagtaaatgtcacgtcaattgttttaaaaatccacaaattgtggtttttagattctatgaacaaatagataaaatctactaaaatcttgtttttctactttttaggaaatctagtttttgcataattgtgaatggataattatttggtttttataaaatcaaaatccaaaaaaaactttaaaaactacaaccattcaaggccataatctcttatttttagaatttcataatatctaaatgtaaatttatattgacagtatttgaattttgaatagtgaaataggaatttgcacatttttcttgatgtttaatttaataatttttattttaaacaaaatttcagttttatacattattttttagtatgcattcgttagaattctaaaaataaaacataagtataagcttgcagtatcacatcaaaagatgtaatcccctccatcacaggatgcattaaagttctttaaataaaacataagaattaatttttgggagatttgcaaaactacccttttgcaacaatacccttttgtattgtccattttttaaaatacctttttccttgaacataataaccaaattaccctcatctaataggaacatgtaattggaaacggaatttttctcgccaaaaaaaaaattttcaccaaacttttttcccgccaaaaaaaaaaggtcgaattatttttttcgcaacaaattttttctcagccaaaaaagtgcttttaaaaatccttgtaaattttttttggctggaaatagatttacaagagattttaaaagggttttaaaagatttacaatggattttaaaagggttttaaaagatttacaagagatttttaagggctttaaaagatttacaaagttttttttaaagttttttaaagggtttaaaagtgttttaaaggatttacaagggattttaaaagagttttaaaatatttacaaaggtttaaaaaactctttaaagatctttaaaaatcttttaaaaactttttaaatcttttaaaaccctttaaaaatctcttataaatcttttaaaacccttttaagatgcattgtaaatcttttaaaacacatttagaccctttaaaaatctttaaaaaacatttgtaaatctttaaaacctctttaaaattccttgtaaatattttttaaacccttttaaaatcccttgtaaatctttgaaaaccctttttaaatcacttgtaaatattttaaaacccttttaaaacaattttaaaccctttaaaaatcttttaaaaacctttgtaaatcttttaaagctatttaaaatatcttgtaaatcttttaaaacccttttaaaattccctataaatcttttaaaacccttttaaaatcccttgtaaatctatttcccgccaaaaaaaattcttttgcggaaaaaatatttttgaaaaaacaatttttgcgagaattttttttgacgggaaatttattttggaatattttaggcgaaaatatttcattttgttaacctaaaacaattttcaaataggggtaaaatagtcattaaaaatttaaagagggtagaaatgaaaatggctaataaaaaagggtagagttgaaaaagggcattatgaaaagggcatttgaaagaatttttcttaatttaatagtattcttattcttgtagtacgtttattagagaattattgtttttctttggcatgatagtttgggtgaactagcacaaaatattaattttaagtactaaattctcatttttaggatgaatatctcaaaaataacacaaatattctatgttattcgttagttgcaacttatatgagcagcaaacaatttcatgaaaagtatgataatgacgaagttatgtttatgggttgtattattatcttaagaattgatatttttcctctctttctatcatttacttgtcaattatattgcttatattttgcttatgatttacttatgttttgattatcttttgctttttaattttgtaaatttgttttttatactccaatttttcaatttttcaaaatcttattaacaatatagtcaatggagaggtaaagtttatctctctattgagtttccaatggactgatgcaggagagccattcaacaaatcatatgcgatgcaaaggtgagttactttggaatctctacattttgggtggtatccaatctttgctaaaaaccttttcctaggaaaattatacgttttaagcttatgtttttcatttctttcttaaaaccattttcaggaaatttttctcatttttctttcttctactaaccattcgttcatcttccaactaactatcacattcttctcctaaacccaatcatttcttctcagttttttttgctccgtgttcttttgcatctcgcaacctctctttttttgtttctcgcatcatagtttctattttcttttttcctccgatttttttcttttctaatcatgtcccggttgctgtggttactgcttcagaacccagttctttgactctttgccatactttttaccgtaactattttagttttagttttcatgtgtcttacgatcatatttccgtcacttgatgatgttcttcgagttgatgacaacgaatatgtaaaagttgttgttgactgaacatcatcaagaagggctcatacccgttcctagtaaaacatttcgtatctaggtatcccgaatggcattgcagtatttgtctagacatttttgaaagtaatgttctattggctattacagtgggtggacacacgttccactttcactgtttaagtcaatagaacaacacttgtcctgtaggacaaatcaattctagtagtattagtatttaggaaatgtttaactaggtgggtagttttttagtttgtatttagcataatagatagtttttttatgaaaaataaacctgatagttttagcaaaattatttagcaaaaatgggtagtttttcttatacaagaaaaaaaaaagaaacaacaacgttacaaaacaaaactggttaaattattttctagaataacatgtgatgtgtattttattcagtaagcatctccttagtatatgaatataaatttacaaataaaagtaatacaagatcctaatacaaggaaaacagaaagaaaaaaaaacataagtaaacaaatttatgtggataaaaaacgccacacgcattcacgtattgtcttgccatgttagatatgattctcaaacaccgttagaagaatttttttatgataaaataataaaagtttagatcgcaggcaatggacctaaatggtcccataattcataggataacttttcattcttgtttcgagcatgtttgatacttccactaacttatgttttgctctcttgatctctacattctcatcaaagttagtccataaaactataaaccattagtatcctcgttctcttctgcatgaagataatatttgggaccgatattacattcgctgacactatatatggatttgtaggttccctcgaacaattttttgtttcaaaattttttggcgggaaatttattttgaaatattttaggcaaaaaatattaatatttcattttattaacctaaattttttttcaaatagaggtaaaatggtcattaaaaatttaaagagggtagaaatgaaaatgactaataaaaaagggtagagttgaaaatgggaattatgaaaagggcattagaaaaagaatttttcttaatttttataagcttttttttaattgtgtgttttagtttaacgaatgaaaacactatattacaatgataaatacaattttattcaacttaactaatgttaaataaattacattgttattttaaactttagttagttattatccatactaaaagaactcttaaaaagttaatacatggtaaatttaattgaccaataacgcatgtaaacacaaatttgttaattttcctttcggtgaagaaaattaaattcaactttttaaagatataactataaattagtatatgtaattgtttacttttttagtttttctatttttaaaggaaacaaaagttaaaaaaatttggacaaatgtcaacatgtgatcgatatacctattacgtgtcacaatcgtatgagttactaactatgaaaaccatactttatatttttttcttaatcaaaagtaaaattaacaaatttgtttttacatgtgttattcgtcacttaaatttagcatgtattaatttttaaaaaataatttagtaaagataataatactaattaaaaatccattgaagtttaaaataactatagaatttagttaacactaatttaattggataaaatagtatttattattgtactatagtgttttcattcgttaaataaaaacacaaaattttaaaaaattaatgagattataggaataaagttttgaatatttaagttatattcaaagaattttaatgtatcatgtgatggagaagcttgcatcatttgatgtgttaagcttatacttatgttctattctaaaagttttaacgtatgtattcataagtgaaaacacaaatttttgggaaaatagcttatagaatttgactttcaattacttaatgagaagttggtaatttgttttattaatttaactcatttacaattactttgcatgagataaaattaacttatgagagtacaccatatagatttgatctaatataaatattatgttgataagaaattattatcacttaagatgatgtgtgtataattaaaatagaactattataatgaaatagatagttacactgtatttcaaaattgaatgtgtaagataaaaatttgtattacttttagatagtaacgcttgaagcgcgtggttaaaacaaaccatttatataactatataggtgtcaaattaatttgttttagttagaaaacaattatttacttatttgttcatattttatatcatcgaaaagtgtacaagactatagaattcataaaaacataaaaggtttactaaatttgtttgaagcccaaataggacccacattttttgaatccaaaaaataaattagattacgatatactttatatagtaaatatttcttataaattattttttaaaattaaaatagttaacagatttagtaattattttaatatttatctaattatttatctaataattattttaatatttatttaattagtaggacacttcatactaattaaatgttttgcctagggtgtttttaataataatttatttctaaatgtttataattagattttttcaattgtaatttaatgaaaaaggaatattcaatcaattatgatggaaaatgtaagattgaaattagttcgaaacataaaaattaagaaaatattgattactatttagagttcaaagattatcaatacaaagctattttcattaaatagagctattttcaatacaaagattatcaatacaaagctattgagattgagatggatcatacatacaaagattatcaatacaaagctattgagattgagatggatcatacttccaagggatttctccaccaccatccaatgtccatctttgtctaaatacttcaacgtatgatgattcctagaaacagagctattttcgtcaccatgtattagatcgaatcaaagaagtctttagtaaaatatttatgtggtttattgtactggttaataaattgtaattgatttgtaaatttaagtttctaatcagtgatcgcaacagccaaatataagacaatatgaagtgttattgagtagatgatttagatttttgatttttctaaatttgttgtgttattagtccaatggtcttggaaccctaacctttcattaaaggaagatttgcaaaactaccatttttttactacccttttgcaacaatacccttttgtgttgtccatttttaaaaatactccttcccttgaacagaatgaccaaagtaccctcatttaataggaacatgtaattggaaactgaaatttttctgccaaacttttttcccgccaaaaaaaaattttccgcaaattttttttttataacaatttttttctcagccaaaaaaatgcttttaaaaacccttgtaaatttattttaaaacacttttaaaccctttaaaaatctttgaaaaacctttgtaaatcttttaaaggcctttaaaatctcttgtaaatattttaaaactcttttaaaatcccttgtaaatctttaaaaacccttttaaaatcacttgtaaatattttaaaacccttttaaaacaattttaaaccctttaaaaaacatttgtaaatcttttcaagtctttcaaaatcttcatatcaatcttttaaaacccttttaaaatccttgtaaacttttaaaaccctttcaagatcccttgtaaatcttttaaaaccctttttaaatctcttgtaaatcttttaaaacccttttaaaatcctttgtaaatattttaaaacccttttaaattcccttgtaaatctatttcccgccaaaaaaaacttttgcgggaaaaaaagttttgaaaaaaaaaatttgtcggaaaatttattttggaatattttaagagaaaaatattaatatttcattgtgttaacctaaaacaattttcaaataggggtacaatggtcattaaaaattgaaagagggtagaaatgaaaatggcaaataggaaatggtagaatggaaaaagagtagtgtgaaaagggcattctcagcaattattcttcattaaaaccctccctgaaatcatctctagtattttgatgtcatttaagtttagataatcattttggaaaataaaagaaaaaatagaaatgatatttgttaattttcatcaatttaaaacaatttttaagttatttacatctaattactacaagaaaacaagtcatttgcgagggacaaaaccgtagctaatccctcgcaaatcgctattagcgaggaaattgcgacgaacaacacttcctcgcaaaacgcgcgtcgcaaatcagaaacagtcgcaattccctcgcaaaatttgcgacggaataattgtcttgctaaactctcgcaatttgcaagggatattaaatatcacaaattcactgcaaatgagttgtcacgctaattcctcgcaaaagttgcgagggatttgcaatgaatatttctatagcaaacctgcgagggagttgcaagttccagcgatcgtagtagcaaatccctcgcaatgtttgcgatggacttgctaggtttttgcaacgttcttaattattagattaacgtgattactgttctgtttagcttaatttaatcttaatttttggttaatcttaggttaatctaatcttaatgtttggtattagcattgaattagaaacttaattgatagcctaaacacatattattaatactgaaactttggtgttcaaataaaataagaaagcttacaaaataaatataacaaattttaggtttagatgagagaaataaaatagagtgttgcaagttttttagaaagcaagagatggagaggatccagtgttgtttgcctcagtctcaactgcctcctctgctctaattggttcagcttcaacagcaacagttcctgtggcatttggcatcccagctgcctcctcctcaacgatcctagcagctgtagttcatgtggcatttggcatctcaggtggctggttggagccgagaggttctatcctagaagatccagctcgaaagatggcagcaaagtctggatctttctccgcaaggtagtcgaagtacacatggaagctactaatcttctccgctcggtttgcaataagagcttcagcggcagccagcttttgagagagatcacccggatcttctcgaggaactgaaggaccaatgtgagctcatgcggcttctagctgcaatgaaccagccccatatatcctccctttcttctttggagccacctaagagaaactcaaaaccaaaaacaaaaaccaagtcactatttcctaatgcaacctaaactgagacaaacaaatcaagacaataacgaatccaattacatatgaaaccatcgacactaagcttagtaacaatgccaagaaaaatacaaccacaacaaacaaaaaccaattcatgacaaaacacaaacaaaggcagaaaaaaactgacaaacacaaagccaagtcactatagtaagtgtgttgacaaaacacacaaacaaggcaaaaaattactaacatcatcaaagccaagtcacatagccaagtcaacggatcaacattttcaaacaaatcaggacaaaacacagctgagactatatagaagagagagaaagaaatttatcgaagcatatatcttgttcggcctgaacaaataaaccgcctgaagctgtgctctccgttgtgttgttggaacacagctgagacgactcctcttgaatcctagatgacacttcattgtagatctcctctgattttccatcaatgaaactaccatcaggttttctatgtgtcttatctaagagcacaagaaaatttggagtagtttctccggtgagctcacactacaacagaaacaaatcttggttagttctttgagtaagtaacaaaattgactaagtaagagagtaaaataacttacacgttttctggcatgggctttgtaagaggtctggccagacctgtgtttatgaatcccgaggccatccggatcatgtaatcttgcattcctactattgatactctttagttctgacttaggatctcgccaaaaactaataagaccggcccacactgcaggatcaaaccagcgaggcattgctgcatctcccttctctctccactttcccttccaccgacaaacttgatcagtcatcctctccttcagctttgcttcaaactcagtcttaactctcttgtttattgttttatcccaattatacatttgctacaaaacagacacaagtggcagcaaaaattagacttaatattacagcaactaaaaagctttacacaacaaaacataatttagtggacttacagcaaaggtttcaaaccagcgatcaaccacatgttggggtgtcattgaccagttagcatgaagctccttgaaatctctttcaaagatgctccggacagtagctggaactgaagggtcatcctcaaacctacaaacacaaggttccattaggcaataaactgataactgagactagtactatgaacgcttaaggaatatgcttacaaaagtggcttaccaaaaagttccgggaggacggttagggtctaatctcagtaacccagcacgaccaagactatcaagcaactcatccagagttatgtcgttgagccgagaagctagaggattagcatgattgacagaaccgttgggtgactgatttccctgctgaggagaggcaccgcttgcttggttgataggcgtttgaggtctggagttttggccagttccatgaaccgcagaagtattcccttcactgctatgagggtttccacgctgctgttgagaccgaaacctcgagtagtcctttccagtgaacgacatcttgcaatgaagaaatcattgtgttcgtcaaatggataagcaaacccaaaaccctaaatagatctagaaggaaaaatagatcgaaaccctaaatagatctatgaatgaaaccctaattaacacaaaagaaaccaaatgaagaactgagaggtaagagacattaccttgtttagttagaaaccgacgatgggaagaagacacgacggagatcggcaactcgccggagaagagaaaagactcgattagggtttactagaacaagacggcgaagaagaacggagaagacaacagaggagaagaagaacagcagacggagaagaggaggtccgccggagaagaagacatggcgccggagacgcgagagaaaacgagagagaaaatttttgtagggtttgtctggaggcggcttggtttgagctgtgctcaaactggcttcgctttgctcaaactggcttcgctttgctcaaactggcttcgctttgtatatatagaaataaattgcctcgcaaatccgtcgcaacgtttgcgaggaaccgactcactaaccaataggatcgcttcattctttcgacacaagtgcgaggaccctcgcaaagtcctcgcaaaattagaattagggttttctggattactatgcgaaggaattgtgaggaccctcacaaatgcctcgcaaaattagggttacacaattagggtttcgcggcttattctgcaacagaagtgcgaggaccctcgcaaattcctcgcaaaattagaattagggtttgtctggattacagtgcgagggaattacggggaccctcgctaattcctcgcaaaattggggttacataattagggttttgcggcttactctgtgagggaattgcgagcggttgttgtaaatccctcgcaaattgcgaccactttgcaaggaatgctcgattagggtctacgagtgaattgcgagatatagtcgtaagtccctcgcaaattgctatggatttgctaggattatgttttaaaataaaataaaatagagatattatgaaaataataactttaaaatgcaaaattataagtataaactttaaaattaggaaattataactttcaatttttaaaatcatttaatgaatttattcatttagttataatatatttggtaaaaacattcacattaaacaacatatatataataacatttattctaattcattttctgaatcattacaatcgttttctgactcaatgtcttcatcagattcgttgaattcatcttatcgttcttcttcttcagaaccttcatgagtgatatcttcgaattctctgttcagtagatcaacgtggataacatcttcttttgttatgtctggtatagaaacttctcggacactatcttgttgcataacaacatcataacctaggccgactatacgacctcgcggattaactttaataactgataaccacacttcacgccgtgacctcacacgcggataaggtagaaagcttacttgccctgcttgtgatgctagaataaatggttcgaacttggcataattcttgtttgcattgacatcgaacacgcctaagttatttactcgtacccctcgacctatcaccggatcaaaccaatcacacttgaaaaggacgcatttcaaattcaaaagtctcggatattcgacttctagaatttgttgtagaatccatggataatttgcagttgcccttcgacttccatatggatacgtatggaaagtatagccgcgagtgaagtacatcagagcagttgtgatcttagatcttggttcttgaacgagctcatgcaaccaaagaggtaatggttcgtttccacatccatttgtaacctacacaaagaaaatgttaagtttaattatcattttttataagtaaataagtaaacgaattttccaattattcttatacttacatagtattttaaccatccagcaaaatcccgatctttgtaagtttcatattctttttcttctaatccaggacatgcttcacggatttgtgaatcaaataacctacaaattaacgtagatgcttagcttccttaattagtatctcagtaattaattattaaatataaaaaattatgaataaaactgaatgactttatacctctcaaatttttgaatgtaatcaacatttcggagtatgtaattgtgagctgctcgaaaaagcgcatggtcgtcccaccaaacttctttcaacttccctgccagtcttcctatttgggaaaaggtatctggaacatcaggaacgttatatgtatgtgcaacacctccatcgtcatagcgtcgaggacgagtctttttggttctaacgcttgacctaaagtaatacgacgtgaagtgagatgtttcctcggttaaacttccttcgactatcgacccctcaactctagccagattttttgcctttcctttaagagatttcatgaatcgctcaaaaggatacatccatatgaattgtactggcccaccaagagcagcttcatgtggcagatgaattggcaaatgttccatcacgtcaaaaaaggcaggggaaatattttctctaagttacagagcaacactggggatattcttgtctaattgttctatggtatctgttgtcagtgttcttgtacataggtccttgaaaaatactccgatgcctatcatgtatttaattaatgtaagttaataatgaccaagtaatagttgagtaaaatacagtatgtatatatatatatatatatttattacctgcaattgcctcatgaatatttgccggtagcaactctactaatccaaatggcagtaatcattgcatgaatacatggcaatcatgacttttcataccagaaaacttttggccttgctctacgcatcttgaaaattttgacacatatccatctgggaacttcacttcagcaacaacccactcgaacaacgccttctttgcttcattagacaagcggaatttcaaaactggtaatttcccatctcgtgtaacatgcaactcaggtctgctgcatatttccgccaagtccaatcttgatttcaaactatcttttgttttgccctgcacattcaaaagcgtattcatgaaattatcgaaaaagtttttctcgatgtgcatcacgtcaaggttatgccgcaagaggagatccttccaatatgggagttgccaaaagatactttgtttgtgccaattgtgagaattttcatattcatcaggcatattcgctgtggtgtgccaattacccccacgtttgcaggtttcctaagcaccataataatcaatctgttcaaacaaatcagttccagaaatataagatggcggaggaagacgaactactttattcttcctaaaaagttttttgttcctccgatacggatgatgcagggaaagaaaccgacgatgacaatcaaaccaacatggttttctgcctctctttagctgaaacgcatctgtacgacccatacagtaaggacaagataatcttccatgcgttgtccaccccgataacattccatatgccgggaagtcactaatcgtccacattagcactacccgcatattgaaattttgtttgctcgagtaatcaaacgtatgaacaccttcataccacaacttcttgagttcatgaatcagcggttgcaagaagacatcaagcgctcgtttcggatgctttggcccaggcactaaaatagttaagaacagaaattcgctttgcatacacatatctggaggaagattgtatggggtcaagataacaggccaaagagaatattgtcgccgcccagacaaatcgaatggactaaatccatctgtacataagccaagatacacattcctacactcgttagcaaagtaaggatataccgtttgaaagtgtttccacgcctttgcatctgatgggtgcgttatttctccttctgcagttgtatgttgagcatgccatctcattttcgtcgcagttttttctgattgatataagcgtttcaatctatcacttattggcaagtaccacatccgtttatatggcactcccgtccttccgccagtagtctgatatctcggcttcccgcaaaaccgacattcctgcagatttacatcatctccccagaaaatcatgcaataatcaatgcatacatcaatcatttctgatggtaatccaagactcgaaaccaacttctgtatttcataataactctcagccgatatattatccgatggcaaatattccttaattaattctgcccatgaatccatacagttttcacttaagttattatcagctttaatagtcatcatcctagatgccaaagataacttagaatgcccttctctacatccctcatagattggttgatttgcagcatctaacatatcataaaaatgttgagcatctacgttgggttcttcacttatattttcaggaaatgaagcaatagtttcatgaaatgcatccgtaaccatatcatgaaatctattttcctgattatgcccataaccaaattgatcaggtacatgctgaccataattcgcatcattattaaaattactaggttgctcgacaccataatttgtattactagttcatgcgctatctctacaaccctctccatgacgtaaccagacatagtagtttggcataaatcctctattataaacatgctttttgactacattaaaattccaaatatttctcattgagacacttacgacatggacagaatattgtaccgttctcacgagcaaatggttcgtttgtcgcttgatacatgaaactgcgcagtccgtcataatactctctcgtcacctcaccggtccttgatctctatgattgtacatccaacttcgtaatgtgtaaatctcatgttctccaccccaagacattattatctttgtaagaagttttttttttttgaaaagaatttttttgtttgtaagtaaatgttgtgatttgagttatgatttcttagacgttacgtaggctatttatagatattccaaaaaatattgcgagatttgctaggaaaaaagttttttgctaggaatttgcgagggaatcctacctaccaaccagttcggtaagataatttaaaacgtggtcacctaacccgcaaagactcgcaaatccgtcgcaaaatttgctacagaatagttgcgcgtcgcaagtgcgtcgcaatctgcaagggatttctgtcactcgcaactccctcgcaaatatgcgacgtctttgcgaggaatcatggtttccacgcaatttcctcgcaaacgtctcgcaattttgcgagagaaatgttcgttgcaaattttgcgacggagtagcgaggttgttctctttcatcgcaaacgtcttgcaattctgtagcaatttgcgagggatattttccattgcaaatttccctcgcaaatcgcatgttttcctgtagtgtataactgttgtatcaaacatatcagacagaacaactacaagactttcgtagttattaaacgcgaagagattgagtttcctccctctgcggttaccctctttaaaaatctggacagaacgagattgagatgatgatcacgtcatcgatgcgaccaatgttgatttgatcgattgataaccagaagttatatgtgattattgattccatgtttcaatttttatattatagaggtgttttgtattaactctatataatgttaaaaaaaaaagaaaaaaagaaggcattaattccaaataaatatgtacatactatctaagtagattacggattaattatgaaaacaatcaaagaagaaaaatatctataaactttgaggaaaaaaaggaaagaaaaatgaaaaagatatttataaactaaaaaatattagaaaagttatcaagagtaaatttggaaaatgtcctctttataagttttgatttgcaaaatgacatattcttttttctatgtaaaaactagatgctaatatattctaaaaagatactatatctttttatataaagtaccgtttttaatattagtaactcataggattgtgccatgtgtcgagtctatcaatcagatgttgacatgtgttaaaatagattaaacttttttattaaagaatagaaaactaaaaaggaaacaatttacatatagtaatttatatgtctatatctatttttttctgaatcaaaagtaaaattaacaaatttcttttgacatgtgttattggtctcttaaatttagcttgtattactttttttaaaatcatttagtaaggataataatagtaattaaaaaaaaaaatcattgaagtttaaaataactacataatttatttaaaattaatttaattggataaaatagtatttattattgtaatatagtgttttcattcgtttaattaaaattttaaatttaaataaaattaaagagattataagaataagtttttgaatagttatgttatattcaaagaattttaatgtatcatgtgatggaaaggcttgcatcctttgatgggttacttcaagcttatacttatgttttattctaagaattttaacttatctattcataagtgaaaacacaaacctttgggaaaatagctttaggatttgactttcacttacttaatgagaagttattatttttatttattattttaaactcatttacaattaatttgcatgagagaaaatcaacttatgagattacgccatatagatttgatctaatataaatattatgatatgaaatggttatcacttaagatgatgtatgtagaattaaaataagattattatgatgaaataaatagttaaactatattgcaaaaatgaatgtgtaatataaaaatttgtattacatttaatctaataattttaggtaaaaaacacacatgtcaagcgcatgattaaaacaaaccaattaaatactatataggtgtcaaattttagttagaaaaaagttatttattaatttgatctgtttaaagcccaaatagcccaaagtgtactagactatagaattcatagaaaaataaaaggtttactaaatctgtttgaagcccaaataggacccatattttttgaattcaaaatagaaattagattaccatatactttatatagtaattatttttaaaataatttgttaaaataaaaatatttagtaattattttaatatttatttaattatttctaaaataattattttaatatttatataattaatatgacccatattcatactaattaaatgttttgcctagggtgtttttaataataatttatttctgaacatttgtaattatatttatttcatttgtattttaatggaaaaggaatatttcaatcaattatgacggaaagtgtaagattaaattggttcgaaacataaatattaagttaaatatggattactatttagagttcaaagattatcaaaataaaattatgtttatttacatttatttcttacacccgcctctataggcgggcctagcctagtataatagaataattggtttattcgaacttcgaagagatgtgaaatggtcgttgcagttttcttaacatgctggtggtaataatgatcaagaggtttaaggattcctaagattgttaatacttaatctttgcgccgtacacagaaaattgctgcaacaaaaacatggattcaaccattctagcaaatgaactcgagaaaacaaaagaaaatatataaaagtaagatattgatgatattgagattgagatggatcatacttccaagggatgtctccggccaccatccaatgtccatctttgtctaaatacttcaacgtttgatgattcctagaaacagagctattttcgtcgccatctattagatcgaatcaaagaagtttttagtgaaatatttatctggtttattgtactggttaataaattgtaattgatttgcaaatttaagtttgtagagctgatcagtgatcgcaacagccaaaatataagacaataatgaagtgttattgagtagatgatttagatttttgatttttctaaatttgttgtgttattactccaatggtcttggaaccctaacctttcattaaaaccctccctgaattcatctctagtattttgatgtcatttaagtttagataataattttgaaaataaaagaaaaaatagaaacgatatttgttaattttcatcaatttaaaataatatttaagttatttacatctaactgttgtatcaaacatatcagacagagcaactacaagactttcgtagttattaaacgcgaagagattgagtttcctccctatgcggttaccctttttaaaaaccttgacagagcgagattgagatgatgacgacgtcatcgatgcggccgatgttgatttgatcgattgataacgagaagttatatgtgattttcccatttatattattaatttttaatgattattgtttccatgtttcaatttttatattatataggtgttttgtattaactccattattttgttcaaaaaaaaagaaaagggattaactccaaataatatgtacatactatctaactagattacggattaattataaaaacaatcaaacatgaaaaatatctatcaactttgtggaaaaataaggaaaacaaatgaaatatatatctataaacaaaaaaaatattagaaaagatatcaagagtaaatttcgaaaatgtcctctttataagttttcatttgaaaaataacaatttttttttcttttgtaaaaactagattttaatatatagaaagatactatatcttattttataaagtatgggtttcaatgttagtaactcataagattttgccaagtatcgagtgtatcaatcagatgttgacatgtgtcaaaatagatttaactttttgtccttaaagaatagaaaactaaaaagaaaataatttacatatattaatttatatgcctctataggcgggccttagcttgtataatagaatagttggttcatttgaacttcgaagagatgtgaaatggtcgttgcagtttttttaacatgctgttggtaacaatgattaagaggtttaaagattcctaggattgttaatacttaatctttgcgttgtacgctacaaaaacatagattcaaccattctggcacatgaacttaagaaaacaaaagaaaatatattaaagtaaaagacatattatattgagattgagatggaccatactttaaagggatgtctccggccaccatccaatgtccatctttttctaaatacttcaatgtatgatgattcctagaaacagagctatttcctttgccgtcaattagatcgaatcaaagaaagtctttagtaaaatatttatgtggtttattgtaccttcttaatagattttaattgttttgtaaatttaagtttgtagagctgatcagtgatcgcaacagccaaatataagacaataatgaataatgttattgagtaagtgatttagatttttgatgttttttaaatttattgtgttatttgtccaatggtcttggaaccctagcctttcattaaaaccctctctgaattcatctctagtattttgatgccatttaagtttagataattattttggaaaataaaaggaaaaatagaaacgatatttgttaattttcatcaatctaaaacaatcttttaagatatttacatctaactgttgtatcaaacatatcagacaaagcagctacaaaactttcgtagttactaaatgcgaagagattgagtttcctatctatgcggttagcctctttaaaaaccttgtcatagcgagattgagataatgacaacgtcagtagcacgaccgatgttgattccattggttgataacctgaagttatatatgattctaccatttatattgttaattttaatgattattgatttcatgtttcaattttaatattgtttaggtattttgtattaaccccatatgttgttcataaaaaagaaaaagaaaataaaataaaagggattaactccaaataactatgtacatactatctaactagattacggattaattatgaaaacaatctaagaagaaaaatgtctatcaactttgaggaaaaaggaaaaaaaaagaaaaacatatctataaactaaaaaatattagaaaacttattaagagtaaatttggaaatgtcctctatataagttttcatttgaaaaaatagcatattcttttttctattgtaaaaactagattttaatattttaaagatactatatcttattatataaagtacggttttcaaagttagtaactcatatgattgtgccatgtgtcgagtctatcgatcagatgttgacatgtatcaaaatagatttaactttattttttcttaaagaatagaaaactaactattaaaaagttaatgactcacgagattaccaactattaaaaagggaaatttacaattaattatcaattatataagagaaaggattatatacatgaaactaccaaaaaaaaggaatgtaaacatccacctctgtaacaaagagataatctcttattttttcacacaaaaaaaataatcaaaaagataataatacaaaagctatatgtatcttattagataaaaatagaaactagaaaagcaattaataattctaattcaaattaccaactttttataaaaggaaaattttacaattaattatctattgtagaagaaaacggattatatacataattctacaaaacaaagaaggaatgttaacatccacctcttggttgacagtgttcttatgctattagagtatcatttcatgattatgttaaaaaagttattcttggttgttgtttacatttacttatcttcgattcttttttaatgacaatttcagaatagctatcatcaaacaaaacatgaagacacaagttgaaaataccaacaaagattatataacaatagatcaaattaacaagaaacgatgctattgtcggacggtgatacgtctaacaagaaagtggaaagcaagaatttttttttaaaaaaacaatgagctcgtaagaattaattcctcctacttgatgataggtaatttttaagactttaatcctaaatattctcctatttatttctccttttttaaaaacaggagaatacaattcaagggtctctccatcattctcttaatgaaaagtttggagctcaattatgtgaaggaagccttattgaaatttccaactttagtatgcaagattgcaataagaactacaaggtctccgatcataaatttctgatgataccaacataaaaaactacactcaaatccatcgatcaacaattttgtaaaatatcaacaattttataaaatatccctcgaaaaaagtcaatttcgaaagtacaaggattttgcaaaattgaaagatatgacacaacagttgtacggtacatattctgaatttttcatttttaattttcttatatatgtatatatagtattttaacgaatttatattttaattacgaattatattatatttagttatacatatgttttcaaatataatagatattttttacacttaaattattaatgtcagtctctcatcattacatccattattgttttgctatacaaatgtagttagctatatataaaaaaaatagataaatttgacgttcgtactcatgatatgcatatcctaagaagggttaccctaaatttattattagaagggtacataatttttcctggatctcttcctctctttactttaataatctctttaatttaataatgaaaacttaagacttttaattatatagtaagatgtacatttgtttagcctaataatcattattttaatttgatatatatagtggaatggaaattcaagccacaatatgggcagaacaattggaagataaatattgtagggtgggaagcagcgataacattgttctcatcatgacaagtgttcttattaagacatatcaaagtgcaatttgtttgtcagcttctctaggaaccaaactctatttgaactttgactttgatcctgttacaaccttttggaaaaggtactttattaatgttttttaattttttttttatctaattagttaaaaactttaagtgaaatatcaattccaattaaaagtaattatttgtgttatttattagtttcagctatgatggtgggtgttttgttaaccttggcggcatgatcagaacaagctccatatgagagtttatctcagccgacatccctcaggtaatacaacttaatttcccaatttatgaattttagtattaagtctatacaatgctaaaatatttctaatatatttccatatttttaaattgcagaaaaaaacttttgtgtgtaaagcaactattactgatattatgtcacgtaatggttgaaattacatatcatgttcaacttgctcaacaaaatttgaaaagacaggaccatatcttaaatgccaaaaatgtggtaaacaatcgtaagatttctaaggtactcttggttatcttttaatatattctgcttatatacagtaagttattattaagtttccaatatattaaaccaatatatatttttcagtttcaaaattgaaataatagtagatgatggagatgactctgccactttagttatatttgatcaagatgattcacaaatcattggaacaactgctgaagatgtaactgctatataattatatgtacatactatttaggtggacataaattccaattaacaattagatgaatgttaatacgcatatcaaaagaaactccggggaacaagggttgaaaggcattcccaaaagtttacatttaatcataggagagacttatttgttcgaaataaaagttaaagaaaaagattttgaaggatcttatcagagtttcaccgtgtcatagattttcagacactataaagtacatatactattggtcatgcttaggtcgtgccattgtactatttaacataacatatgaattttaaatgcctctctatgtttaaccattttaggatgccaagaagtgcaataagagtggtgaaggcaaacacgaaaaaacgaagatcatgacgaaccacttggtagtctaaagataaaagcaaggattgaagtctaaactgatacttttattatgatatgaagtttatgaaacgattttggtttttttttgttctcgccttttcctagattttgtttcttcactattctaagtttcagataaatttttatgaatagttttcttaaaattgcatattcgttggacagcaaaagtaaaagttaaaccaatgttaacacataattaaaaaaatgtcgaaggttcacaaagattcacgtcattatgcatgcaatcatagggaaaaattaatctgcttaaaataaaaattaaattaaacgactgtcagacatgttatatattgtttatcgaagtaacaaacacatgaatttagtcaatttactgaatatgcaaaacagctaatctcatgtcttgaaagtatagtaaaatacattttgcgtctttgaagaaaaggcaatatcgttttttttaggtctaaaaaaggcaatagcgttaacaaataaataaataaataggtaagaaacaatttttgtttatctaataaattatgttaagatattccttttctaatataataaataaaatcaagttatacttaacaacgctgttaggagaaggaaatttgttacaatctatatcttacatacattataaagggaataaaataaagtaaaaccccaactgccttttaaaagataccaaacgctattcgaaatagaaacaagctaatatattaattacgttaccgtgcacaagtttaatttagaaataagtatcttcttacaatatatatatatatcagaagaggaaattccatagagtataaactcaattagttatgatattacatcataaacacgagaggcataaaaaatggctgaaaaggttaaaaagccggataacaaaagaaaacgaactattatgaacaatgaagagattgctcttatggagaaagagctcacatataaacctcatatgatgaacctatacttcacacatgggttgacaaactaaatcaatgcataagtacaaaactcaagattcacttctcacatgtatatatctttacatattgaaattaatgtcttctaacgttatttaactactcatatttgatattcatctttaagacatttttccaaaatgattttatttctctagacataagtgacaatagtttcaatttcattattggttgattatgattattttaataacaaattattatattaatctataagtgacaataacaaacaaatgttatctaaatatataataaacgacaagcatctttcttatttatcttatcatcttagctatcctcagtgtggttagttattatttttcccctaaaatttaaatgaattaatatgagatactaagatgcaaccgtcatattagatatgagaataatggttttaaatcgtagcggtcagtttcatactttgaccattgcccttgtccttataattcacaattaattaatagaagcaaaaaacttgtggctatcagattaatatcaaaaggaagggatttatatcagccgtccgattattaataaaagttaagtgttggccgttagattttatcaaaaacaaggaaccaatgtagccgtccaataaaacacttaattaaaccctaacactcatacctaattagcctaatataaatataagaatatggtgccgtcagtgccggtcctgtgaaaaatgaggccctatacaaaacaactttttttaatgggttttatagaagaaataaaaagtttgagacaaagtcttaaaatgttatgaaaatgagacctatttattcaatagcaaatagataaaaattaaaaactgaggctaaatttgaaaatctcagaaaaatgagacctatattttgcaataacaaatatttttgaggcctaattttaatactaaaaaccttaaaaaatttggtggccctatacccatgtttcttacaaatgggtcacgggccgggcctgggtgccgtttcatatattttcaatcgtttttgctgttgggaacttctctctccatgattagatacggttttgtcttaagattatcctatggctatgtgtgtgcttttctatagcagttatgagctgcaagacatgtgtttgatagtattgctgatttcatattttttggggtttgaagaagaatgatcgatgacaagaaagattggtttattatccatgcttctgctctgttgtatatatagttgttttgtttttatgagagtttgaaacacccacttaagtcaattaaatgagtactaatggggaaggtaattataatgtttaacattaaggttatgggatgaaatatgagaaagcctagacgtttcaatggtagtggagggcatgatagagtgatcaatgtagggagtggtgtgaactaaagcatagaagaggcgaggtgttctatatttgtacgtttcaaatctggtaaggtgttctatatttctattggacagaggagaaaacaataggcccaactgaatatttttttttttaatcatatatgttatatttggaagtaattaattaaatatcatgtattaaagtttttttaagtacatgtggcaaactttcatgtgctgacgtgtcaagcagaaggagagagttagcttcctttcatatgtatgattttaaggaatgatcaattgcaaaggtttaaaatatgctgaggatatttattcagtgatacgagtattcctttgtttactcttcaaaaagaataagtcttggggagagaaaaaatgctaaaaagaataatgaatggttgagttatcattaggcctgggagttcggcataacccgtttaaaccgaactgaacaaaccgacaattttggtttttggtttcaaaccgatttactgttgtaaaccattcggcataattttaaattgatttcggtattcgggtttttcggtttggttctgttttgtttggtttaagggataccttataaaaaccgattaccctagatctatcacttcatcttctttgttttctaatctctcctcttcacgaacaccttcttgactcctcttctctaacccatttttatattttcttccttagtccttcttcttctccttgtcttccttcttcttctccatttttttttgttcatagaaatattctgtcaagcaaccgcgacattgatcttctttggcatcaactttaacagcaatgatttcatcgttctctacatcttttctcaccactacatagcacaaatccattttctcgttttcgatgtccttcttcttcatctaccttgtttttctttgacagcgacatacaaaaaataaaacaaaacagaaccctagatggatgtgatgggctgtccttacccagggaaaaaagtttgggtttttaacttttaaaaaccgatatgggctttgaaaaaaacagcccattatgcctacaattgtgatccaaactgattcggttaaccgattaaaaccgatttaaaatatttcggtttaatctcgggaaattatatatcttagtaaccaaaccgaaaaagcgagtaccgaaccgacccgaaccgaattttagttcggttcaattcggcggaatttttaaaaaccgaaaaagtggaaaaccaaacaaagcgaaccgtttaaccagattaaaccgttctctcaggcctagttatcatggtatagtacatgaatgagtctagaaggttcttgaatattagcttgcttgatgagatccagcgatgaaagccggttggatatagttgtagaatttaggtatggaatttagaatgttgtgtaagcctccggagaattacatggtggttaggaattgattagacttgttaggcatatggatttggttggaatgatcaagttgatataacccgattttcactgattttatctatgttttaggtatagaattttgagtctttattttatttctcgagtctttttagtgtcttttcaggtactctatgctgtaggacaacaatggagataaggaaacattttggagcaagagctagaggaaaggaagctaaggacgaatttaaattcaggaatcagcgaggaatgtcgatcgacacactcttggtgtcgatcgacaccagtgtcggcccagcaaaagtcctagacgctttcgagtttatagtagaggaaatttgcctcagaagacttccctatttgcattattagtccctggatatttttagggtctttatattgtttttagacctagttttcttattatcaagtctttcatccagttttcattatcaagttttctacaaaaccctgttacgaagagacataagctattcatcgattgctttcagagttttattcagatcttaatacaatgaagatatcctttctttccgtgaatctatttgtcgtgtttatgttttcatactcaaatatgttgcttgcttcaaccaatatgtctgagtaatctgcttgttaggaatagggtttctcattagggaatcctatgatttagtagattgccccctttactaggttatctgtaggattcttcatctttaattatgcttaatgctagatctagagtaattaactagatcttgaatccagacaatagatatgcccgccataggtatctgtagttggatctattatttgatgagtctggtttataggtgtgtaataagaatcggcctatctactaagatgaacaattaaactcgttaagaatgcatatttaggttgatagtttctcggcttctccggttattattagctataaatatagggagtttcgcggcacgcccaccggttattccataattagagtttgagtttaagaatggttcgataacaacctagttttcaatagatctactaaccaatagtttcctgagaataccatgttcctagctctttattaaatcgttcgcaacacaatcatcttgctgttttcttacttttttttcttactattttactcataccttgctagcttaatctcgacatttaactcactgtttgaacaaaagaactccgtgaattcgaacctaaaatactgcaattgatctcttatttgagagagtagttctaggtaatttgaaccatatcaaatttggcgccgtttccgaagttcttgggaatcatcattgagttttgtttagagatttagtctagtttttacttctattttgttactcacgcgtttcttgttttcttcttttctgtgtttcaggtgtatgcctaggcaaacaaggagtacaaaacaaaaggagcttatcaacttgtctgttatgggcttaggaacacttgaacgcaccaaccaaaaaacttagaaattagcaatggctaacagagtcaacagagctgatgcagaaggagttttgagagatgaggatgggcaagcctacaatgaggctggtcagagattgggtgatcatggactcatcctacctgaggatgtcgatgagaatcaggcgcgcctcaacgcgcaaatagctgctagagacgcagcagggctcgctgtcgatcgacacaacagaggtgtcaatcgacaccatcgggagtagaatgacgatgcagatggtgtcgaacgacacaacagaggtgtcgatcgacaccaacaccagattcctgtagctattcctccagttgcggaaccacgtcgtactcttggggatttcaacaggcctgacctgttctatgctaatcgatcagcgattgtaccccaaccattccagaggaacgactatgagctgaagctactttgctttagttggccagcatcctttccatggcttatctcatgaacagccaatggatcatatcgagcgatttgaagaccttgttctgagcatcaaagctaatggagtctcagaggactacctactgtgcaaactcttcccttattcacttgttggggaagcagcttcttggctgaagcaacttaacgcaggttccctcaagacttggagaagcatcaagatagccttcttaaacaatttctacgatgatgctaagtctgaggagttgagaaacaagttgtctaccttcacacaaggtccagctgaagctttcaaggctgattaggttcgtttcaaggagtaccaacgagactgcccacatcatggtttcagtgaggtacaacttctaggtaccttcttcagaggagttgattggagataccagatggctctagatgcagcgagcaatggtaacttcaacacacgttacccagctgatgctacagccatgatagagaatctcgcttgcagcaacagtaccaagactgctgattttgagaggaagaagatttctggagctatttcaggcaatcttatggcagatgtgaatgctaagtttgattcggttcataacttgctcacagggaagaagcatgtctactttgcagcgaggaatagactattgagcctgagcctgagtcagaggaaggagtcttctacatagatggtcagggatacaggaagtttgggcagccacaaggcaacttcagtggcaacaggtttacagggaaccagggttcctccaactacactccaaagcctgctttccagaagacctttcctcaaagcctgctttccagaagacctttcctcaaagcagctttcagaggacctatggtaattcagcttaccatgccccctctccaccctcagcagagacaaaaatggaatcgatgcttgagtagattctggagagccaaacaaagcttgttgtgcagtttactggcaagtttgatgctgtctacacagatcttaatgggaagatcgacaatctgagctctcacttgaagaagctggatgtacatgtggctcaaactacacaatctatcaatagacaagagggctttcttccaggtaatcctgatgcaaacccaaggaagagctgtaatgccatcttgattagagaaggagatgatgtgtgggacgaattagacactgaagacgagttggagctcgcagttgcagagatggtgtcgaccgacaccctccagtgtcgatcgacaccatacggactcttttcttagagacgactcaatacgacggtgtcgatcgatacccatccagtgtcgatctacactggatccggactgcaccttgtgaggtgcaaatacttatgcatcccgagtctgtttacactcctcatgtcccttattcgaggaagcgtcgttctaagcaggagattcatgccgctaagtgcacaaccataatggagaagatcctccataatcttcctaaggatgcttctgagacatcttctgcttcactcaacaagtatgtcaagcgtctagttgacaatggaattagctcagatgaagctaagctgcttaccaaagacatcagtgcaatcatgctgcctaaggccaagaaggagtaggcacagagagtagacatagctgagtacatctgcaccattactcctggtcaaactacttagaagcttccagatccaggtagctttgttcttaattgctctatctccacaagcagattcagccgctctttgtgtgatctaggatcaagcaacaacatcatgcctaagtttgttgctgagagcctaggcatgactcattacaggccgactcgcatcactcttctcttcgcggatctttccaagcgaatccctgaaggaatccttgaagatgttcctgttaaggttggtaactctattatccctgctgattttgtggtcctggattatgagaaggaacccaaggatcctcttatcctagggagagcattcctagctacagctggtgctaggtttgatgtgaagagagggagaatctctgtcaaggtttgtgatttggagatggagtttggcatggatggttcagagcttactaagcctatcacttgcattgcttccagcacagacacacctcctcagactgctcagaatcccaccacagaatcacacacaacgctcccattcgctcagctcgcaaatgagagttgtagagcaacggtgtcgatcgacaccactacctctgtcgatcgacacccacgggtttcacagacagatgattctgcacattctctttagcccacaccacttgaggaccgttgtgataagttctcttctatctcctctcctgctttacctttgattaattctttagattattcgaagaatgcttcacaagataacaagcctagagttcctcgaaagcttgtttctcctgttgttcttgcaggtgacgagaagagtgtcgatcgacacctacaactgccccaaccagatccgtttacacaccgccttggaaggcgaggaggcagcaacaatcctccaccactccacccacatcctgaactccgccaagtcgagttattgactcaaaacaagcgcttagtgggaggcaacccactggtttgatctttctcttccctttcttttattttcttttatttttgatttatttttcccgctttctctagattacagtgtcatttaagtcttggggggggggggtttatttctcttgatcatgatctatatttctcttctttattgcttcattgatgagtgctgcaggttcgagtcaatccgactattggaaaatctagatggcaaaccaacagacttgaggatatcctagtttccaactcaaccactaaggttggagctaatctcactgctgttccttttacctcctcaaacagttagtattcatagatcttaactccttgttcatacctgatattgagaccaatgtgataaaaagaatatgttcctctcaccttataaaaagaaaaaatataatgagagattgagacgaactttcaaatagtgtataggggtaggaatgtttcctatgaccccattattatacattatttggaatgatcaattacaaaggttggaaaaatgccgagggtgtcgatccagtatgcaagttcccctttgtttactctctaaaaagaataagtctgggggagagaaagaacaccgaaaaagaaaaaaaatatatagaaagaatggtcaatttatcatggtatagtacatgaatgattctagaaggatcttgaatgttgtcttgtttgatgagacccagcgatgaaagcctggtggatatagttgtggaacttaggtatggaatctagaatgttgtgtaagcttgtagagaagtacatgttggttaggatttgattagacttgttaggcatatggacttagtttgaatgatcatggcaataggttagagaatgttgggagttcatttgttttcaaaaccacttccacgggttcggcttttgtgttttgcttgatggcaagcaatagctaagtctggggggagttgatataatccgattttcactgattttatctatgttttaggtataggattttgagtctttatgttatttctcgagtctttttagtgtcttttcaggtactctatgcagtggaacaaaaatggagataatgagacattttggagcaagagctagaggaaaggaagctaaggacgaatttggattcaggaattagcgaggagtgtcgatcgacacactcttggtgtcgatcgacaccagtgtcggcccagcaaaagtcctagacgctttcgagtttacagtagaggaaatttgcctcagaagacttctctatttgcattattagtccctggacgtttttagggtctttatattgtttttagacctagttttcttattatcaagtctttcatccagttttcattatcaagttttctacaaaaccctgttacgaagatacataagctattcatcgattgctttcagagttttattcagatcttaatacagtgaagagatcctttctttccttaaatctatttgttgtgtttatgttttcatactcaatatgttgcttgcttcagccaatatgtctgagtaatctacttgttaggaatagggtttctcatgaaggattcatatggtttagtagattgccccctttgctaggttatctgtaagattcttcatctttaattatgcttaatgctagatctagagtaattaactagatcttgaatccagacaatagatatgcccgccataggtatctgtagttggatctactatttgatgagtctagtttataagtgtgtaataagaatcggcctatctactaagatgaagaattgaactcgttaagaatgcatatttagattgatagtttctcggcttctccggttattattagctatagatatagggagtttcacgacaagcccaccggttattccataattagagtttgagtttaagaatggttcgataacaacctagctttcattagatctactaaccaatagttttctgagaataccctgttcctagctctttattaaatcgttcgcaacacaatcatcttgctgtttacttactttgttttcttactattttactcatactctgctagcttaatctcgacatttaactcactgtttgaacaaaagaactccgtgaattcgatccttaaatactgcaattgatctcttatttgagagagtagttctaggtaatttgaaccatatcacaaggcaataggctagagaatattgggagttcttgcgttttcaaacctcttccacgggttcgacttttttgttttgcttgagggcaagcaaaagctaagtctggggagtggatatacctctatattttgtctgcttttagttatgatttaggtatatgtttagagtctatttgttatttgtaaagtcttttatagtatttttcaggtttttacatgttttagatgcatttggagataatggagcattctggaggaaaacagagaacttatgttgcagaagaaatccggagaccaaatatcgcgtaggtatcgagcgacaccaatacctgacggtaatttaaaaacccattttattgaaattatgaagattttgcatattcggcctagaactttctcttatttttaaagaaggtccagcacattttagaaacatatacatagattttaaggtcattgtttagacctaacacttattatctcttttgttcttgggagcaaaaccctatgaagactcgctttagagaagatattttttaactctaatttcttattatattcattattgatttctattataatcttcttgtttgcttcattcatcatgtctgagtagttctggttaggtttagtagatcgtcacctactacgttatctgtaggattctttatctttgattattcttaatgctagttttagattggccacctaaaacttgatcttaaataataggtatacccatcataggtatctattaccagaactactatttgatgagctagatttataggtgtgtaataagaatcagcctatctacttaggtgaacttattgaactcgtttagcatgcatgtcttaagatagggattcacctgcacatcaatggggatctttagctctaggcatagtgagtagcacgacacatcaccggttattctattattagggtttgagtttaagaatggttcgatcaaatcatagctattactagatctactaatcatctgtttcctgagaataccctaagcctgatgcttttattatcttattttacattctcataatcttctatttgcttgttttctattattttattttctttactattttacttagcttaattcgatagccattagtctattgtgtgatccgataacttttggaatttgatccctaagtgttgcaactaacctctttatttgagagaatggtcttaggattaatttgacctacatcaattacttagggagtaagacaaaaaattgaaaacttttaaagattacttggagaacaagataaaacatttttgaaaacatttcgtaaggtttctgaacttgaagaatctttgggaaaaatatacagattggtaaaattcttgcgagttctttatcatcttctcgcgcattacccacaaatcatcaggaatagtgatgcaaaattgttcaagtttatcaaactagtgaacacagaaaatgccaagagtgtcttccatgcttcttttctatagcaggtcgagtaagcagcatatcttatgggaagctcggtcggttggatccattcatcttgatggtatgcacaaagaggtttctctgcagttgcaataaggtatttctcgtcatcttcagcaccaatcatctgaaaaaaactattaacttatgaaggttttagtgtaagtaagaaaaacaaattcgcaatggtgagaaaccttgtagagttcttcatcaaactatgacaattgtgtgcttggccatgacctccttcctcatgagacagttaggttgtatagttgtaaatctttttttcttctaggatactacataataactagcttaagggccagcccctttccttttaggaaaaagcctctttctccgttattaagtttatgattgtataaattgatggtattttaaattttttctattttgttttcacaaaggatggtatttatttataatgacagcttccaactatacataaacactagagattgacctacggtgtaccacgaattgatatttttattagaaagttaaagattttactttaattaatatcatttatatatatatatatataacatataaagaggtatatcacatgcctatatttttatataaaaaatgaattttgtctttcagatgatttatagacatatgctattgtttttatgtattatacacttgggataatttttataactaaacaatttaaaattgtaagttgtatttgttgtaataatattgttagttttgtttagtttttaaaattgtatgattaaattttgattgttaattctaggatttcgcccatagtatacatcatctcgtattaatatcgactcaaacccgtccaaccatataaccccgtcacatgaaattaaacatcattttgtcatttttcataagtttaactatttataatattttaaattcaaaaaaaatttaatatcgatccaaactttatatttgtattttgattgttatatctaagatttcaactgtagtataccgtcctgtattaatatatttttaaatatttataatattaaaactacttataaagttcaaatatttatattatttaaaacttcataacagttttaaaattataaatatttaaaacattttataaaatataactttttaaaagttttaaaatttaatatttaacttttaataaagttgaaatattttataatattttaaaatttcgaaagattcaatttttagaaagaaaaaatcagattaaatcggataacattttaaattttgcatgcttgataaatcaagtttcaagctcatttgtatccaaaattatttttgttctttttatagtaaggctctaaagattgcccaatttcttaaggaatgtgggaccttttacatttttttttttcattgattgagtaatatatgtctgttttccaaattttgaattacatcatatgcgaaaatataatattttactaacaatatgtattttatataaaatcaaataaattagatataagaacaaacaaaagtgaaaaaaaattatatatttatatttaatatagatagagaaattttagaaaattagtaattaattgaatgtacatcaataaagataagatttagttaaggatatttttagacaaatatatttttttagatagattttgtagggactaaatatgtaatagatgaaagaattatttcaaatatttaaagactaacgaattgtaagttcttacgaatagaatatttggttgagatataatttataagggtttaaatattaatagtaaatagtaaaaagatttttggtcaaaactcttaccaaaaatgtatatgtagattataagacagtgcatatgactttcaacaaagcccaaataaaaaggtacaagaagagttatagattaagaacgtgtccgatcgattgggataagttgaggacacatgttacttccacaaccttcacaacatgcaagagattccaatccggtgaatcagaaacgtcgtcggaacaaaaatcaggaatgaatcttcttttttcttcaccgatgatgacaataaatggttatactagtctcatcctcatgatagtaaaaaaaatagattgaattaatcaaaaccttgatgatccacgtgaatctctgaaattttctaaaagcaaacaatctaattttgcgaagaaaacaagctttaaacaaatcttaagactccactaaaccaaaactatcttaaatccaacatatccaacacttttaattggaaatgaaaatcccacatagtcggaaaactactagattcaaaagcaaaaaccaacaataaaacatatcaaggcaaaggaaaatagatatgacaaagaaaaattctcccgatctaacaatctcgtaagccacaaatcttctttatcgagtttttgagataagaaaaataaatggtaaatgaaaagctatgtcaatggcaaggacacatcaacgaaaaaaccatatcgacggcaagaacactacaacaaaaaagccatgttgacagcagaacttacggcaataccagatctggcatatgaactctatttgtgaaaatattagagagagaagaaagagaaagttttttttggtttggtatgtttctattttagtttatgttaaatatatatatatatgtatatatataacttgctattttatttaaaaaatgattctatacataatatgattctagaatactatgtatttttaatccttttaaaatatataataacataatgatatatatgaaatatatattcaactttaataattgggaaaactaacactagtgccacaatttcccaaattatttttgtttctatcacttcttctttccattaccacttctaccacattagttgtgtgttaagacaagattatccttccttttatggatgtaaaattcggggacacgaatccacaatttcatctcatttctacatgttcttttaactaatttttgtcttccaattttaattcattgtcctttgattttagaactcccaaattttaactaccctctttgcatcttgtttgatgtttatattttgtttgagtattgtcatcgaatagggtttattataatcattcaccaatttcttagtttgtcccttctcttttggtctctagatatatattttaactgatacaaaccattcaaagaaacaatgttgtaggaatagaaaggaagtatgagatgtggtagaaataagagtatcttatcaaaattggcacattttggtgatgatattcggatttaggcatgttgccaagttggagtcaaataaataaagaaacatgattgttcatgacgatgtgaacccgacgtaacaagaggcaggatgttatgatgacgtcactagtattagataaaaaaaaataggtttaagtaagatattttgtaggttttatacatgagcgggaaaatgaaatagtaagacacgagaattaatgtcaaatatgtggacaaaaagatagccatgcagaatgatttggtttacctagggtttgtgggttaaattaaataagagagataagacgcaagtaaaagtgaaaaagtcatctggattcgaaaatcacgacagtgaataagaacaaagtatttcatgtgcaaagaagaaagatcaaagtaagaaactggtacgtggttagggtttattgcaatgtgaatgcttttcaagtttaatataggctaactaatgtatagttgtgttgtgtagttgtgttgtgtagtagtaacaagatcctgaatcgttttgtatgggttgtatttttgcaatgttaacgtagataacgaactgcttcatgtctgaaaaagatgtgactgtaggttaactgaatatatgaaagaagacaaaaagtgcgatttttttaaggtttctgtgctatctattttagatatatctgaacaaatctgtgaaagtaggtataggtgttgtaataaattttagttggagacatgtacaaaacgtgggtgaaagcatagtatgcttgcattaattgtattgacaggtacttggaacaggggtaactcgtggagaacattgtttttaaattttgttttcgaattatgaatcataaagtttggttttattttgacttacaggtgatggcgaatgtagttctcgttttaggaggggactgggagtgttgagatgagggcagttgggatttcgttaatgcaaaaaactgtatgtgcaagtgcattgccattggagacgatatgacatagaacaagttgaaagctcagaagattttgagtccctagggacaaaagttgtaagccgaatgtcatattgggtgcctacagaattgtatatctttacttctgcaaggacgcctccggttttgatgcataacaacgcaggactgcgaactttcttaacgttgcgagcaacatatccgggtctaaatctgttggtggcccttgagcctgtgtgggagacagattgtataacacttggtgaaatattaataaggttagaggaaggaatgattaggcttgcagatggtacccctttgctcaacacagagggaaatgaggatgaagtaaccgaggaagcaacaaaaaaaaatattcatggaggtgaacaagatcgggggagaggcaatcaacaaatgcaacgtcaatcagagttcccaatgaccattctagacaatggcagtcttgggacgacgataaataacggtcgggaagtaaagtttactgttgctgcaacagaaaatgaaattttgagcaaccgaaatgctctgtcaagaacaatgcaggctggagtagatgaagaaggtggggggattgatctcaattcactatatgatgtagaggttgtagcacatgttgaaatgttagaagcacaagctaaagagctacaagcaaggcgtatgagcaaaggaatgagaaaatggtgtatgctcttaatgaagatggagagtctgtggatagtgaagaatgggagccatatgatacgaatgaggaagaagagtatgattacaatttttgggacgatctgatccataaagagcaagccaccacaataggagcagaaaatttggagatgggggaatcatcaaacccggttagatcatttcctgatccatccagcggttatgatagagttgtatctgcagttgtaggtttggcagggttaagtaatgaagatcattttagcttggaggcagaagaaagtgtcaggactgaaatgaaaaagacataaacaagtgtaccaactgatagggtggaggtgacgcaggttggaaatattggttgcaggattacagaggaggctgttgaagagaactgttctagtgagcaggcagcatgcagagggagcgatgaggttgctgagggtatcgtcgctggtgatctgtgtgcaactagaggaacagaagaggaagagcccattcaaactacacttgcaactatgtatgctgaaataattcaagcttagatagtcccagcacacgactgtgcaccatgttttggggacgagttcttacaaacgcatgatatgcaagatggcgtgtttgactcagccaacgatgcaattttcattgggaggatattcagaaacaaggcagaaatgcaaactgcacttgcaatctatgcaattaagaggttctttaacttcaaacaaacaaggtctggtaaacaacgcctaattgttagatgtgtgggtccgcactttgggtggcgtgtatatgatcacatagtcggtgggacatcagattccatggaagtgaagacagacaaattaacacacacacatgtgatgtttcaaccagggcagagtatgggaaaaaacttcatgtaaggttattgcttcagttctccattcaagatttactaatgaaaagctaggtccaagggctgttgacatattaccagtattgtgttagatgatctccgggtgtctataacatatatgaaagcatgccatgccaaggagaaatctgttgcggcaacaagaggaagcgctgaaggaagctacaagctgttgatggcatacatagagaagttgaaggaaacaaatcttgggacggtgtgtaatgttcttacaacaaaagcaggcaaagagaaatgtaagttcaagttcttgttcctagcgcttggagcatgtatccatgcagttcagttttctagccccagtgggagtagtgactagccttataggtcgcagttcatgcggaaagttgtggtcatatacgccacaacagtaaaggggaagtatagagcagtcatgatgactgctagctgctaggatgggaagttccagataatgcatgtagcattcggggttatggatagtgagaacgatgtgtcatggacatggtttttcaaccaactcttctccattcttccacattctcatgacttggtttttgtttcttacagacataactccatccactctgcattacgaacagtctaccctctagctaagcacggtgcgtgtgctgtgcatctgtatcaaaattttaagagcagattcaggagacagaaaggcatgccatatctagtgtctaaggcagcgtatgcgtacacagtagcagagttcagatagcgatttgatgaaatcgatatgaataccttgttggccaacgaggtattcaacatgtactcgctgagatcaacatcggtcaagacctccttcgagaatgcaatattttttgtttgttttgaagcagatatgaatggcccaagaaaccggaacccttcagtagagacacgacgaataatgtcaacaacaagatcttttacaatatgaaccattgcagtgttttggtgaaggtggttatttttttaatgtgaaattatgttaagggttttttgggttataaataaggaagtgaatttattactggtaggtgaaacacgggcttatttggaggggagacacgcttctggtttcatccataaatatgttaaaaaaaataatgcctcatgcttcaccatatagaagaagatattctttgtcatcacatcccaaattcctctacattaaattgtttaattaactaatgttaaaagtttgccttcaagaaatatttgggtgtgagacatgaatggattggggtagtagatggagttatatgtcagcttagtgtgtaaggtcatggatagtaaatgaaagttggatttgatagatatggttagggagacatgagcggatgtaggagtaaaagtgggtaaggaggataaacataggaattctataaaaagcaacgatttattgatgcagagaagctttgcaaaaattataaaatgttatatataccagcaaggattcggagtgatattgttcagagggtagggagacaagggttccgagagttgtcatccttcattgcagtcggaccagatgggagggactatgtttacaagatgaggttttggaagaagtggaataggatgagttcatatttgtgagttcacttgcaaatgaaggtttcatatacaagccatttttaatgagatgcttggaagcgaaaaaccctacagctcagtacgtggagggtttaagactggcagtgaagaatggcccttctacagaaagtttggagctaatgagagttgcagaggaatacgtggtctatgatatgtttgcgtatggaatattttctatatgtgctaggagttatgaagaggacattgagtcgttgtgtactttcagtaaccgacttggatggttagagtccattgtggacaaaggggagacggtgatggctcaaattacagatatagaaccaccaatgaccggaagctataatgcaacttataggtttccccaagcagatgtgcctaattgtgtctactttgcatgcacactagaagatgtttgttttgattgagtaaactattggtactcccgcaaggtgctttacatgtactaagaaaagaagagcaagactgtagtaattggagaatggttggtaagaaaatcatttaacttatatctaaatctgattgtgaagatgagttatgttttacttattgtaacattatggtctggtttttcttattgtaagataatgttgatgcttttgtaacaatattgtcactttttctgcttgtaagcttagtttgatgtttttgtaagaaaaaacatatgttctgtcctgtgaaatattaaaaaaaaaaagttgtacaatgtacttgcttattcgaggatcactataccctatgtatgtgactcagaaaaccttaaaaaccaatttgtcaaccttgtaaacagcctaagtaatttaacaaattaaaaggaagaagcaaaactaaactctagagtatggattactaaacccaagtagaacgatatcaaaagaatagcaaaacgataaacagttggttattgaaaacgatgtggaaggatgtcctttctgatgatggttgcaacactaaaccctaggtttgggaccatggaacccaaatattatgaatattaaacgctttcggtaatacaacaaagtgtatattcattactcaggcatgtagaactcccaattgtaaacataagcagagacatttcattatggattaagtactatattacaaggtagaagataagcaacaaactaacatgagataatgctgaacatgtcacaacagaagcttggaaagaattaactatatatgagagttcaatgctataatataccaataagaaaaaaatgtagacagcgatatggtagggtacacggttggcctatgcatcctggcaactggtcgaggagaggtaagtttgagaaaaggcgtttattgagaggcttgaaagtaagaatctggcggtagacaatagatctagtggaatggagacgctgattgtttccgacgcgggttaacaatgtagagagtgctgtaagaccttcgtttggatagttcccaattctgagaaacaaaccctagcaaacaaagcaaaatctgaaacaaaacgttttgaagaaagcaatgcaagtgcatgtgggaagtcagctttcttcgaagtaaggcgaattctctccagataggtagcaaccgggttgtgtgcagtaacacattttttaacaaccaaacgaaatggagacccttcgttgacaagatctgggtattgaagaattcatgaagagagagatcatgtaaaacgccactggaaaacgcaagcctgctttgccttttggagacaagtagtaagggagcaaggcttgtgaaaccagaacgggaaaggtgccgatagatttttactgcagcatcatcaagaagggtatccattgaagagaacaagtggatcagtaaaaagcctttggtgttgagtaattagtagatatagaaaacctacaagttgtaggatctattggaaaaagtggtagtttatatgcgaatgatggtgtaaggggtaagttaagttaatgaacaatagagaaggacaattaatgtgagaggatggttaccaaatacaggtagagggtggagagtaaagagcttgtaagctagtaacttagtggatgagagaaagaaaatatggaggggatattgcaaaggtaagtggtgtgagttagaatataatgggaattgtaatgtaaaggaaaacaatatggaaatgataaaaagcacagtaagagtagtcatttgagtagccgacacatttacaaggtgaacagtaacaacagaatatggagagagttattatacagagagtattaatacatagatggaatattacaagtgggacaggctatgttcaaacatagaaggagtagcagtctaggaatcaaacacataaacaatgttcagttcaagacgaccttagaaataaactcttcgtacacatcaatagcgtactgcatacaaaacatatcaaccatctatctgaaattgagctcatatcctgtagagagtagcggtgggagtgcaactcaattaactttattgctgatggactagagtgttgagacgggagttctgaggggtgccttcaagacgagcgtaggaaaattctttttggccaaaaggagtcgtataaaaaggatcgcatgatgacttgataagaaaagtagcagctgaacaaaaggggccatgtaaccggttacattgtgattggacgtacaacggagtaatggatctaagatatcaatgtgacatgacgtgaggtatatgaccaaggcaacccaatatgtgtctccccaattcataggggtgtataaattgtatcaatatatgcatactagacagtcttttcagtgcgatcaccaactgtacccttaacgcagctttgtaaaagaggatcccaaagataagcctttggattagttgcttgtaaaaaacgagagtactcagacgttagaagctttgtaagcaagctgtccacctgccaatcttgtgtgtagctgtccacatatgctacatgaatagtaaatgttcagagcatggtaaaagtttactttactcagtccaacagagagaaggaaaaataacagaataaaccaaaggcattcagagaagttagaatagtgttcaagatatagtctaataacatatagatgtagtagtgtaacagaaactcacaattctgccaaccaaggtgtagagggtgtaaatgtctgaaagaaaattgacagttgaggaacattgaaaaaagatatttagttcatacactaagaggatagacagacattacgtacgtaatattatttacctcatcagtattctcaaaggcaagtatgttatctgtatgaaacgtcttcagcttcaatagaatatctatgtcccttaccaaaaattctggacatcagcaactctaggtacatacgccaaaagctgtggaactgactggaaaatgaacaactaaagggctactggaaaaccatgcatcacaagagaacgctgcttcagtttctttgtaatgtcagactgattgcgtacttttttcccaacttttaccatccttaatgtcctctcaaatgaatgtctacccgacatgtagctcaagaagaagtccaaattcttaacaatctcaaccatcgggactgatggatggatatgttatgtcccacatattataatacattccacaataacaattaaaacaagtcgcaacctacgccaccccaggatctgcctatcagatttcaaaagcttgagaatatgcttaatagtgaagttcttatgaggactgagcaacatttccaaatacatataaccacttcgcggagacgattggtttttacatttggatttctatcagggaaagtggcacagtagagacctataacttgtttcaactcgtctagcgaaaatcgcagcgcctggcctccaaatgtaaaccaaagctcatgtgagttagccgtgatgagttgtcgagacaagaaattgtgcagcaattaaccagataaagaacattggcgaactgggagggagaacaggaaactgaattgggaccgcataagagtgtcatactcaagagtctcatccaaaatatgtaaaatattcacaagatacttgagtttggagtacgcattaaccctaacatcccttggatacctatcaatggcaaataccggacttgacagcaacttctcagcgacataagtgtttgaggagtgaatgtggagtgcataagattcaggaaagtgataataaaatctataagtataatactaaatatacgcatcttcaaacaaagaaacatctctatcaacacttttgtcaccttcacacttctcatctacatttctatcagttaaaccgtcattatatgagcttagaccgttgatatgctgcgttgggcctgcaaataaagacattaaaatgacaaacattagcccaaagacatgttaagcagccgacaaaattaggcacatcattcactaaatgctggttctaaccgtctgatgataaaatatatctgtcagccctcatggcagcttcactccgatcatctccgtttccaacagaaccaccttgactagatgaggtcagcgggctagagatgtttgttgttgctacgagaaggaacaaataaatagaaatattgatataatgcaaacaacgtgaagaggaaacaacaataaagcaaggtttataaccttcagaagaacgatgtccattttcagatatggcatctacattagatgaggtaagattgggatcaccatcagacggagctgcaagaacacacatcatatataaaacttttcaagcaaattgtgtacataccccaaatttgtcacacctaaccttcagacgacacatcactatcaacacttatctcatgtgaaacagaaacatctctgttgcagttggagttactggaatggatgagggcacaataaaggaaactttagtaacacaagaagaatattttcaatatcacgttagattgtaaagaacaccattacgcataactagttaaattagctgttagaatatgtaggcaaattaaagtggtaagaagtaacaaatttgaaggaatggggatgtaattgagtcccactaataataggagatgcaatcagaaatactagaggcaacataattgttgtgccaaattatagaaaaatcgcaatgtttgcaaaattgacaaacgggagatgaacaaaattagtagtaggagaaggatgtatccgaggcaatacctgcaactgagatcttctgcgtcgagatccgaagcagaatttgcgaatttcgctggatcaacaactgtacagctgtgtccccctttcaagtactacgacgccctcgagaaggagtagaagttggcagaagtttccaagagaagtagggtttgactcgcttgacggagggtgggaaggaacgcgagttagaattctaacgccggtaactccttgttgtcaccatcgaagtcgattaaaaccaagatcacctgatggaggccagaaataagaacaatggcgatggtgtagagaaaaaatggcacgcattggacaagaactggggtgggtaattgcgtttgcaatcgaatgaagaaatcagagagctatggtaggaaataagtgaagaagtaggtttagggtggagatttttattcgtagacagcacaaaagcaggtgagagacatattgaggaacagtgtgaatgatgatagcgagagagatgaaagagtaatttacaaagagagaaatactcaaatccgaaagacataagttggagtgcctatttccgaaaggcacaattattttagtacttttttgtaaataactttagaaataaaaacattttggttaaaagtggtaaaattgaccaaatttctttaataatattggactaaataatattttacataataataaaaattaatttaaaaatacgaaaataactatgtttatagtggtccatttcatactcatagtcattgataataaactgaagaattaaaactaaattttactgaatttgaaaaaaagatatatatatttctacgcaaaatataaagaaagagtccgttaaagcccaatttcctaagcctaattagtgaatctctcaaaacccctaaaaggttcctttagtctctcttctctacttctcacttttcattttgcgccacccaaaccctaaaaggcaacgaaggtaaaaaaaatctccgatctctttcacacaattcctctcttccaccctcaccgatttctgattctccggtttcatttctctcaatcttatcagtcaaaatccggcgaagatggttgcagcgaagaagacggtatgatttttctctgatctaattccacaatccatgaaatttttgagtgtactgattttttgttgaatccatttcttgcagaagaagtcccatgaaggaatcaacagcagattggctttggtgatgaagagtggcaaatacactcttggttacaaatctgttctcaaatctcttcgcagttccaaaggtattagaaacaaacttctctgttagcttattgattcataagctattggtttttgaatgttgttgtttgattgtgttgtaggtaagttgatattgatatctagcaattgcccaccattgaggagatctgagattgagtactatgctatgcttgctaaagttggagttcatcactacaatagaagtaagttcttttcatgaacaaagactatacatttgtccttactggtttagtatcattgtacaacagttttgtttgaatgtagttaggattgtttagtagaaatagttgtggaaatgcaaattattctgtgggatttgacagtgaagctcttctcattcaccatttgaaatgctccaatactgaattgatctgttcccaagtttgtgtacgtattgtatagatagagagtgtagtgttgcaaattatttagtagaaacagtttggtgtcattgtattagtttcctttatggtctatgattgttctgtgtgtatgtggtattagtgaccaattctttacactgtttgcacttccccaataggaatgcacttaatacttaaatgatatgttcctgaaagtcttgtatatgttggattgtgtagatagagtgtgtaattttgcatcttacaaatccattagggtgatccttgtagttgttttaatgtaaggactaaatggtgtaaaagcctgaactcacttatatcatatcagtttcctcctgcaccagtgattgtttgttttatgttttctggtattagcgaccaatttcagtgagaaccagtgattcagaagttgttccttacttgcttttttctttgagagtcttgtaaaccttgattatgttacttaagactacagaaactgtttatttttgatgagtctctgcaactatgttattttattgcctgattttttttttttgtacttgttccttttagacaatgttgatcttggtactgcctgcggtaaatacttccgtgtgtcatgcctcagcatagttgacccaggtaacacactcattcattgtcttttagaataatcatcttacacatgcaatgttaatcttggtttgtttacttatgcaatattttcaggtgactctgacatcatcaagtcgcttcctggagaccagtgatttgtgcttaattatcattttgtcctctttatctactttattcgaagtagtgtgtttcttcgtgatttcttcttctctcgtctagaattgtcatacttgtttaagatctttgaagactttgtaggttgtcttggtttctaaacaattgtggtaattgaaaatttcgactctctgaattaatactagaatgatattcctgcagtcactaagtattatatatgatatataggttgacaaaaaaagtaattctatgtatagttaacattggcatgaacacatgttttaggtctaaaataaatattacaagaaatctatgtagttttctcaaaataaacctaattcttttagatttggtaggatctattaccaatagtttaatacatgtgtccctcaataatctcaactctacaccatatttactatttagtgtcatataaaacaatttcttaaaaattgaaatataaattgaaaatttcatgagaaaataccatataaaatttcattaggaaatttctcagcgtatttggagggttacagagcgataagatgagttcacaagcttttctctatttttaatctctcgtagtgctaatgttaaaacggatattttggcacgaaaagttcatacccaaccgattcatattacatttgtaaacaactaccctcaagattggctcgtttgagccctaattaatttttcggatgacaaaaagaaaaaaacgatataaaatctttttcctagatatcttcctacacattgttatcatttcccttcaatttatgagattttttccttgtgattttaaaaatttgttggttttactatttttaaacccaaataatcagcataaaaattttgatttttgtgtaacaaaaccaaaattgaaccaaataaaccgcatttaagaagaaaaaaaaaaggtttaataatcttatggaaagctccgttctctctcttagtagctcaactaaagctggtcaatttcgtcgccgtcccaaattctcttaggcttaagaacttctctctcgattatttctaattgagcagaactctcatccgaagttcatctactgtcggcgttgtgttacaatttcaatctttcaaactcagtgttactcttgcagttcttcgatgaactattacacaaaataaatgattgaggaaattgcgaaatgtgtggggaaggtgctggaaattttttcttgaccttgataaatcacaagttgaagattatgttagagttcgtgttatgtttcttgttgcaaatcctttgcgcaacgcgaaagaagtacaacttccaacaagagaaatggtaacgataccctttgattatgaaagaactagaaaacattgttttcactgtcaacgtttgacccatgataaaaatcgatgttctatttaagccttcaaattcttcaattgttatttccaaaagattggaggataaagataagaaaaagaaggtaagtttccaggaaatagatctcttacattcaactttagttcatcctcaactcatggatgcttctatgatttcatctgcttatctgctttttcttccggtttggattcgtttgtacaatactccggtgaactattacactaaagaaacgattgaggaaattgcgaagtgtgttgggaaggtgctggaaattgttcttgaccttgataaatcacaagttcaagattatgttagagttcgtgttctgtttcctgttgcaaatcctttccgcaacgcgaaagaagtacaacttccaacgggagaaatggtgacgatatcctttgataatgaaagaattagaaaacgttgttttcgatgtcaacgtttaacccatgataaaattgatgttcttttaagcctccatattcttcaattgctatttccaaaaggttggaggataaagacaagaagaagaaggtcagtttgaaggaaatagatctcttacattcaacttcagttcatcctcaactcatggatgcttctatgatctcatctgcaagtcatggtatttgtgctgcatcaaagtctttaagtgatgatatatatattgagctcccagaactagaaatattgaagggtttcaacacaggatcttctgacgctagttcttcgggaacttgtgtgaagaatcataaaggaaatcatatcatttcttctgggactaaaagaggaaaagcagttaaggatcttactctgaaagacaaggccagtcaggaaaggtctaatatcctttttgagaaagtttttaaacggaaagcagaggcttctattaataaagattcgaagtgtatcaagagagatatctccacagtggttccccaggaaccgatgttggatcactaaggcgttttaagatggaattgccaaggtctgaggaaccattggacaattcgtcatcttaaggaaatgaaaaaagattattcccaaatattttgttcctcatggagacgatgaacacttcaatttttgtctccaaaatctttaggtggttgggttatgattttatgcatacaatagaacctgaaggaaagagtggtggtttggctatatttttaaaaagttttttggaaattgattttctttatgaagacaaaaacctacttaatttgcagataactcagagaaataagagatggtttgtttcttgcgtttatggtcgtccggtaacacagcatcgacttgagttgtggcataaattgagtagtattgatttgaatagaaacgaagcttggtgtatgataggagattttaatgacattaaatctcctgatgaaaagttaggtggacctcaaagactacatgtttcttttcaaggattttagaacttgttgaataaatgtgatatgcaggaactaggaagtacaggaaataacttcacatgtggaggtacaagaaataatcaatggattcaatgcaagctgaatagatgttttggtaatccatcgtggatttctttgttcccaaatttatatcaatggtttttggttctgatcataggtcggtattggttaaatttatcaatgatcatgaattttctcggggacagttttgttgtgataaaagatgggttgatgaaccttcttgcacggaaagaatcttggcatcttggaatagtaatatctctcgaggtacttcgtcatccatttttaatcttactgaatgtacaagagctattagtgtttggaaaaataacatctgatagtaatgctagaggagaattaaaaggctaagaaaggaactagatgataaggaaagtgctctagatctgtgttggtctagaatttcatttattaaggatcaattgggatttgcttatgttgattaggagtcgttttggagatagaaggactaggaatagtgagaaagggaaggttgcatctcattattttgataacctcttcccttcaaccttttcagaaagtataaactcttgtttgcaaggatttcaagtgaaagtctcatctagcatgaatcaggatttaaccaaacctgccattgaagaagaagttcaaaatgctgtttttttattagcagtgagagtgctccataaccggatggatttacagctctcctttttcaacaatattggtcattggttaaggcacaaatcttgaaggagatatatggtttcttttagactggagttctctagcaagaatggaatcatactcttatatatcttatacccaagatcacacctcctcaaagaatgacagatcttcggccaatcaatttatgctctatgttgtataagatcattcaaaaatattgacgtcaaggttgaagaaacatttaccggatatcgtatctccatctcaatctacatttgtgccaaaagtttggtttctgataacatactggttacgcatgagattgtgcataatctaagaaccaatgacagaatctctcaggaatatatatatggcagtcaaaacagagatatccaaggcttatgattgtgttgaatggccttttttggaagacattatgaaggctcttggattaaatatgcaatggatttcttggattatggcatgtgtgtcttcagtgtcttattcagtcttgatcaatggacatgcgtttggttacatcaaaccatgtagagggataagacaagatgaccctctatcaccatcattatttgtgttgcgtactgaagccttaattcatattcttaacaaggctgaaagagcagataaactatcaggaattaaatttcgggcagctggagtttcggtgaatcatttgttctttgatgatgatactcttgttatgtgcaaagccacaaggagtgaatgtgaggatttaatgcgttgtttatccacttatggtgaggtatcgggtcagatgatcaatttgactaaaacagctgtgacttttggtgcaaatattgatgaagacactaaggattggattaaaaacaggtcgggtattcatttagaaggcgggactgtgaagtatctttgtctacctcaatgtctaagtgggtcgaaaaaggaactctttggttttcttaaagaaaagttgaactccagaatgacatgttggtttgccaagagattatcttatggtggtaaggagatccttttgaagtcgattgctatggccttgcatgtgcattgaatgacatgtttcgagttgcctaaaaatgtttgcaaaaatttgactagtgttatgatggatttttggtggaactctctacaaacaacaaagaaaattcattggattggatggcagcagttaactctacccaagtcgcatggaaggattgaatttaaagatttacaatgtttcaatcaagctttgttagccaaacaagcttggcaacttttggaggaccctgaaagtctcttttgcaaggtctttaagaagagcgggtatttttcgaacacatagtttttaatactaccaaaggtgctagaccttcttatgcttggaggagaatattatttggtagagattttctcaaagaaggattacagacaattgtaggcaatggtgaaaaaacaaatgtttggattgataagtggatttttgatgggcagttgaggataccaatgaatagacagcccttaatggatattactctaaaggttcaccaacttattgatcctttgtttagctcttggaatttgaatatgttaagagatttattttcttggaaggatatccagattttggtaaaacaaagaccaataatttctagggaagactctttatgttgggtagattttggtaaaacaaagaccaatggtttctagggaagactctttatgttgggtgatatggttccaattaccatagaactactctctcaaataagagatcaattgcagtatttaaggatcgaattcacggagttcttttgttcaaacaatgagttgaatgtcgagattaagccagcaagtgatgattgaaatagtaagaaaacaaagtaagaaaacagcaggatgattgtgttgtaaacgattaaataaaaagctaggaacagggtattctcagaaaactattggttagtagatctaatgaaagctaggttgttatcgaaccattcttaaactcaaactctaattattgaataaccggtggcgttccgcgaaactccctatatctatagctaagaataaccggagaagccgagaaattatcaacctaaatatgcattcttaacgagttcgattgttcaccttagtagctaggccggttcttcttacacacctaaaaactaggctcatcaaataatagatccaactacaggtacctatggcgggcatatctattgtctggattcaagatctagttaattactctagatctagcattaagcataattaaagatgaagaattctacagataacctagcaaagggggcaatctactaaaccatatgaatccctaatgagaaatcctattcctaacaagcagattactcagacatattgaatgaagcaaacaacattattgagtatgaaagcataaacacaacaaatagattaagggaaagatgggatctcttcactgtattaagatctgaatcaatctctgaaaacactcgatgaatagcttatgtctctcagtaacagggtttgcaaaagcttgataagaacttgatgaaaaacttgataaaagtcttgataatgaaaacttaggtctaaacaatgtatataaaccctataaaacgtccagagactaataatgcaaatagggaagtcttctacgacaaatttcctcttctgtaaacttgaaagcgtctttagtgtgtcgatagacactcctcgctgattcctgaatccaaaatcgtccttggcttcctttccttagcttttgctccaggatgtctccttatctccattattgtcccactgcatagaatacttgaaaagacattaaaaagactcgagaaataaaataaagactcaaaattctaaccctaaatcatagataaaatcactgaaattagggatatatcattgggctctaactcgcaatggtgtttatacagtcaaatctgggtacgattttatcagtagacaggttcatcatcaattgtacaagcaggctgaagagataccatcgttaaatcccatgtttgtcaaggtatggaatctacaaactgttccaaaaaataaaaatttcttatggaggttattaaatggagcgattgctgtggaagatcgacttcaaactaggggaattgaaagtgcagatgggtgtctaatgtgtggtgaagaaaaagaaacaatcaatcatataatgtttcagtgtactttggctagacaagtttgggctttttctctggttccctctcctttgaatggttttggaagttcaatctttacaaacatgtgtcatctgcttgatatgtcaaagaatccatgtttgactccttagatacgagatattaatccttggattctatggtccctttggtaaaacagtcctccgaaacatggcgacttaaagtgcaacattggttttggttggtccaatcaacaacaaatttcaggcgcttcttgggtggtcagaaattctcatggctctgtcatactacacagtagacgatcctttactcaggcacactcgctatttgatgctaaattcagaaattggcaatgggctttaagttctatgaatcaacatcatttacagaatgttatttttggattttcttcatctgaattcatccaaactttgcataaaacaaaggaatgacctgcgttaataggtcacattgctgaattgttaagtttcactaaggataaacctcactagtatcttttgatagacccgcctcaatgcaataggtggcttttgaaattgctaagagtgtgataactggttttagatgtctgtcttatgtggctctgggagttccacgttggctgaagttgctttttgatgaagaaatgagttttacacaaggaggttaggattagatttttgtttttgtcgtttatagttttagagatcaagtttctttttagaaatctatcttttgaaatcattactcttaattggctaaataggttttgttgttttttagttttttctattaatgtttacttaatcgtctctttttatgatttttcctctattcaatattttctagccttattctttgttgacttagatttttattctctttttgtttttagttgagtcttttaggtcattttcctttacgcttttactatatactaggtgatcatccgcgctacgccgcggtttttttggattttttcatattgtttaatttaaatataatttttatttatctaatcattcactcatgcaataagcaattacttttagtattaaaaatatttttttctaacaacattctcaacaatgcatcatacacataattcataaacaacgtttgtcttaaatcaatttaacagagcgtagtgttagattctagaaacctaagaatttgatgttggagctccttacggattcttcaccctcagtgatttattatataaatatcaatttaagataatataaatataaatttaagagaataacttactcaaatcattaagtaatcaacgactattatatactcatactttaagtttagattacaaaaaaaaaaatattcgaatatgagaaaactattaaaatggttttattgaaaaatcatgtaatattaaaataaatttagtaatattaaaattaaataataaatatatcattatcctatacattagaagttcaagagcttacattaattatttaaaagacacatgacaaatgctaaagtgatgatgtgtcaatcatatggagagagttggtcaactttcatatatatgatatgtgttgtcttaagtttggtttagtatcacaaactcctttttgtttcacctctttcttttcgtcatcatggcggatgagttatgggatgagttacaacattaagagttaggaagggaagatccagctctgtttattctgcatgcagcttatgcaactgttaaatcttggaataggcttagcttgattgttaggcctcttaatcttcgctctcaaaacctcaacgttgtgattgatgctttaccaagatcatggggtctgacttctagagtttatgaaagagtgctttatacaacttttgttcaatttctctttcagtctgaggttgatcttttgtttgtgctaagaagggaaccattgttatataacacttggtttgtctcaccttagagatgggagataaatcttgcttttgagtttttgtctaatattgacttgtgggtgcaaatgcgtgggattcctcttctctatatatgtgaagaaactgtggtggaaatagctcaaggtttaggcgagattatctctttggattttcatgatgctactattacttagaaagcctatattagagtgagaatccgatttaatataggttcttccaaagaatcacttttgattctagtgagactacccttatgactacaagaaaacacaccagttgcgagggaagaaaccgtcgctaatccctcgcaaagagcagttaacaagggaattgcgacgaacttcagttccccgcaaaacgcgcgtcgcaaaatcaaatccgtagtaagttcctcgcaaaatttgcgacaaacaaattacctcgcaaagcacacgcaatatgcgaggaacgtaatccgtagcaagttcacggcaaattgtcggtctcgcaagtttctcggtaattgcgacggaccatttgcctcgcgaagcacacgcaatttgcgagggaggtactcggtagcaaattagctgcaaaagaagcctcggtcgttcctcgcaagttgcgagggaaaccttcagtagcaaagtagtcgcaatttcgttgtcccgctcatgcctcgcaaattttgcgattgatttgcgtggcttttctctgtagtcgcaaatccctagcaaagtttgcgatggatttgcggtgaataagcgactctttcatgttttgtttaaacatgattactgttgaatttcgggattactgttctacttaacaatatttaatgattttcttaattggatctttatactaaacttttaatttgaatactaatttagaaaccttaaactcatatttaaaagctgaaattttaggtttcaagtacagaaaacaagccaactgaatagagaccacaaaagattcaagttttgatgagtgaaaaaagaaactgaatacagaaatttagaaggcctcagatggagatgacccagtgtttgggttagctacaacagcctcaggttcgacagcctcaggtccgatcccagcagctgtggcattaggcgcatcaggtggattggagctgactggttcagttcttgtagaggatctggctcgaaacaaggcagcgaactccggatccttctcggcaaggtaatcaaagtatgcgtcaaaacaggtgatcttctcagcttggtttgcaatgagggcttcagcagcagccatcttctgggaaagcacaaccggatcatctcgaggaagcaccggaccggcatgagctgaagacgcctcatgctgcaatgaaccagccccataaatcctgcctttcttcttaggagcaacctatcacaaactcacaaccaaaccaagcaaacataatcaaagcaaagtcgaaacacatagacataatggaaaacttttagcttcagacataatgatcttaggccgaaaatacaatgatattattcagaccaacaacacaactaaatcaggccaaaaacacaaagacacaacatattcaattcagtttcacaacataatcatatcagtttacacacactgacattttgcaaaccaaaaacataacatattcaattcagtttgaaacacaatgacacaatgcaagccacaacagacaaacacaaagcaacatacaaaactgcaactatcccattagacaacttttagcttcagacatagtcatattaggccgacaatacaatgatctcattcaaaccaataacaactgaatcaggccaaaaacacaaagacacaacatattcaattcagtttgaaactgcaactatcccatcaaagacataatgcaagccacaacagaccaatccaaagcaacaacaaatgatgtcttctatattgggttgaaagagataagatacctgtgcatagatcatgttctttgcctgaacagataacccgcctgaacccgtgctctctgtagtgtcgcctgaacacagaagtgactcttcctcttgaatcttcgatgactcttccttatagatttcctttgactttctgtcgatgaaactcccatcaggtttcctgtgtgtttcatctaagaggaggagaaaatctggagtactttctcctgtcatctcacactgaaacacataaacatataggtcagttgtttgaaatacaagtgttttaaaggaaaaaaattgattaacttacacgtttgcgggctctggctttgtatgaggtctgtccagaccggtgcttatgtatcccgaggccgtccggatcatgataccttgcattcctactgttgatactctttctttccgacttcggatccctccaaaagctaaccatacctttccaaacttctggatctatccatcgcggttttgcctcatctcccttctccttccactttcccttccaacgaccaacttgttcagacatcctatccttcagctttgcctcaaactccaatctaactctctggtttattgcagagtcccagttatatacttgctagaaaacaaagacaagacacattagaaatagacaagaccaaaagctgtaccaaacaaaacacaacattatatcacttacagcaaaggtttcaaaccatctatcgaccactgcttctgatgtctgggaccaacttgcatgaggctctttgaattttttttcaaaaatgctccggacagtggctgcaactgaggtgtcatcgtcaaacctacaaatcaagagtccatcagacagacaaaactaaacaatcaagtaatagtgaagagaccagagcctagtgacttactagagagtaccaggaggttgattagggtctaatctaggcaaccctgcacgaccagggctagcaagcaactcttctatagtcaggtcattgagccgagcagctagtggagtagtgtgattggcagaaccgcgaggagattgattggcggagattgattgacaggcggaggagaagcaccatctgcttgattgttggaattgattggggtttggagattaccctgagtggctgaaccgtttccttcactaggagaacgacgttgattttgttgctgagaccaaaaccgggaataatcaaatgacatcttgcaaaaaaaaagagaacattagtaaaggtaattcgaaatacaacaaaaatcaacgaaacagaaaaccctaaacagatctacaatgaaaatcaaacgaaaacgacaaaccctaaaaatatctacaatgaaaatcaaccggatacaagaaacccttattagatctacaaatagaaactcgaataagaataggcgaagaagaaagaaattagggtttggatgagagacggctgggtttgcgcttcgctcaaactcgttcgcgttgtatatataaacttaaattgcctcgcaaatccctcgcaacgttgctagggctttgcgaggaaccgactaaacaaccaataaaatcgcttcaaatttgcgtggatccgtagtaaatccctcgcaaagttgtagggttacacagagattcaattagggttttcagataagtttgcgaggaggttgcaaggtccctagtaaatctcccgcaaattgcgagggacttgcgtggatccgtagtaaatcccacgcaaagttgtagggttacacgtttgcgaggaagttgcgaggttccgttgtaaatccctcgcaaattgctaggggtttgcgagggacagggtaaaaaattaaattataaaattataataaactttaaaattataagaacaacacaatgcaaaattataataataaactttaaaattatataattataacttgtagtattattaaaaaaaaattctgaatttatttattatactaggtaaaaataatgaaagtagacaatataaaatacaacatttattctgattcattttctgaatcattgtaatcattttctgactcaacgttttcatcagattcgtcgaattcgtctgcttgttcttcttcttcggaaccgtccgtgatgatgtcttctaactctctgttttgtaggtcaatgtggataacatcttctgttgttatgtctggaatggaaacttctctaatgctttcttgttgcatcacaacatcatcaactaagccgactatacggcccctgggattcactttaataacggataaccacacttcacgccctgaccttacacgcgggtaagatagaaagcttacttgccctgcttgtgatgctaggataaatggttcgaacttggcataagtcttgtttgcattgacatcgaccacgcctaagttatttttccgtaccccacgaccgatcaccggatcaaaccaatcacacttgaaaaggacgcatttcaaattcaaaagtcctggatattcgacttctagaatttgctgtagaatcccataaaactcagtttcaccttcgatatgtattccataatttgcagttgcccttcgacttccatatggatacgtatggaaagtatagccgcgagtgaagtacatcagagctgttgtgatcttagatcttggttcttgtacgagctcatgcaaccaaagtggtaatggttcgtttccacatccgtttgtaacctacacatagaaaatattaagtttatcatttttaaaaagtaaataagtaatcgaattttcaaaatattattatacttacatagtattttaaccatccagcaaaatcacgatctttgtaagtttcatactctttttcttctaatccagcaaaatcaaaatcataagcttcacgaatttgtgaatcaaataacctacaaattacaacgtagctgcttaattagcttccttaattaatttcacactaattattaaatataaaaattatgaataaaactagtttactttatacctttcaaatttttgaatgtaatcaatatttcggagtatgtaattgtgagctgctcgagaaagcgcatggtcgtcccaccaaacttctttcaacttccctgcgagtctacctatttgggcaaaggtatctggaacattaagaacgttataagtaagtgcaacacctccatcgtcatagcgtcgaggatgagtctttttggttctaacgcttggactaaagtaatacgatgtgaagtgagacgtttcctcggttaaacttcctgcgactatcgacccctcaactctagcaagattttttgcctttcttttaagagatttcatgaatcgctcaaaaggatacatccatctgaattgtattggcccaccaagagcagcttcaggtggaagatgaattggcaaatgttccatcacgtcaaaaaaggcagggagaaataatttctccaagttacagagcaacactgggatattcttgtctaactgttctatggtatctgttgtcagtgttcttgtacataggtccttaaaaaatactctgatgcctatcatgtatttaattaatgtaagttagtaatgaccaagtaataattgagtaaaaaaacatatagtatgtatatatataataaatatatatatatatatatatatatatatatatatattacctgcaattgccttatgaatatttgtcggtagcaactctactaatacaaatgacagtaatcgttgcatgaatacgtggcaatcatgacttttcataccagaaaacttttggccttgctctacgcatcttgaaaattttgacacatatccatctgggaacttcacttcagcaacaacccattcgaacaacgccttctttgcttcattagacatgcggaattttgaaaccagtaatttcccatctcgtgtaacatgcaactcaggtctgctgcatatttccgcatttgtacgacccatacagtagggacaagataatcttccatgcgttgtccaccccgttaacatttcatatgccaggaagtcactaatcgtccacattagcactgcccgcatattgaaattttgtttgctcgagtaatcaaacgtatgaacaccttcataccacaacttcttgagttcatgaatcagcggttgcaagaagacatcaagcgctcgtttcggatgctttggcccaggcactaaaattcttaagaacagaaattcgctttgcatacacatatctggaggaagattgtatggggtcaagataacaggccaaagagaatattgtcgcccagacaaaccgaatggactaaatccatctgtgcataagccaagatacacattcctacactcgttagcaaagtcaggatatatcgtttgaaagtgttttcacgcctttgcatttgatgggtgcgttatttctccgtctgcagttgtatgttgagcatgccatctcattttcgccgcagttctttccgattgatacaagcgtttcaatctatcagttattggcaagtaccacatccgttaatatggcactcgcgtccttccgccagtagtctggtatctcggcttcccgcaaaaccgacattcctgcagatttacatcatctccccaaaaaatcatgcaatagtcaatgcatacatcaatcatttctgatggtaatccaagacttgaaaccaacttctgtatttcataataactctcagtcgatatattattcggtggcaaatattccttaattaattctgcccatgaatatattattcggtggcaaatattccttaattaattctgcccatgaatccatacagttttcacttaagttattatcagctttaataatcatcatcctagatgccaaagataacttagaatgtccttctctacatccctcgtagattggttgatttgcagcatctaacatatcgtaaaagtgttgagcatctacgttgggttcttcactaatatttttaggaaatgaagcaatagtttcataaaatgcatccgtaaccatatcatgaaatctattttcctggttatgcccataaccaaattgatcaggtacttgctgaccataattcgcatcattattaaaattactaggttgctcgacaccacaatttgtattactagttcctgcgctatctctacaaccatctccttgacttaaccatacatagtagtttggcataaatcctctattataaagatgcttcttcactacattaaatttcaaatatttctcattgagacatttacgacatggacagaatattgtactgttctcacgagcaaatggttcgtttgtcgtttgatacatgaaaccgcgcagtccgtcgtaatactctctcgtcacctctccggtcgcctgatctctatgattatacatccaacttcgtaatgtgtaaatctcatgctctccgccccaagacattcttatatttgtaataagtttttttttctcaaaatattttttttgtttgtaagtaaatgttgtgatttgagttatgatttcttagacattacattggctatttatagatgtcccaaaaaatattgcgagggatttgctaggattttgctagaaattgcgagggaagcccaccaaccaaccagaccggtaagataatttaaaacgtgctcacctaacccgccaagactcgctactccgtcgcaaaagttacgactgaataaacaggcgtagcaaattcgtcgcaatttgcgagggagacaagttacccgtaaatccctcgcaaatttgcgtcgtttttgcgaggaatgatgctttccacgcagattcctcgcaatcgtctcgcagatttgcgagggaagtgttcgttcgcaaattttgcgagggataagcgaggttgccttcttccctcgcaaaagtctcgcaaatccgtagcaaattgcgagggatttgttccaccgcaaattttcctcgcaaatcgcctgttttcttgtagtgtaagttttcaatatgagaggctaagaagaatctgcagcagttgcttaaggcaggaatttctgccctcatcgtcagtctcaacctctgcctctttttcgtggtcctaccaactatcttacgaggaatagaagagaagatatgtatgcacatgatgaatatcaccgatcatctttgaactctcagtcgcagatgtctgaaaactcttttcctacgcctatagaaccctccacgggttgcagctccttctttgaatcattaagaattggtggctgcttattttcctcatgcaagaactgcttctttaccagataatgcagtaatggatcatcaaacttcctcgagcagacaattggtgtcaaggaactctaacatccaaccgttttctagaaatgctattgcatcaaatgttcctcgtcttgttgaaatagatgaatcttcaagaatgtgagattggggaatcagtgaacatgatggaaaagggagattcaacaaaaagaaagaatatgggaggtgttagggatgaagaagatgaaaggaagcataaaggttttgagcataaggatggagggattctgaaacctcaaaaaaacgttgaacactctgcaaattctgtcgaactttttggttttctatgctgcttaggatccatgaaggcaaccacaaggtttgaataacagggtatggtcttggtattcctttttgagtaatgacatacctgcagttttttgtaatagggtctaaagttctactttagttacccttaattgtagtttggttagcaacatagatgactcttctcaagataatctgatcttgtaagttgtttatgggtgtcaagttctgaaagtggatggttccactgttgtatctgttttcaactcaagttggtagtaaaaagggtaacacttacggggaaaaataataatatggaaattaaattggaataattatattaatattaactagatcatgatttatttcaattatcaatttctatattgcaaccaaatatcatatttttaaaaaatacaaaaatatatattctttttttcctctctcaaaatcctagcagccgcacaagactcttaaattttctgattggcctctccagtggtcagcttctccggtgagagtcgtttgtgggtctccagtttaggtaacgacatcagattcttctatcttgtatagatatggcgggatcttgagtttggttgctcttttggttcagttcggttagcagatctttgggtctggtttcttctccgcttttgtgagttagatagattcgattttggttcctttttttagggttcttggttgcttgtgaggcttgtatcgaacggaggtggctttgtttgtgggttttaaaatttcatctttgctctacctctcctttagtcctcttgcttgttggtcattccgatagtattttgttgatgagccacctactagccactttactttcgagattggttctagaccgagttgtgcctatatgtaaggaaaaaggtatttgcctcgggtctccaaaatataaaccttgtttatggccctcaaatataaaagatggtgtatcataatggttttgaagtaccaaaaccaaggatcgatttctctcccatgtttcttttttatatagaactagatcataacatgtgctatacagcacgggcattaatatttttcatgaataaaattgaatactttgttttgattatctaagtgtaaaagtgatgccataatatgttttaattttattactatttgaatacaatgctgcattagattgtttttgtttaaatacatcatatttatattaaatacatcatatttagtttatattaaatgtgaaaattttgtatccaagttatattacgtattttatttggaaagaaaaatgttttgtttgtatgagaacatatagtttttggcccaactttgaattagtttttgtattttgtgttggttttagtcgttggcctaatttggtccaataaagatatataggctctagattctattatgtctgatttaattatttaaaaatttaataaataaaaactatacctaaaacttaatggaatgctgacaaaaaaaaattgattggaaattacatgatttcctacgactgggcttcttacaaccatcaaaatttttgtaagaatttgtgaagaaaaatctcttctttcccgattgcagctcaaatctttcattccaaatcactataacttggtcgattgcaggttcgtctttcattccaaatcacccaaataatccaaaactcctctgtattttgcttcactatttgcttcgtcttccacccaaataaaatctcaggtaccaaagctagattaaaattaattaggtaccaatttgttctgttttagattgtttgttcaaggctgaaactttattggttttctgttataggtttcgttccgtctggagcggacaacactggcattggcaggacatggtaaatgacataaaccaaacatataactaaagatttttgagctatatccttaattagtttagttatatgagcaatgaatcagtgtttttagtgtatcctagttatgtttgtttgatggattaccactcttttgtagtttgagaatgaggcaaatgatgtagttgcggcgcttccataggtgaagcaggttaatgtgacaatgtcagcacaaccagccaagtccatatttgcagggcaacttccctttggactacaaagaatttcaaacatcatcgctgtttctagttgcaaggtacaaatatcttcccatgatttttttttctttgtaagctcttgatgtttctttttgaactgaagttgttctcaaagtagtcatggtgaagtgatatgaataagatgtcatgtactgtattctttgtttctttatcatattcttgtcttcttcgagttttttggaagctattcaatagatttagttttcgataacataactgtttctttcatgaccagggaagatagaaatgaaagcgtgtctggtctttctacttcttgacattgaaactaattgggttcttattgaactccgagtcattgaaaatcaatagaatactacatacacatatatttatgaacacagtggatcttcttctcctcctcttgttatatgatccactatcgtctcctgaccacgacgtcgtcgttttttccgttacgcgtatgcagtttcccattttgttgtgtttatttgatgattgagtttgttgagataaatatttatagcttaaatatttgattgttaatatttaaaaatgaatataaggctcgagggaaaaagattagatttgtacggccatgttgggagagaatacaaaggctgattattctttacgtagaaggtcttgtttttcaaagttacgttgtaattagttgaccaaagcctgtttcatcctcatccacttcttgtaactgatatacttccaaaacagaacacaacaaaaaaaacatcacaacaggctaatcaacccctctcttatgtgcgtttcaagtatgttttctttcctagaatcatgaatcttgactcaagttttgatttgcaatctcctattttgtctgattttttttttgatataaaattggaaagaaatgcgaggttgatgagatatggagccaaaaggaatatgtaaatcccatagctgattgttgccacaatgagggtcatatatgaatttggtcgtccttatacatgaaagctaagtagtatattatattgcagttcgtgaatccattagctctatttaaagattgaaaaaactacttatatgttgaagacagcttaaggtttaacttgttatattatcaagtaagttctcttaagaagaactctaatctgattacaaatttaaatgcaggtttgcacttgtaaagcctaaaatagttacattctcatctgctaaaatcatttcataagacatcccagaacccttggtataattattccacgcatgaagaattttaacttgaatacaccaagagattttgaaaggtttcaagtttttgatagctgtcacttcatccattttgtttggttttgcagtgagtaatgaactggtttatgagagaaggcacattaacatcgtgaagttattcctactctagacgtttatttataataagtgttgggcggattagatagatagagatcttccatttgataagtttgttagcataaattagttgggctattataaatttaggcacattttgggccaaaaattagaaaaagggtacatttcaattgggcttacaagcctaagcatttttggcctgtttaaaagtctattttaccctaaagtgaaatcttcattgttttcttctcttcctcttcatcccttccttttttcttcatattcccaaaaaaatttaattttgttcctgagaaaatttgtttttgattacaaacactaaaccctaagaaatgatactaaaaagggaatccaaacaaaataattaaatgaaccgtttgagatataaaaaaaggatgaactaattacgagataaaaatttgagatctaatcattttcttcttcgagcttgttcatcatgagatgtgagtcatgaccatcacttctcaccaccgcccatcattgttgttgccagagcttatgtattgtcgttgtttcgttgttgtaagcggagatcttgtccgatgtcttccattttgttaaaaaatcgaattaatcgatttaatcaaagaaacaatttcagatcgataaaaaaaaaaatcgaagaaacaatctcatcaattggaggaacctcaaactatatctaatcggttgggaaaaaaaactctagactcatatccaatttttaaataatttgataagggcaaaatcgtcaataaaaagtaatagaattacccatttttgtaaggcatgtgtaaaatgcttaatcatacaataccgttcactttattgtgatattttcataattgatcctaaattagttagtgaaatattctggtagaaggaatattatttgttatatggaatattatctgttaagagaaagatatggcgatagaaatttgaatccggatggtaaatatatattatattcatatttgaaagaagtgtataataaagatctgctaaatattagtcaactgattatggagagaatgttttttaacgaaaaatgttcaatgtgttcatcgtgaaaaagaatataatttcttccgtttcatacaatttatggtattttgaatttcaatttatggtagaaggaatattatttgttaaatggaatataatctgttaagaggaagatatggcgataggaataaatattttatatattcgttaagattttgaagattttggattaaaggaaactattaagattatcatagaaaaatatggtatatacccgtttgattatgtatttatctgtgtgtttaatagatggatattgttgttaattgactttgctaaccttaatgatgtgaaacgaatttaacgttgaattgatttttctaacggcattgacatgtaattaagaggatttttattcctcttaaaaagtgactaacctgatttttaatgtttttctttattcactttatttcttttaacctacttcaactcttctaaatatctattaacttaacatatattaattcatctttatgtagctttctttataaataatgattgtgctgatttgatgataaaaaaaatttgaactctttagaaacatgtatttgagatcatatctaattggagcccaaaaaacataaaattatgaaaatttggtgagagcgttaattaaaaatgaagaaaaaaaaattaagtcttagttatattattattttgttttcaatgatttttttagtttatttatttatttatttaaaaaagtcctaatatcaactttgccttaacccccgataagtttagacacgacactagttcttggcgaaacaatggaatcattctctagctcttctcttgtgaggacgtcgtcagttttatgtatgtagttggctgaagctgtttcgacgagtgtccgcatgtaaagagttattgatcttatttgacttatctctagttgattttcaagttttttgccttcttcctaatgttttgttgctttcttcgtattggcttgtgaggtatgatagtggttgtatttgtgtctctagtattgatggttacttgctttcctctttatcggttttgctattttttggtttgacgtcggtgtgaggtctccatggtcttattggtgcttccgacgttcacaggttctataggaaagcttggcgagatctatcgttcctttgttcaattttagcgcttaggtttcaatgttttcctatgtggttcagtggttctctcttttcttacattggtttctgtttgtatattaagggcttgattggttctccctctgccacccgcaaacgctgcgtttgcgggtggtagcggttattagcggttggcaccaatcatagaaaccgctagataccgctttggaccgctcgaaatcgccagatttcaaaagctcattcccgcaagcgtttgcgggtgcgggcggtagcggttaagttaaaaaaaaaaaaattaattcattaaaataattatatcttccacccaaaccctatacttattcttatcagaaaaccctaatcaatatattgaaaccctattctctcaattatggcatccacccaaactgacgaaaatcaaagtcaaaattaagaatcaaacgtaagtatgatctatcctttcatccattcattagctagtgtaattctcggaatatttcatggcatcgtttttttttttttggttttttttgtgttttttgattgaatacatgttttgatttgttttctcgattagaaaatcatttggtcagacgagaccacatttgcgttacttcaaagactttgatttctaagtgatgttcaaaaagaaaatattcttaagaatattaacgtttggaaaaattttgagttggagatgtgttaaaaatcgtttggatatcttgaagaaactttatcatatgtatagaggcaatctagaaaacccgtgaggtcaacgttatttacagtttatcacactacttgatgcaatttttggtgatttaccaaatgcataaagtattaagttttttcttacaaaatctatttatttttgaattttcagttttatttatggttttaattattaagcatgtttaatttttcaaatattatcaatttatcataataatatattgtattttttcttttaatagtaatatattatatttattttggttattttttatttaattattatcgcacccgctggtttaccagtcataaaactcccgcaaccgcacccattaccaaacgctcaaccagtcgttcaaaacacttgataacgcttgaaaccgcaaccgcccgtttccgtaaactcccgcaaccgtaaccgtacccgctgtatttaaaccagtctggccctaaggctagtgtacgttagtttctccaaatttgtttgggcaaaacttccctcttccgtctgccggcatatgtaattttaacttatatcctttctttggttcttaataaaattcagatgacaaaaaaaaaaatcgcaaacaaatataacttaattcaaatcaagaacaaaacgataaccaaactaaattagaaatgattttaatttctgtataaccgataaaataaatagcagaaccaaaccaaaccaaaccgcgaaccgatctcgcactcatattgctctctttcttcttctctatatgctctgttttcgagtaaattgccataaaccctaaatcacacaaaaatggagctcaatttatcttcgatggccaccaaaatcccttgttccggccttatacccataagaagtcttttaaacccatcaaaatctctgtctcatcttccaagagtttcattctctgtttcttctcctcattctctcaagctaatgacttcaacaaaggtaaagcctttctctagtttcaagcctatttactttgtgggtttttgtatgtaatctgataaatgaatatactttagttgatagcaatggctagtgcaagttccagagactttgagatgtcgaatttaacagcattatcgcctttggatggacgttattggggaaaagttaaggacttggcttcttctatgagcgagtttggattgatctatttccgagtacttgtcgaggtattgggttatgttctgattcattgattgattaggaagattggttttgtttgagtagttagctaaagtcttcaactttgtacttttgttagatcaaatggcttattaagctttcaaatatacctcaagtcactgaagttccaagctttagcaaagaagctcataagtacttgcaaggtataatcgatggatttagtatggatgatgcattgcaagttaagaagattgagagagtgacaaatcacgatgtgaaagcagtggagtattttttgaaacaaaagtgtgaatcacatccagagattgctaaggttagaaaccgtttcttactcttcttagggtttggatgctttgattgatgatgcattgactaaatgtctcgtctttaggttctagagtttttccatttcgcttgtacgtctgaggacatcaacaatctttcccatgctttgatgcttcaagaagcacttagttcggttatacttcctaccatggatgagttgatcaagtctatctctctgatggctaagagctttgcatatgtacctatgctttcacgaactcatgggcaggtaatgtccaaagagaagtattatttttcagttctatctatctctttgttaaagcaatggtcatgatttataatgcagccagcttcacctacaacattggggaaggaaatggcgatttttgctgtgaggttaagtgtagaaaggagatatctttcagaaactaagattaaggggaaatttgcgggtgctgttggaaactacaacgcgcatatttccgcgtattctaatattgactggcctcatgttgcagaggagtttgttacttctcttggattaacatttaacccatacgtgactcaggtatatatatagtttctcttgatcaaatttttcctggtggaatgatttgtaaagttcctcactggtggtttttgcagattgaaccacatgactatatggctagactttttaatacaattagccaattcaacaatgtcttgattgattttgacagagatatatggagctacatatctctaggttactttaagcaggcaagtattaacaaaaatatgtccgagtcatttgaaaaggaatgggaaaatctgtctcattgtttgaaattttgatgcagataactaaagcgggtgaaatcggatcatcgacaatgcctcacaaagtgaatcctattgactttgagaacagcgaagggaatctaggtaaagcaaatgcagagcttgcttttctcagcatgaagcttcccatttcacgaatgcaggtttgagcatactccactagatcttgctaacagtaatggtgtagaagtaagtaagcctgaaaatttaaatgtacatatctgcagcgtgatttaacagattcaactgtcttgagaaacatgggtggagctttaggacactctcttctggcttacaagagcgcgatacagggaattgggaagcttcaggtattattatttccgttgccctaagaaagaaaggtcttcacttgtcatagactaaggatgttcttgatataggttaatgaagctcggttaaaagacgatttggatcatacttgggaagtcctcgctgaaccgatacaaactgtaaatttctcgaaactttctagtcttattataatgatcaagttattattccatgtacattggtaactgaaggaataaaaaaaacaggtgatgaggagatatggtgttccagagccgtatgagaagctgaaggagctaacaagaggaagagctgtgaatgaagaaagcattagaaagtttattaaaagtttggaattgcctgaagaagcaaaagaccaacttttgaagctaactccacacacatatgttggcgctgctgctgcattggcactagccgtggatgatgctgtgcacttgggacattaataatatgatcatattggtgtagatgattctgcttgttgtattatgattttcttttcccaaatccaatgggaaaacaagaatcagtttattgatcgttgtgttatgtttcttttttgagtttcaattaatctagagcctcgttttgatcttaagcgtcatgaattatataagttgtgtgtggtcaatgattctcaaaccaataaaaaattatggttattaaacagaccaatagattgaaacctgatccaagggccatcttgcttccatctcaacatgtctttttagtcgaaaaatactttttcggccaaatgatggtgagtttgttttttctttttgcttggaaatgatgaatattcctgaaatatctatcttttaacattcgagctactaaagattttagatattgtatcaatcgtcaatactgtttagccacatcattgaactctctagggaatgaaatcacaaacctccttctttatccatacacattttctctcatgctatccaatgaatcctacaatctcttccattagaactccaccagtaattcaaaattgcactcattgacttacttgatcattgtctctttcccatattttgacagatacttagctgactaaccattaacccgttcattaaatcttcccaaaatagttaacaattttactttttgaaccctttaaactctctagtatacttaataggtacccattccacattccttagtaattccaaggaaatttttaagttcttcttttttttcttttttttgcaacacgcttaccaaacaaggccgatgattaattgaaatttatttcttgtcctaaagctttacaataatttataacaacacccatcaccgttttacattcctccgcatctgttttacaatactatcatccgcaaaaagcaaatgtggaatagaaggatttcgtttagctagtttaatgccggttagcatcttctctcgctccgctttcttaatattagaaatcagaacctccatacataaaataaacaaataaagggaaagagaatcatcttatcgtaaacctctgttggaaattatatttcctcttgctttcccgttagaacttgatacgagaccaaactaacactccaaatgatccaagagatctaattagaactgattcccaacgagtcataactacctttaaaattcccattctatcctatcatacgctttgctcatattcgtttttattgccaaaaagttcgttttacacaatatattcctctgtagtccatgaaatatttcttgtgctagcataatgttatctataataagtctacctgaaacaaatgtcgactgtgtttcagagactagccgaagtaaatatttttaagcctcaaacaaagaatttttgaaataaacttataactcacattacaaagacttattggcctaaactctgtcatcctctgtggcttttccgtctttagaattaaaaaaatatttgtttcatttattctcttatcaaaagatcttgttcggaaaaaatctctaaccaaaccaaccaaatcttcttttaaagagtgccaaaacctttgataaaacaaagccgtcagaccatatgggccttgtgtattttttacgtgcatacaaaataaagctttactaatgataataggttttttagatcaattaatcctaaagcactatcatgtcgttgtagtattttaggttgtcaatccaaatgggtgtgatgctaacaatcaagatgtgatcagaagtcattaagtcaagccaagcattaacaggttttggtgtgttctagcagaaacaataaaacactcgaccaacacagctcgttgcagagcactgggtgtggtcgagtaacagacagtaaatgaaacaaagatactcgactgcacaatctgtgatcaatcaatcaagatgtgatcagaagtcattaagtcaagccaagcattaacaggttttggtgtgttctagcagtcctaagtgaacatgcagaaaacagaaaatcaagcagaaacaataaaacactcgaccaacacagctcgttgcagagcactgggtgtggtcgagtaacagacagtaaatgaaataaagatactcgactgcacaatctgttgccagacaactggatggtcgagtatcaggtcgagtaacaagaaagagttgcagaaactaaacaacagatgacaagatgcagtaaacaacagtaaagtaaacaaagaaatcaatcagataaagaattccataggatgggataattgagtagtttcgtttcctcagtttacaggtgattgacatgctcaataaattatccctagacaacaagttcggtaaccaaatctaagtgccacctcaacagagaccctgaagttaaactagtcccagactcaatcaccattgacgagagctacctaacaggcattacgaatcaacaagttaaagccaaaacgctccctacaaccaataccttggtacagggccacgaatctctggaattagtggttcagacatttcatcgaacaccttttgggcgcgaaaatatatgggctcaaattcaagttgatcagaaagcaataggcattaagaacaactaatccagaagggatttataaatcaaactcaaccacctcgcatactgagaattctaaactactcttacccatcctcagaaacttattcactactcagacatcattgcagaaagcataaacgttgaatagaatgaaaacatgataacaaaagagtaatagcaaggtgataacaggatgaacaacagtaaacgaaatcaagaacaaaatactgaatactgaatagattaagagaaaaatccggattacaaaaggtcaagaacacagtgtctacagaataaaacttagatttacgaaaattgtaaagtacatgctacttatagcaaaatattctaaaaccctaatactcaaaacgacgcagtattgggacggattaagaactgtactcgacccatgtggtcgagtgaggggtcgagtgataagatggagtcttcttttcttccttgtactcgaatgtctgattgagtgcggaatggagaagactttgaagctggcagtcgagtatgtagtcgagtgatagagatggtggtactcggcttggtggtagagtgatcgagtgaaggtgatgaaggtactcgaccacgtggtcaagtagtgtgatcgagtgaaggtgatgtggtggacgtgatgatactcgaccaggcggtcgagtgatgagatcgagtgattgtcttggtggtactcgactagggggtcaagtggtgatgtgaagtgatgatgatacttgacctcgttggtagagtgattggtcgagtgaatgatgatggcgatactcgaccatgttggtagagtgatttgtcgagtggatgatgatggtgagactcggccatgttggtagagtgattggtcgagtgaatgatgatggtgatactctgccatgttggtagagtgattggtcgagtgaatgatgatggtgatactcggccatgttggtggagtgataggtcgagtgaataatgatggtgatactcgacctgttggtagagtgattcgctatagaggttgtggccgagtaattcaagaactccatgatgactatacttgagctcgtggtcaagtatgttgatttgatcaggtgcacttcttccaattaactcaccagcagctccaaatcatctgaaaacaacacaaatatgcaatatgcatgcawaactatcctagacatgcaaagtgatgacaaatgatgagaaatggtataaaacagtggtgatatgatgctaaagtgatgacaaatggatgctcaaaacgtgtaaaatgcacacttatcaactcccccaaacttagtatttgcttgccctcaagcaaacaattaagaacaagctggagatgaggtttgaaagcggggactcagaaccaaagcatgagatatgacaattaagatcaatgtataagctaacagttctaaaatgcaaggtgatcgacttctacttaaaaactttagttatgctctgttatgatccaaattcacactcagttgcacaatacgtcaagatcaaccaatccctttaacattcattacgttcaggaacatgaatcaagacatgcatcgctagtgaactcatttggctaaggacgggttatgagacaaagatggtccctttaaggtggttcaaattttaataacaggggactctcaatgaaaaaggactgagctttagatgaatgctaaaggtaagtgccaacctatgcatacaagaataacatcccatctacccaatgacataaaccgtgaataacaagtagatggtcctatctctaaacccaatgatgatcctaagtctacccttttgcactaaaggaatatttcgattttttcttgaatcaagtcatttcctttcatttctttggctcttgctcttaaggagaagtttttcttaaactctaatggctcttatgatttttattttttcttttcttttctacttttgttgccattttttttctagagtatatcttatcaattctatgtttcccaaacattcactagacctcaatatgattttcaggttccttctcctaaagattctaagcaattttctttctttttcttttcacactcaatctcaatccccaaataaattcccacctagtcctaccaagtccgaaaacgcggattggaactacatgggaaactactcttgtcggctcaaacctaacaggttctaccaagctcaatcctgaaaataggcctcacatgctctcacaaataacatggcttgaaagaagggttggttaagggtgggggaactactccaataatagaagcagctacttggattagcaagagtggtgaataagtgtaagaaaatccaaatatgtattatatctatgagttcaaatgtgatgcaaacatgataattataagtcagattcaagttcaaatttacacggaaaggtgtcatgacatgcaacgagtggtttctatagaacatggtgcggttttacttcaaagtcattcaaatgcatcagagaactaataactcatttagtgaatcatcatgcttacaaggttatctcctcattgtcccctatgaatatgcaacaatcctaaatgaaatactctagactcgatcctaaatgtaatggaactatatgaacactctgttattgtgaaatcattttctgaaatttttcaatttttttgtttttttcaatgccttaaatgattacaaactcaactcaagagtatatacaatgcaatacacacttcctgagccctcccccaaacttaaatcacacagtccactgtgtgactaaacttggaagagaatactcaggacaaatccaatcacaaaaacaaaataaagaacaaatcacaagagatgatataatacaatggtgaagtgaggcgcttaccacagtcgaagaatgaacggagttggtcgtcaatggctgcctgtgattgctcccaggccatagacgagccgccatgttcagtatcagctccaatatgagtatactcgacctcccttcttctgctgcagccagcaccgcagtcgagtgatctcctggcgtggataagctaatacatggtcgagtatttttcattgctctatggtcgagtatactgctgtactctcaaagccataatccacttcactcagctttttatacttatctcttgaagacactaaccaaatgcatcaaaaacaacaagaaaaaataaagatatgtaaaaagatagacatgggatttcctcccaagtgagcttgttttaagtctctaagcttgacttctcatactcattaggcttagggtgggttgcagagaggaaattaggtctcctctccttcttgagtagaatgatcatcatactcattagggtttcttgacaggtctacatttgggtactcagtggccatgtcctcacaatatgcttcttttttatcaagatagtcttctcctctagacaattctgatgtgaattc

SEQ ID NO: 1174 - DNA, 73252 bp, Arabidopsis thaliana
gaattcacatccttctttgctgaccagaatagtttctccatcgccagggacgtccttgatgttgagtggtacttggttgtagagaggaaatgaggtctcctctccttcttgagtagaatgatcatcatactcattagggtttcttgacaggtctacaattgggtactcagtagccatgtcctcacagtaagcttcttttttatcaagatagtcttctcctctagaccattctgatgtgaattcacatccttctttgctgaccagaatagttgctccatcgccagggacgtccttgatgttgagtggtacttggttggcttttccattgagctccttgatttgatccttcagctctttcacaatatgtgttagctcttgtatggctttgtcctgccatttagagctctccttgagttctaaccaatcatctgacgtcttgagttgtttggtcgagcatgaggtttcaggacaagttggaggcttcttcgagttgttggtggaatcagttggtcgagcatgtgttgaacttacttcattagctttcataacctttgtgtcagaccccatcaagcccttgtaaacttctgagccaacggttgacttgtgtgagtctaatgacttctcagaactcaaagtttcactagggaaatacctaactttaccactcttggtcaaaacagtttttgagttatttgcttcttcaagttccacttgcagttcaccagctagccgacccacttccttaactaagaaggtctgttcttctattgtgggcttcttcataacatcattgatatcaaacttcatttcaaaattcttcgctagattaagatcaatctttccttgcttaacatctatgattgctccagctgtagccaaaaagggccttcctaatatcaagggatgttttggttcttcatccgtgtttagcactacgaagtctgcaggcacctccacatttccaatcttgatgggcaaatcttctaataacacatgaggtagtttaacagacctatcaaccaagattaaggagatattgcagtatttatacatgttaaaacccaatctctcagctactgagagtggcatgagatttacttatgctcctaggtcacaaaggcatttattgaaagtcaatgaacctagggagcatggaagagtcaatgaaccagggtctcctagcttttctgagacatcgttctcatgtatgatggcactacactcatggctcagaactgttgttttctaaacctcttgaattctctcccatgatcaagtctttgaggaacttttaggaatctgggatacgcgtgagagcatcagcaagaggtatccttaattcgacttctttgatgttcttggcaaacataactctatacttatcttctaactctttcttgtgtcgaccagaaaatggaagtgggggcttgtaaggaggaggaatgaagactttttctttgttttttacagtaacaggtttcaaagcagttggtgatgttgttgggaaggtcggtcgagtaaagtggtcgagtggctgctcgagtgactggtcgagtggctgctcgagtgactggtcgagtggctgctcgagtgactggtcgagtggctgctcgagtgactggtcgagtggctgctcgagtgactggtcgattggctgctcgagttgtttctcagcttgatctttattgagactggaatcctccccatcttggtatgcactgtcctcagtgactgacttgggtctctctctagtggataactctcttccactccttatgatgatagcatgaacattagaatactccttgagattctgaattgacttccctggaagtcccgtaactttgggagtagaggtagatgtggattgtccttctaagtatctgactttagaattcaacgcctccacttttgcattcaggtcattgtagctacagtttagcttatggtgtaattcagataacttattagcaattttcatggagctagatgcttgtccctggagcagctgttgtaccatttgtttaatttcagcatcaggagcagcaggaccttggttttgctgaggtgcaaacccaggtggtggttgctgctggtagttccgttgaaattgctgcttgggaacaaaaccttggttgtatggaacaaaaggtttgttctgaccttgttgttgttgtggaggatacacatgatcctgaggattagcaacgttggtgctgcggtaagagaggttggggttgttagtcttgaagttgttgtatcctttgtagccaccttgattgttgatgtagcttatgtcttctaactggtttccctctccatcttggacttgatactgctcgtcatcaacaaggaagtgcacatgcttctgctggctaagaagaatcatgtccagcttgtccttcagcgctttgatctccttcctgtgtttgtcatcagagtcagatgtgcctctgatggtcctatcgcagtcttcgttgtaattaccatctgattgaactaggttctcaaccaattcccagccttcttcaacatctttgttctggaaatttccattgctggcggtatccagaagcattctgatccgtggtagaactcctctataaagtgtgctgagcagagaggctttcttgaagccatgatgagggcattggttggtgtaacccttgaaacgctcccatgctctacagaagcgttcaccagtcttctgtgaaaagccagagatctcattttctgagtcttgcagttctggcgttgaagaaaaactttgctagaaaagccttcttgcaatcatccaaggtggtgattgagtcatggggcagattcttctcccagatgtgttcttttttcgcacaagaagaatggaaacaaacggagcttgaatccgtcttcactgacaccattgatttttgttaggttgcagagcctatcaaattcatcaaggtggtcgagtggatcttccactgggagaccatggaatttgttcccctgaatcatcgagatgagaccactcttgatctcgaagttgttgttctggatagcaggaggtgcaattcctttcctctgacgatggtcccgtgtgcatctccagcaccaatgtttgcagggccattttgtttattttgttcgtcagccatttcgagtggttgctgaggtacaaagttgattgtgtttctcctttctttgagttcgcgagctatgcggtcgatgttgtcgttgaaaaggaggttctggttgccttttgatcgagtttgcatacaacagaggtgtacccggatcaagaagacaacaagaaaaacacacagttagtaaccgtaatgaaaattgataaagaacttgatctaagcaagtctgaattcttaaatgtcacaaacaaacacccaataggcaacgacgccaaattgataataagtttttagatcaattaatcctaaagcactatcatgtcgttgtagtattttagattatcaatccaaatgggtgtgatactaacaatcaagatgtaatcagaagtcattaagtcaagccaaacattaacatgttttagtgtgttctagcagttctaagtgaacatgcagaaaacagaaaatcaagcagaaacaataaaacactcgaccaacacagctcattgcagagcactgggtgtggtcgagtgactagtcgagtaacatacagtaaatgaaacaaagatactcgactgcacagtctgttgccagacaactgggtggtcgagtatcaggtcgagtaacaagaaagaattgcagaaactaaacaacagatgacaagatgcagtaaacaacagtagagtaaacaaagaaatcaatcagataaagaattcccgaggatggggtaattgagtagtttcgtttcctcagtttataggtgattgacatgctcaataaattatccctatacaacaagttcggtaaccaaatctaagtgccacctcaacagagaccctgaagttaaactagtcccagactcaatcaccattgacgagagctacctaacaggcattacaaatcaacaagttaaagccaaaacgttccctgcaaccaataccttggtacagggccacgaatctctggaattagtggttcagacatttcatcgaacactttttggacccgaaaatgtctgggctcaaattccagttgatcagaaagcaataggcattaagaacaactaatccagaagggatctataaatcaaactcaaccacctagcatactgagaattctaaacaactctaacccatcctcagaaacttattcactactcagacatcattgtagaaagcataaacgttgaatagaatgaaaacatgataacaaaagagtaatagcaaggtgataacaggatgaacaacagcaaacgaaatcaagaacaaaatactgaataatgaatagattaagagaaaaatctggattacaaaaggtcaagaacacagagtttgcggaataaaacttagatttacgaaatatgtaaagtacatgctacttatagcgaaatattctgaaaccctaatagtcaaaatgacgcagtattgggacggattaagaactgtactcgacccatgtggtcgagtgagtggtcgagtgttaagctggagtcttcttttcttccttgtgctcgagtgtctggttgagtgcggaatggagaagactctgaagctggcagtcgagtatgtagtcgagtgatagaaatggtactcggcttggtggtagagtgatcgagtgaaggtgatgaaggtactcgaccacgtggtcgagtagtgtgatcgagtgaaggtgatgtggtggacgtgatgatactcgaccagggggtcgagtgatgtgatcgagtgattatcttggtggtactcgactagggggtcgagtggtaatgtgaagtgatgatgatactcgacctcgttggtagagtgattggtcgagtgaatgatgatggtgagacaaggccatgttggtagagtgattggtcgagtggatgatgatggtgagactcggccatgttggtagagtgattggtcgagtgaatgatgatggtgatactcggccatgttggtagagtgattggtcgagtgaatgatgatggtgatactcgaccatgttggtggagtgattggtcgagtgaataatgatggtgatactcgacctgttggtagagtgcttcgctgtagaagttgtggccgagtacttcaggaactctaggatgactatactcgagctcgtggtcaagtatgttgatttgatcaggtccacttcttccaattagctcaccagcagctccaaatcacctgaaaacaacacaaatatgcaatatgcatgcaaaactatcctagacatgcaaagtgatgacaaatgatgagaaatggtataaaacagtggtgatatgatgctaaagtgatgacaaatggatgctcaaaacgtgtaaaatgcacacttatcaactaacttctgctttagtgacctctttggttagttccttattcatattttccgtaataatcagagacacttcattaccttatccgcgatgccatctgtattggaaacctgaaaaagatctttaaactcgttgttatctcctccattcaagtttctgatttctcccaaatcctattaagttcatataaacctgaaatcttatttcttgcccttcctttttttttctagaagcatgaaagaattttgtgtttttattccctacttccttatgaaaagcttcttttaatttattttcgattctttttatttccttttaaaaatttaagttaaatgtatttgttttgttaatattgtttgttttatttaatgttcaagattgtataattgtaatttgattgtaaattgtaggattcacccgtagtttatcatcatgtattaatatcaacctaaacctgtttaaccatataacctcgtccagtgaaattgaatattattttgttatattcttataaagttcaaaattttacaagagttttgatatcgacccaaacttcataattgtagtttgattattatatttaggattttcgtagtatacagtctgatattaatatatttaataaatatttataatatttaaacttcttattaattcttataaagttcagatatttataataaaactgaaattttaagttctatttgatttgtaaatattgttggttttgtttagtgtttaagattgtataattgtattttgattcttaattttaggatttcacccgtaatatatcatcccatattaatatctttaaattctttctaccttacatataaccttgtcccattaaattaaacattattttgtcattttcctataaatttcaatattaataatatttttttttttaatatcgactcaaacttcagaattgtattttcattgttatatctaagaatttacacgcagataccatcctttattaatatattttataaattatgtttaaatttcttataaattcttataaagtttaaatatctatgatatttgaaactttataagagtttgactctaaaccattgcccaatttttaagtaatgtgaaacattgtaaacatatttttttgcttcgtcgattgagtattatatgtcagtgtttttcactgttataaaatcaaataacagtaaaagaagaattatatatacatgtataaataaagtaaatttctttaaggaaattagtaccaacactggcggttccccatctcctaccggcggtctctccattgtcgataggttctatgttttctcttttccatttctttattctgttattgttgttgttaggtttttatgcaataaatcgagaatgatagcgacgatgatgaaatcatgttcgtcattacgtcggaatggtgttttactgtttttcggtgaatctattgtgatttcttatgttgttacactatttctatgtcggttcatgttctcggaatgtatgtctagtcaccggcggtttcgaatcaaccgttgctttgctatgtccggcgattgcgccgtgaattttccggctttgttggtcgtgtgtttggtcatactaacatatgatattagttatgtgatagttcccgggcgtcagtatgatctactatgggcgttccgaaatttaacacaaatcctattggagttgatatgtcaccatcgaccggcacaaaaaccaccatggaagcaatatgttgaggaggagttgaggctaataggagaatcagaagatggtttataccatatcaacaaaaatgaggtttaaggaaaaccaagatcaatgacatctctttctatatgagagttttgatcaattcgaaggtttagcgatgtaacggatgaatcgctgcctatgattttcgtatgcgttaccggtatttcatctgtaaaaagaagatgattatcaagcaagaaagtcacaacaaattgacggaaatgatgaagacgattaagtacttgactaagaaagcagagtgtaatttactttatcgtttcttcgttacataaaccattggttgtatctataatatcattgataattttgtatacagtaattgatattaatgaagtattttatatattttttaaaagaatatagttaataaaatataagatttaaaagaaaattaaggctacaaatataagatatctttgtaaattttgttaagacaatatttttgtaagatagattttgtaggaattgaaactgaaaataaacaatagatttaaatttttttaccaaaaatgtatatcactatatgtactcagaagattgtaaaattaagtcactcattatactactgtttccttttctctgtttaccttgtaaatactattgtacccctatattatattttaaattttatattatccttagcctaatattatgtcagacaacaaatattattgtcccgcatgattgatgagaaataccattgtctagcataactgatgagaaactaaaggcgcaagcggaaaggataatcaaaggtgtgtttgactaatttttggaaaatctagtcgttgatgctggtaattccaaaagtgatgtatcttcagatgatggtcctaaatctaacaatgaagccgccaatgttgaacaaaatcccaatccagtttccactccgaagtccaacaatgaaatcgctgatggagatcaaaaccccaatccactgtcgagtcaacttgtatctatgcagtctgaatatacccttccttcttttgacggagaccaagatatatctgttgcagatgacgttgtttctttctacaattcggtggatgtaccggacgatcggaggggtggtggaacactttttcatgatgagaaggaatttcagattagcggatatgagtggtactttgttaatatttgtcgtaccatgtaatattcaaaccgcaaggttcgtattttttttctgatttcaaatttccgtctgcgttgtagggcgtcgttgagatgggagatgatacaactacgacctggtttagatagttcttctgttgaataaatatttaaaacagttgtgtaattgacaacgttggactaggtcttcgtagggattgttaattgttattcacactgttatcgggtaacaaatttgtaaccgatcgtgaaaaaatattgttaatttggttttcaatttcgttatagggggatgatcatcggcatgttagattgtaacttatttcgaaaatatttttcttacctgttatgttagattcgtgtaacttcgcacgtacattttcttcggaaacgaaaataaatgattgtcaaccaaaaagattgttaattgttaacatacttatcagataacaaacaaaatatccagtttttgctcattctttaacttcggaattttgactgtatctcttctgttaacatatttatccgataacaaacaaaatatctgattgttacaatacttatccgataacaaaatatccgatatccgataacacaaaaaagattgttaattttgttaacatacatatccgataacaaataaaatatccagtttttattccttctttagcttcgcaattctgaccgtatctctttagttgtacagcgacattgatatgggaggcgacaaaactatagtcggtaacaaccaggttagatagttcgtgtgttgaataaatatttaaaacggttgtgtagttgacaacctttggtcaaggtctttgtgtggcttgtgaattgttaatcacactattatcgggtaacaactttgtaaccggcttgtcttcaatattgttaatttgattttaaatttctttataggagatgatcatcagcaagttagattgtaactttgttcgataacattttgcttacttgttttgttatgttagtgtaacttacacttgtacattttcttcagttaacatatttatccgataacaaacaaaatatccagttttaactccttcttatgtagcttcacaattccgaccgtatctcttttactccggctcgcgacacggctgacatttgccaggtaactatgaccttaacccctcatatttctgtttttctcttcactctttaattcaggagtatctactgttttaactacttttctcgataattttatatttctttaggaacttaaccggacctctcccactggtgaattaggacagctctaccttggggactccagcgtcctcccatcaaagtttgatataacagaggttagttatctaaaattcttattacttctttattttcttttttttttaaatcaccactcactcacttatttgccacatctaacattatcgttaattacatatgaatctgctaaaggtaggctaatttaatgtcctctttctgtcgacgcatttaatgcctgatatctttcttcagtcgcctataaatgtctttgacttataggggtatagttgaaatattcgttttgcaaaattaatcccacccaaatatcaaatctacatgtatatatctatactattaattgggaagcattttgttaactacaacattgtgagggtagtttaaaaataactaaatgaattttacatgggtatttagtaaattaattactacgaaatgaatttagctttcataaaaattaggctattgatttcgaaattgtatatatagaaacttattcaattttggtaatatattttgagatatttccggaaacgaaaatatcaatttaatatcatcatatattttagattttaatatatttccttaagaaactacactaataattttaaaaatatttaaaaagatacctttaagacttcaatctctttattgtgcacataataaatccgtgaaataataaaaattccttaattttagagttaacatattaaaaataaattgtaacgcccgtgaacccgaaaatcggttagggtttgtttttaaatcatccggtttaattggttgggttaattggaaaccctaaagtgtgcctataaaagaaggaaactcaaaattagggctttagttagccacttttcgttttataaaggagaaaaagagagaaaaggagaaggagcaaaatcgttagggtttgggagaaatcagtttcgtcatatcaaatcgtggtaaaaggtaacgaaatttggtatagttattcccaagtcctttatcgttattctccagtttacagaattggatttggattaaaattggttgagttattcgcagtttcgtgagacacgttttctcagacgcgaattaggaccagcggagattgaaactgagatcgtggtctcgtctgttttccgatcggcacgagattttgtgggcagctctgtgacgtctgcagataggatttcaccggagagataatagttaacggttagcttgtattttagggtttcgtctttgagactgctcgtttctgggttttcctgtccagtttgcttcaaggttgcttttggttgtggactcgttgtaggacgtttctggactgtttcagacgcaaggagagtctctcctgggtttaattgctattagaatcaatttgttaaggtgagtgcgtgaccatgagcttatctgagcgattgggttatgtgatttgttttgtgtgatgatatgtaggtgtggtgaatgtgttttgggtgaaatattcaatgattggtttgtttgtattgtattcgtgattatacctttgtatttgcttgtgtgtatagctcgtagatgggaggatcgcctcactaagtatatatgataatacttacgcatctcattgtgttgttgatgcaggtaaagataaagtgtgatcgtggaatcatggcaaggaagagaggatgatctaggaactcgtttgttttatttttggtgtttttggttattggaacccggttaggattgttagttattcttggttttgttggtcgaattatttatttattcataaaatagtaattttgacttgcggtttaattgttattttattggttggtttaattagatatttatgggaatatttaattatatttttttttaaaaaatgggtagggttgtttcaatttggtatcagagcgattacggttctaggatgtgtagaaaaattaattgatgaattattttcctgttgattgatgtgggatgagctagggtgttagcatattgaggattgattatggagtgtttagtcaattgtgtgttgttggagtcctagcatcatcttctccgagccttaaatgagattccacggtaagttgtttgtgatatattggtttgttttagtttcttagccatttgttcttgagtagcgcagatggttagagaagctggagttcgtggtcgtggtcgtggtcgtggtcgcggtaggggacgagtcctcgagggtaccggcgagagtgatggccacagtgccacagttgagcagagtgtgggttcgcagcctgagtttgtggagcccggggttaggaacggtcttggtgccgatatagctggtgcagccggagtgggggctggtggagctggtgtcggtaccggtgtgcatgtcgttggtgctgagggcccaggagtgatgggtgccgcagccggaggagcccaggttctagaggttggtttggcgggcctgctgaggcagttgttggagcggttaccaggtgtggtaccagtggaggctccagttgcgccacgagtggcggaggtgcagcagagggctgcggttgctgaggaggttccatcttatttgaggatgatggagcagttgcagaggattggcaccgggtatttttctggtggtactaatcctgaggaggccgacagttggaggtcgctggttgagcggaacttcggttcgagcagatgcccggcggagtatcgggtagatctagcagtgcattttctagagggggatgcacatttgtggtggcggagtgtgactgccaggaggaggcaggcggatatgtcttgggcagatttcgtggctgagtttaatgccaagtactttccgcaagaggcgctcgaccgtatggaggggcgttttcttgagctgacacagggtgagcggtcggttcgggagtatgaccgggagtttaaccgactcttggtgtatgctggtcggggcatggaggatgactaggcccagatgaggaggttcttgaggggacttcgaccggatttgagggtgcggtgtagagtgtcgcagtacgccacgaaggcggcactggtggagacggctgctgaggtagaggaggaccttcagaggtaggtggtgggagtaagtccagcggtacaaccaaagaagactcagcagcaggtggcacctagcaagggcggcaagcctgcgcaggggcagaagaggaagtgggatcatccttccagagctggacagggtggtcgtgcaggatgtttttcttgtggaacccttgaccacaaggtggcggattgcacgcagcgagctgagacgagggagtgctaccactgcagggagagggtacatctcagccgaattgtcctaagctgcagcggatgacagtggcagtggtacagccggcggtgcagcacggagcgcaggtgcagcagagagtgcagcagttagcacatattgcagcggcaccgcagggttacactacgcgtgagataagcggtaccagcaacagagcgattactggtatgatttctgagactcagactttgtgaattatttctgttgttttggatatcattgttttgtgatgaatgttagggttcttagcacatgaggtttgtgtagggaccttattagtgggcggtgtagaggcccatgtgttgtttgactctggagcatcgcattgcttcattaccccgaagagtgcctcgcgcggcaacatccgtggggatcctggtgagcagcttggagccgtcaaggttgctggaggacagtttctagcggttctggggagagcgaagggtgtggatattcagattgcaggggagtcaatgccagcagatttgattatcagcctgtagagttgtatgatgttattctgggaatggattggttggatcattacagagtacatcttgactgccaccgtgggagagtttcttttgagcggccagagggaaggttggtttatcagggagtgagacctacctcagggagtctcgtcatctcagcagtgcaggcagagaaaatgatctagaagggatgcgaggcttacctggtgacgatatctatgccggagtctgtggggcaggtagaagtgagcgacattcaggttattcaggagttcgaggatgtgttttaatcgttgcagggattaccaccaccacggtccgatcttttcacgattgagttggaaccagggacagccccgttgtctaaggcactctacaggatggctccagcagagatggcagagctaaagaagcagctagaggatttgttgggtaagagattcattcgtcctagtacttcaccttggggagcgccggtgttatttgtgaagaagaaggacgggagtttccgcttatgtattgactaccgggagttgaaccgggtcactgtgaagaacaagtaccctttgccaaggatcgatgagttgttggatcagttgaggggtgctacttgtttctccaaaatcgatttcacgtcgggttatcaccagatcccgatagcggaggcagatgttcgcaagactgctttcaggacgagatatggacattttgagtttgtggtgatgcctttcgggttgactaatgcacctgcagcgttcatgaggttgatgaacagcgtgttccaggagtttttggatgagtttgtgatcatctttattgatgacattctggtgtattctaagagtcctgaggagcatgaggtacatctgaggagagtgatggagaagctgcgggagtagaagttgttcgctaagttgagtaagtgcagtttctggcagagagagatgggttttctgggtctcattgtttctgcagagggagtttcagtggatcaagagaagattgaggctatcagagattggcctagaccgatgaatgccactgagatcaggagttttcttgggttggcagggtattacaggaggttcgtcaaggggtttgcgagtatggcacagccgatgactaagctgacgggaaaggatgttccttttgtgtggtcaccggagtgcgaggagggtttcgtgagcctgaaggagatgttgacgagtacaccagtgttagcattgccagagcatggagagccttacatggtgtatactgatgcctcgggagttggtttgggttgtgttctaatgcagcgtgggaaggttattgcctatgcatcacggcagttgaggaagcatgagggcaactatcctactcacgatttggagatggctgcagtaatctttgccttgaaaatttggaggtcttatctttatggtgggaaagtgcaggtgttcacggatcataagagtttgaagtatatcttcactcagccagagctgaacctgaggcagaggcgatggatggagttggtggctgattatgatctggagctagcttaccatcctggtaaggctaatgtggttgcagacgcgttgagccgtaagcgcgtgggtgcggctccagggcagagtgttgaggccttggtgagtgagattggtgctttgcggttgtgtgctgtggcacgagagccattgggattggaagctgtggatcgagcagatcttctgactagagttcggttggctcaggagaaggatgaggggttgattgcggcttctaaggcagagggctctgagtatcagtttgcagctaatgggactatccttgtgcatgggcgagtttgtgttcctaaggatgaggagttgcgacgggagatcttgagtgaggctcatgcgagcatgttttccattcatccaggagcgactaagatgtaccgagacctcaaacgatactatcagtgggtcgggatgaagagggatgtagctaattgggttgcagagtgcgatgtttgccagttagttaaggctgagcatcaggtgccaggtggcatgttgcagagtttacccattcctgagtggaagtgggattttatcacgatggattttgtgattgggttgcctgtgtcgcgaaccaaagatgctatttgggtgatcgtggaccgtctgactaagtcagcacattttctggccatcagaaaaaccgatggagtggcggtgttggctaagaaatatgtgagcgagatcgtgaagttgcatggagtacctgtgagtattgtgtcagacagggattccaagtttacttctgcattttggagagcctttcaggcagagatgggtactaaggtgcagatgagcacggcttatcatccacagacagatgggcaatctgagaggactattcagacgcttgaggatatgttgcggatgtgtgtcttggattggggaggtcattgggcggatcacttgagtctggtagagtttgcttataacaatagctatcaggcgagtattgggatggctccttttgaagcgttgtacgggaggtcatgcaggacaccgttatgctggacccaagtgggggagaggagcatatatggtgcagattatgttcaggagaccacggagaggatccgggttcttaagctgaacatgaaggaagctcaggatcgacagcggagttatgctgacaagaggaggagagagcttgagtttgaggttggggacagagtgtatcttaagatggccatgttgcgaggtccgaacaggtctatctcaaagactaagttgagtccgaggtacatgggcccgttcatgattgttgagagggtgggaccagtggcatacaggttagagttgcctgatgttatgcgtgcgtttcacaaggtctttcatgtgtcgatgctgaggaagtgtcttcacaaggatgatgaggtgttggctaagattccagacgatcttcagcccaacatgactttggaggcgagaccagtgagggttcttgagaggaggatcaaggaacttcggcggaagaagattcctttgatcaaagtcctgtgggactgcgatggtgtgacagagggacttgggagccagaaacgaggatgaaggcaaggttcaagaagtggttcgagaagtaggttgctgcatgagtttgcctttccttggtttccagtttcagtgttgttgagtttttgagtttttgagttgttgtttttatttctctttcatttgtattttcgtttggagttgtaacgatcatgacagttgatgattaataagatgagtattttttttttggatttgacttgggttttcttatttaagaatgtgttgtgcggtttcaaaaaatggaaagtttcctagaaaggacttttctatttttggaaagtttgagtaaacaacctaagagaaacgtgtgtttacgagatggccggaagttggtcataaggatattctcgaggggatatgatggatggtgaggcatagaggtgtcttacgcgaatccatgagagagtctgaagatatgctcggaagcgtttagtattgttgctcgagggacatgaagatcccaacgactcgtgaggagcggggtatgctcctgaggtaccggtaactcgagggacatggtgtctttagagtacgaggggtacggtggctttgggtgacgatccgagagcacgctttagggtgacgacccgagagcgagttttgtggtattattttctccaagtgtcgtaactcgatgactttgtggctgagagtgagccgacacaactcagggtttgactttgagtggggaagataatatgtgtgatacccgagataccgtaggccgaggcctgagagtgactgtttatgctcgaagattgtggtctgagagtggagagtgagttgtgagcaacaatgactagtaaatcgtgagtatatcgacttgatagagagacctagagggggtctggttggagggagtgcagactgtagtgatggttgcacggagttcctcggagtggaagggtgaagctagattcgaggacaaatctatgttagtgggggagaattgtaacgtccgtgaaccggaaaattggttagggtttgtttttaaatcatttgatttaattggttgggttaattggaaaccctagagtgtgcctataaaagaaggaaactcgaaattagggctttagttagccacttttcgttttataaaggagaaaaagagagaaaaagagaaggagcaaaatcgttagggtttgggagaaatcagtttcgtcatatcaaatcgtggtaaaaggtaacgaaatttggtatagttattcccaagtcctttatcgttattctccagtttacataattggatttggattaaaattggttgagttattcgcagtttcgtgagacacgttttctcagacgcgaattaggaccagcggagattgaaactgagatcgtggtctcgtctgttttccgatcggtacgagattttgtaggcagctttgtgacgtctgcagctaagatttcaccggagcgattgaatagttaacggttagcttgtattttaggttttcgtctttgagactgctcgtttctgggttttcctgtccagtttgcttcaaggttgcttttggttgtggacttgttgtaggacgtttctggactgtttcagacgcaaggagagtctctcctgagtttaattgctattagaatcaatttgttaaggtgagtgcgtgaccatgagctttatctgagcgattgggttgtgcgatttattttgtgtgatgatatgtaggtgtggtgaatgtgttttgggtgaattgttcaatgattggtttgtttgtattgtattcgtgattatacctttgtatttgcttgtgtgtatagctcgtagatgggaggatcgcctcactaagtatatatgataatacttacgcatctcattgtgttgttgatgcaggtaaagataaagtgtgatcgtggaatcatggcaaggaagagaagatgatctaggaactcgtttgttttatttttggtgtttttggttattggaacccggttagaattgttagttattcttggttttgttggtcgaattatttatttattcataaaatagtatttttgacttgcggtttaattgttattttattggttggtttaattagatatttttgggaatatttaattatattttttttaaaaaatgggtcgggttgtttcataaattaacttataaaatattctaatatttttttttattaatgcctaacaaaccaataatatttaaaacaaatgcttttcaagatttagctttacagaaaaattagaaaaatctatacaaaaggtttatatacaaaatctatataaacttttagaaaaatctaaataaaaccttatcactcttctatacttcactataaaactattcttctatgcttttttcgcaaactatgaaccatacctctatatttactttgtactcttcttaattcatgtcttttccatgttcatatagtttgttagtttctactttttttaagaatctattggaaaccttttcattgagatcacttttttgcagattatgttcatgttgtacataaaatcatataacgaccttatcatattacacttgcagatttcttgaaataagttttttttcgtccttttggcttcagatatgatcattttacatgttattcttttctcatgaattattacttttttttttgtttttctagaaaatagctgaagacgcttccatggaattcattcaaatttctaaaattgcgaaagccattcaaacgatcatttgtcggagatgtttttcttctttgcgatcaccaatttaattgtgttgtatattttttattattagactatagatattattcgattcgcaacattagatattgtgtcacaaataatattgtatacttttttatgtacattataatttatacactacaatatatatcataaaataacaaaaaatctatatttaataaaaaattattacaatatttttttaaaaatagaaaactctgtacgtacgtccgaatcatgataaagacagaagatacaaactaggtttacattaacatgtattttggtccaattaaaacttttggcttgaattatgggccactaaaataaattttgttaaagaggttttttgagttaccaaattttaatttataaactaattttgcatagatattttacactatttcaaatctaattttcacaaatatatatttctattacaagtttataactattagacttttgaaactattaaaactatttgttatgcaggaaaaacaaactatttatataaataaaatactaataaatgatgcaaaattgttaaatttttaaataactaaaatttctattcaaattttaaaactaataaaacagaaaataaacgtgtgtatcaaagtaatttgaaggacaaaagaaaaatttccaataaaaatgttactattatgatatctatgctattatacaattcactaactcaaaaaaaaaaatcttaattaaaacttttcgcaaactttttacattacctatttttttttttttttttttttttttttttttacattacctttacacatcttattttcaaatactatgataagtgataagtttatgatatatattattatataattcactaacaaaaaaaatatattaatacaaacttttatcaaaatcatataataatacttacaacccgcataaataatgtgcgattcacatcattagttattgtgtcataaataacattatacacttttctgtgtacattataatttatagttttatacactacaatatctttacctaaaaatttattctcatacattttttaaatttatcttaatatgtatgtgcaagtcagaatctagttcttaattaaaacttctttcatgtatatatttttaactcagataattatgtctaaaacaaaaataataatgttttaagaattgttgacgtcgaaaggttcctagaaagggggttttattaacaatagtaaataagtggttaatacagtaaactaattaaaatatggagcactgaatctcaaatatcaaacaattcctcctcccaaaaccctaaatcgaccttcgtgaccctccgtttcagatcacggaccgacgcttgctctgtgctcatcgttctcttcttcactttgtaagcttcctcatctataaagttaccatttttccgatgaatcgtgaaggtttattgatgaaattgggctatatttctgcagattcatggtggtttagttcatgattttggatgttttaagaactttttctactagaactcgaaatcttccaagttctggtttttattcgataagtactagtataatgcgagatatcaaagtcaaatctgattctaaggagtttctaacatcatctgatgaagaagaagaatcagtttccattagagtgtcgtcttcttcttccttgagtagtgttaaatcgacgcctgagattgagaaaaagtatgttcatcgagtttacgatgcgattgctcctcattttagctctactaggtttgctaagtggcctaaagttgctgcctttctcgaatcgttaccgtctggatcggtgattctcgatgccggttgcggtaacgggaagtatttggggttgaatcctagttgtttcttcataggttgtgatataagtcatcctttgattaaaatctgttcggataaagggcaagaggttttggttgcagatgctgttaatcttccttatagagaggagtttggcgatgcagcgatttcgatagcggttttgcatcatttgagtacagagaatagaaggaagaaagctattgaagaacttgttcgtgttgttaagcctggtggatttgttctcattactgtttgggctgctgaacaggaggatacatcgttgcttacgaaatggacacctttgtctgctaagtatgttgaggaatgggttggtccaggtagtccgatgaatagtcctcgtgtgaggaacaatccgttctttagtcttgagagtatcccagagactgaggtgagtacaaaggagcaaaaggttgagaacagtcagttcatcggtcttgaaagcattccagagagcgaggagagtacgagagagcagaaaggtgagagtattattccagaaaccaaagctagtatagtagagcaaaaggatgagaaatctgttgaggagtcattggaggctctgaagaagagtcaacaagagtactttgtgccatggcatttaccataccaccgtgctgaagtgagtggtgcatctgcgtctgcacttgcaagtgggcttgcaaagaaagatgatagaaaaggagctgttgtgtacaacagatactaccatgtctttagcgaaggcgaacttgaaaggtacgtgagttttatcgagagatttgctctccgtgtattctttagtcgtgtttgctaatactgtaatctttaacaggttggcatctggagtaggcaatgcaatgatagttgatagatttttcgacaagtcgaattggtgtattgttcttcagaaagaagctttaaaccaagattgaactttggtttcaaacttatcaaatctttgtgatattggaactccattgcatatgtaatcggaaattattattgcatttttcatggttgtagtttgagattctgtggcagctcattttccctgcaatttgttgtctttaaggggttttgtattatgtgtaacacaaatcaaagaaagaatcttctctacatgataaacaaaatgtcagaaatatgatttagacaaatacaaatgttagtcctggatgtttggttatctattcgggttcggttcgtattaattcggttattggttttttggttctaaagtttagtatccatttggttattttgaaaattttggtttgatttcggttctttcggttttaacatttaatattcattttgttattttgctttggatatttaggttattttaggatatttttcgattattttaaagtatttttactttttatatatattttcaagtgtttttaattatttcgtatgtttttgaaaatataattgtatttcggatatttttggttactcaaaatatttcggtttagtacaaatttggttttggttatttcggttacgaatttagtatatgttcgattatttttaaattttcgattcgttttttttgctttggttctggtttagtacatttggttcggtctatttgccagatttcggttctgtacattttgttcggtttatttcggttcggttctttttgttgtcaaggttcttgagaaagacgagttgctaaaaccttgttatgttctagttgggccgtgttaatgggcctactattgaaaagcccttgaatatgaagaaaaattacaaaagtgccattagttcttcatctccctcacaactcagaagaagaagaatttctccggctaaaaccctttcttctatcatctatgcgaaagcttcatcttcttcaaagaaaatggtttcagtgttattccaatcttcatgttcctgttcactttctagctttcgctctgtaaaattcggagcccgtttagtctctcctctgtatttcgccggcaatcatgttcatgtcacttccggtagtcttccaatcggaaaaggtaaagactttcaaaacttttaagctttgtgacttgcttgctactatatggtctatgttaaagccttcgaaagtttgtgactttacttgcttctacatggtctatgttaaatccttcgaaagtttgtgactttacttgcttctacatggtctatgttaaatccttcgaaagtttgtgactttacttgcttctacatggtctatggtgttgttgattttagaggattaagactaagtcttgctttagttgcttacaaatggaactatttatctcaaagtttctgtctttcgtcaaatgctattgaaaatctcttaacttgcttaagagtccaaactatatcttattgcagtatcaggtagttatagtttccattagatttactggtttgatattgttataactactgtgaaatgtctcaggaagtttattgaacctcaagagtgaaagacctcagagatttgttatctcagctgttgtggatgataaaagtgttgtagctaaagaggagaagaaagatggttctgaagaggttgttgtagataaccagagaatgatcaaagtttgtgataagcttattgaggtttttatggttgataagcctacaccatctgattggagaagattgttagcttttagcaaagaatgggatagtatacggccacatttctataaacggtgtcaggaacgagctgattctgaggataaccctgagatgaagcataaggttcatcgacttgcaaggaagctcaaggaggtgagtttattcatgttgcttgctctctctctttatgtatttgtcatttgattttgacattggtttgaaatcaggttgatgaagatattcaaaggcataatgagcttctcaatgttatcaagaggacaccaccagctgaaattggtgaacttgttgctaggcgtcgtaaagatttcacaaacgagttttttgagcatttgcatactgttgctgaatcctactatgacaatccggatgagcaaaatggtaaaactttatatgccctgtcagtgaaataagttaagggattgaacaatactgatattgttcaatgataacttttcttattggtaagctcttgcgtcacttgggaagttgtctatagctgctgtacaagcttatgacacttcaacagaaagcattgatgcgctaaatgctgcggaaatgaagcttcaggacattatcaactctccttcgcttgatgctgcctgtagaaagattgatagtttggctgagaagaatcaacttgattctgcgttggttcttatgatcactaaagcttggtcggctgctaaggaatccaacatgatgaaagaagaggtactaaactcataaaaccgttatcttaggaatcgttaacattatcgttgtataacattgaattcatacaacttaggaatctacttagtccttagaacccactacatagcttctttgatccattctggtgttggttcttgacaggtaaaagacatattgtatcacttgtacgtaacagcaagagggaatctgcagaggctgatgccgaaagaggtgagaatacttaagtatctactatcaatagaggatccccaagaacagataagcgctctacaagatgcttttacccctggggacgagctcgaagggactgatgtagactacttatacacgtaagaatgagaaaactagacctggtcatcttatatatacacatttatgtagatatggaaccttaaggtgtgtgtacaaatggaaactctgtaggacgcctgagcatttgcagagcttgatgaaaacggtgttggaagcgtatcatttcagcagagaagggagtctagtgaaggaagcaaaagaccttatgcatcctgagctcatcgccaaaatcgaacaactcaagaagcttgttgaaaagaagtatatgtgataaaaaactttacagatcctaagctctcgtaatttgttactatgtatgttttgtatatggtgtatgacattcttcaggtttctgtttcacacatatatgtgataccaccataagactggagtactatagaagaaacatgtttcagtagtcttcaatatcgaagaaagtcagaaaccaacaccataaacattgttgttgtaaacaagagaggatccagaagaacgctaacttatcttaaaacaataaacaagctagcctgaaggttcggatggtaaccgcggcggtttttgttgtgcggggaaagcgttattatagtaccgtacggtttaactgcggtacgtgtagggctgagcatatgggtaacccgttcgggttcgggttaaatgggtaatggatttactacccaatagggtaaaatagaattttcttttcggtctggttcagttacactcgggttagtgttggtttgggtaaagagtttcaaaccctaaaaatatccaaacaaatggaaacgagtattttatttgtagatagcgggtacccaaaaaacaaacgttaaatattaacaaatttttaataaatttaattagatttgaatatattttactacaaacataacaaatgatttttaaatagtttagttgttttgagtatttagatataaaattaattaatatatttggatttataattataattttagataattacattatattaagattaaatgtaattaatatttttgatattaaatttatgttcgggttctcgggtatcctatttggataacggtaatctccggaccgacctgatacccacgggtttactaaaattttacccattgaggtaatttcttaaaactctaacccgccccaacccgattttttcagttcgggtatcagattgggtatcggatccggtttttttgcccacccctaggtacgtgcgggagaaatatatttgcgggacaagtccggtttgatcaaaataagcggtacaaaataatgtttgattggtgaaaaaattatttgcggtgcgaaatataaattatatatatatattaattaattatttttttgtgttaaaaataaacaataacaggtatttataaataattaatacaaaaattgatcaaaatataaattttatttggtaacatacatattattaaatgagctgactaatgttatcataaaaaaggtacaatacattaaaaaaatattatcttttactttgattttcccataacatatttgcaatattgtctcttatttgcaccatgtgttctccatatgttatatctgttgcttctatgccatctaaatcatgatcaaaatctctattgtttatattaatctctgtcattacatctacaaaatctgccagttttattcgtaagagctttccacctcttgtaaatttttttaaattcatcaagcttgttttttaagaaaccataagttatatccatattgaatgctagattaaatttttcaactatttactctctaccgctagtagtgggattcttaagagtataatttgtcatggcaattgcttgtgtatctgtgttttctccaacagattctactgatatatatagcaagtgaaactagtaaaaaaaaaaaatattatatatattatccactgtagaattccagaaaccgcagaatattagaggatactgcgttttgataagcgttccttgcattatttacctttgaaatccgtattctttttatattattatttttctggaaaaatgtactgtgtacttttcttgctgattggtacccaatgcggttttcgaagtaactttatttgaattccgcttttatgtcgtccccattcactacctaagtacatgtgtataaatcatataactgtctttatttaattattaattgttgtcataaatataagtaaaacctaaatcattttgaaagtttttttgttgataaattcgttttgaatgttgtagtttgcaaattgtcattttcgtacacatgcatgtagtaagggaaagttgcaaaaccaagctaatagcaataatcggtaatctgacttaagtttgtcatataaaccaacatcataaacattgttgttgtaaataagagaggaaattaggatgatgacaagtatacaacatgtggatggtataagcagaaaatgtatagagaaatatgacttctcacatgtctatagaagacttagcacctcacattcgtccctcgtctatgaatatagtaaaagataacacggagataaatataacacaagaaacattacttaagaatttgtaaacaatcatgacaatgccatatatagttagtgatgttgttgatctgcgctttgttggtgtaagaaagcgcaatactcagatcaggcgccatggaagaggtggaccaatatgaaaccggataaataatgttagtaacttcccaagttaagaatccaccgtggatccaaaaaaatgagcaaacctcaatgcaaaagatgatcaagagaaaaaaagatcaccttaggtcatatgggtttgatgagtaaaagataacaatgcttagtagagaagaggaaatagacataagaaattgttcattcattaggtttctcgaaatggctaaatgccttacatatacataaagttgtaccagtcgtaaaccgacttaatgtaccaaaatagagactgtaccaacaaactatactaaaagcataattaaaccgaataattaagattcatcatgtagcaatactcccttcttcagtgtatctttggcctcaaatatggaatgttggatgcttgatgataaagtccttgtagaactctgttggagctggatttcccttcaggaatccacctgcgaaaatacaaggccaacccaatatgcccagcaagcccaccaagtagaggacctgtgtaactccgcttcccacgtacaaattagctatttgggcctaataagctcggtcacctgacgaagagagataagcagataagaacctaggaactgatatggagatattcgcggagcggacctgatatctcagaattgacctgccgaatatccaagagaatctccgcggatctcggatggagctccctacgtgcgtaggtctatataaaaaagcaaggaagacttggaaaagacacattcattgagcttaacatttacacttgtaatcccattcgacattgtaaaagctctcttattatcaatacaaaagtccattcgttcttagcaatataaatttcaaagttcttgtgaagatctagccctcctttctcataaatctatttacaaatctctagtgtggatttcagaacccataaactcccaagtagctttcgatggtggctcgcccttccactgcaaaagtaccttggtgaccgcttggttttggcgattaaccattttcttttccaagatagcttctggttccttggcattacccacatcagttaagtattgtggtagaacaggtgcgttagtaggagggtttgggcacaacttgagtaagacattgtgactagtagttccttgtggcagctcgagcttgtaagcaacaaatgcgaccttgtctatgacacataaatgtccataaaatcgtgtgctaagctatcgagggactcctctggtttttagggattgttgcctataaggctgcagttttaagtacacaaagtctccaacctaaaactctttttgtgacctgtgagaatcaacatacttctttatacgattatgtgcccttaaaagatgaaatttcagcatagcaatcagttcttcctttttctgcaagctcatatcaacgacaactgaagagctttcccctggaaggtatggtaagtggacttggggttgctgaccatacacaaattcaaatggaatgcatttaatagaggaatcaaacgtggtgtagtaccaccattctgctagaggtaaccatttgctccaagtttgaggcgtccgatgtcatgcatcgcaaaaaaagtttcaagggttttgttagttaccacagtttgcccgtctgtctagggtggtaagtagtggaaaaacactgatcaactccatgaacccgaaacaattctctccacacttcactcaggaaagtagggtcccgatgtcctgtggtatttcgtgtagcctaaaacgttatctaagtaagcttgaacaacttcaattaccgtgtaggggtgagataggtcaatgaaatgcgcactcttacttagcatatcgataaccactaatatgtagtatttacccgtagatgatgggaggccctctatgaaatccatgttaatgtattcttaaactcctcttgggactggcaagggctataacagacctggagaagcaactagatcatacttgttcttctggcagatttgacagttacaaatataattttgcaccttcggactcatcttttaccagtaaaacagtgccttgatgcgctacaaagtagcgtctcttctagagtgaccccaactaacagaatcatgcatccatttaagtatattgagcttgacagtagcgtcaactcttacaaccagttttctttttctcctcaattcgtcattgataaaggagtaagcaggacgagaggcatgattactattaatgttagagatgatttgctaagacgcgggtctgattgcaaaagcagctggatactatcaaccagacttttgtgaacgtgaaataaagtaatggagagcaacgggagctggtcactcttgacaatgcttcgggtacatgattttcttttccttgcttgtactgtatctcataagtgtagtccatgagtttagacaaccacatatgttggaaatgagtagttaccttttgatccaacaggtacttaaggcttttttgatctgttttgataatgaatggcatatgagtaaggtaagcactccaagcttgtactacatgaaccacatctatcaactttttctcgtaaactgatagggcctagtggcgtggaccaagtgcccggctgatatagcagattgggtgactctcttgcatcaaaactgcaccaatccttgtgttagcggcatcagtttctattacaaaatccttaccaaaatctgatagagccagaactggggatgatgtcagggcagattacaatgcatcaaaggctgtagcagcttccgaacaccagtggaacccatctttctttagtaggttagtcaatagcctagcaatgatgatgtaaccttgaatgaaccttctgtaataattggcaaggcctaagaaatttcttagctgcttctgcgtggtaggagtaggccactgttcaactgccttgatcttacttggatctgtactaactccagccgcatatatgaaatgccccatacactcaactattgtggctccaaaagtacattcaacggtttcaagaggagatgatgttgcttgaggattgcaaatacttcctctagatgaagcagatgttgttctcaagttggactatacaccaatataccattacaaaaagacaagtagaagttttgtgttaatgtgactaaacacctgattcattagactctgaaatgaacaagaagcgttagttaaatcgaatgcataacaaggtactcgtagtgaccaacatgaattttaaagtttattttttatataacatcaggatgcattcgtatctggtggaaccctgcgcgaaaatcaagtttggagaagtacattgagcctcctaactcatctaacagatcctccatgagtggagtaaggtatttatctagaattgtctgcttattcaagcctctataatcgacgcacagcctccataaaccatctttttcttgaaaagcaccactaggtgaggcataaggactagagctaatctggataattctttggccaagcatctcttgcaccattttgtcaatagtatctttctacatagagttgtagcggtagggtctgagaatcactaggtttgccccttcttcaactagtatctagtaatcgaagcctttcctaaaaggaggtaaccatgtaggttcatcaaagaggtccccatcggactccaacagtgtctaaaatgtggtatcactaagggaagtggattcatcaaccgcaatatagagagacatgcctcatgatcagtggatgaatcatggtcataaagctgtagaaaggcgacttgcggctcttgcaagagtaacttgttaagtttcttacctttgatgactttacagctggatgttgaagtacccctaagtatatattggcctccattcagtttgaactccatctttaggtgagtaaagtcccacagaataggatatagtgtagccagccattgtacgcctagaacaatatcccaatgttcaagcggtaaagtactcacttcagtggtaaaactataaccatgcatcctccatgtgaaatccctgcatctataaagtgtcactattttgtcaccaagtgcttcatttactctcataggcttgatcctttataacttgcattttatttccttggctaccttgatatcaataaagttgtgtgtgttgcgtcggtctacaaaaatttggagcttatgcttctcatactgccccaacagacgcatacaattgaatgtggtggatcaattcaatgcgtttactaaatttgttggctgctcctcattgggatctacaacaacattctcttcctcttctactgcaaccaccccttgttcttctaaatcatcctcttcatattccatcacaaagatttgagattttctatgctttaagtgatggcctggaatatatggctcatcacataacatacatagaccttcggttctccgttcttgcatctcatcataactgaactttatggagggtttagtggtattgtttggtttgtatggtggtgttgtaaggttttcagtgaatcttgatgttggaagtagggctgtggtgtttgagagtttatagtagggttggttattgggttttgagtagggactgaaggtggttcgttgaggtttagtaggtgtttgaaggatagccgactcatggagcttggctatagctgcctctgccactataacaattttgaactgtcgggcttgtagggctaggtgtgggttaaggttgttaaggaagatgctgagagcgtgcgacattggtagcgaccaccttgttctggcgcattcaaatttttcccaaaatatttcaacagaatttcctccctgcttcacatttaccaaatcagccaaagaatgatctacaagctctgcgaatctagatgatagatctatcacatattctgatcaagatgggaacatatcaaaccgatcacgtatgtagttatgatgccactccaatgcttttgaactgctcacatcggtaaagccatccacgaaacctgttaccatcaaatgaggggaaccctacctttgaaagtctggtaatcaacccatttggatgcacagtagctttgtcttaatccatcggacatatacccatataaagctgaccatattcgtttaaatcaggaggatctaggggtctcggtgttaacgatgatgatgaggtgagctcaccggaagctaccaagttggagtctggagctcggttgacttgttcgccactctgttgagaaaccaacgctgtcaccatggcctcaagcttttgttgacactggaacaacttgtctatctgtgtttgagactgcattagtttgtcgatctggagggttatagcctccatagctagtttctgctcattgatctatttgtttaaggttgtgagacgagtagcttcggccatttctgcacagagctgaggacgagatagctctgataccaataaaccggataaataatgtcagtaactttccaagtcaagaatccaccgtggattcaggaaatgagcaaacctgaacgcaaaagatgatcaagagaaagaaagatcaccttaggtgagatgggtttgatgagtaaatgataacggcgcttagcagagaagagaaaagagagataagaaattgttcagtcattaggtttctcgaaatggctaaatgcctaacttattctcaaagttgtaccagtcataaaccgactaaatgtaccaaaatagtgactataccaagaaaccatactaaaagcataacaatatcagataattaagattaatcatgtattacaatactgtgacaaccaatgctagcagcaaagtgtttgtccgtcaagcaacaacgacaacaactacagacacaaatgctatgatccaaaaacaagaatcaaaatttgcgaaacaaaaccccaacgacctaagatttcgtgttaactagcaacattttactactatgataacatctgttggagcaggattcccctccaggaatccacctgcgaaaataccaggccagcccactaagcccaccaagcccaccaagtagaggacttgcgcaactgatgagcccacatacgcaaaaggttatttgggcctgataagcctgatcacctgatgaagggaggtaagcgaataacaacctaggaactaacaggaagatattcgcggagcggacctgatatctcgaaactgacctaccgaatatccaggagaatctccgcagatcccggacggagctaccacgtgcgtagacctatgtaaggaagcaaggacgacttggaagggacattcaattcagctttacattcacacttacacttttacacttgtaatctcctttcacattgtaaaagctctgtgataatcaatacaaaagtccatttgttcttaacaatataaatcttaaagttcctgtgaagatctagccctcatttctcataatcttaattacaaatctctagtgtggatttcaaaacccacaacatccatatataatgttttcaagaccaaattttttattcttttaaagaattgatgctcaatctattgacttcttccagtaaacataaaaaccacctcaatcactcctcggcttgcttcagagaatgcttgcgacttgcgagataaagctacgagctctttagaattctcttcctcaacagctttcttcgccattagaaacggctgatagtaatcagagttagtcttagtacaacacttccacatcatctttttgacttctaaacatttagtgttaatatattccttgtccacctgatcattttcctccaccaagtaatcttcaaaagccgtgaatattactttacaagcgcacctcttttcataaaatcacaatacaattacgagagtcacgtgaaaaagtatattttgacccaattatttgcttccaaatttttctacattaccgaaccgaattaattgtattgtatttctttggttttcatgttggacacggtgatgcatatgctaaaacatgattaatgtgcaagtggatggtaagagaatccaaataaaagtaagattaacattacgttcaaattgagtttccggttagtgcttaattactgatttttttttctttttgtcaaaagagcttagtgatatttcataacagtttgatagaaaataaaatctaaacttgttttaaggatcagaagaaaagcaaaagacttctatataaaagatcatttattctcaacgtgtatggcaaaataaaaaagagacacttctatagaaaagatcattttttttctttgtacaaataggatattcatgtcttgattcaaatagtttggtattcattttgaggtgaacgaaaaatctaatcgaagaatgtgacttttatttataatagaaaagatgtcgacaatagcataggataggaagctgtttatgtataataaatacgatatgacaaacttcgaaagtaagataaataattttataaattttaattattagcatgtcgagcagtgaattctcgagctctctggtcaaattggaatctgttattcttgaagagctgtccaatttcaggtacaagaggatcatctgggtttggtttttccaatagtaaaagtattgacagaagcacctgtttgtaaaattatttatgaaccaaaattaatacttaaatgcctaaaataattcgaaaaacaataaacaaaatatctgaatcgagtttgaaaccttttcaaccataagagcaggagtccatttgtctttaagaatgttcatgcaaatcgatccttcatcattgatatttggatggtaaatcggagttttaaacgtaaactgtaatacatacataaacatatttacttttataaacaacaaaatctttaggaaacaattttcagaaaaaaaataaaatagcatatgtgtataaccaaccttgggtggtttaaaaggataatccgtaggaaacttaatactgagattaaacatgccaccttcatagggagtgccatctggaccccggatcactgcagtccattcgtatatattgttcgagttttgacctatataaaaaacatttcatcaccaaatagtattgttataattcagacaaaacaaataaaatgttaaaataatttaattagtttggttattgttacaaatgaaaatattaataaggtttcacacactagatagcctgttattttaaacaaagagttttattttaaaatgatttttaaacaataacatgttttttttgtcatcagatattgtttaagactcaaacgagccaattttgaaaaacattgtttacaaaaatgatatgtagtggttccgcacaaattttttgtgccaaataatccgctttgccaatagcatgttattttaaacaatagcatgttatttaaaaacaaaccccgcaaataaatttctcaaaaagatgtatacctaatcgagcatgttaataatatattacaacataactaataattaacaaatgattatttagaaatatagcaaaggaaagtagctactaaccaatactgaacaaagattctttcgagatcatagctctgtattccatcgcaattctctgcgctgcttttttatccattttcttaaacatctttacgagaaatcaccaaactatttcccttttcatcaaataaaatagaaaaaatgattgttgttacttgttagtttgatggtgttgtaatacgagaaaattgttaaagattgatcaaaaccaaatcacttacttggaagatgtttgtatgaattgtgttggaatcaaatgataaggtctttcttttatagcgtcagcaaattgacctaataaatgtctttcttttttttcctgataattgataagacctaataaatgtcttcattattaattatatattatcatcattagtaagacatgcgtgaaaacaatattgtctacataaataaaagatacgttactttaaaataacaatctattcttaatgaaattatgggacatctatacattaattttgagtcacgcgcccttttatgagaaagggaaaatgcccaaagtcaccagataaaactaatacgaggataattttgatgacgtttataaaattatagaaagtaaatagattttaaataattattagagacttattttttataattttgttgattggtttttttaatatttttgtaagttttccaaacaatctcttattttgatgatattttttataactttattttatgaataaagtgtagaaagttataaactaataacataataatttaatttattaacaattatagattttttgttttaatttaacaacacaaaactttattaattttataaaagtatgaatccaataattctagatttatgaagattttaaattactttttacaaaatcttaaacaaataacactaaactacatcaaaatctttgtataaaaatgattgaataacaacagattttacataacactttaagttacaaaaactttatttaaatcacaaaccaataagacaccctaacatttgaagtaggccaccttttctgataaaagagggctttattaatttagttaatttgatattttgtttgtttctttagtgaaaattttctttaatgaaaattttactcttattaatattaatctactcgaaattttcacagttgaaagggttcattgatcattcatactcctccggactatcaaaaagcacaaacttctaaatattataagagatggtcaaatttcaacatcagagaattaagtttgcaaaaccaaaaccccaagaccaaagattttcatgttaagatattaatatgttacttccaagaacacataaatgatattttaaaaactaaattacccctaaacttaatgatcaaaatttggatcctacaaaaactcaaccgtagatgtaatcagaaaagtctcctcgtttaatagcttgcacttggcatgatttctttaactttcttggtcattagtcattactaactacaataactcaataagttacaaaaaaaatatacaaatgcatgcacttagcctaattgctcttgggaggactacataaagttttattttaatcaaaatgaaaaagaagaacaaaagcgcccgtggcctaatggataaggcgtttgacttctaatcaaacgattgtgggttcgagtcccaccgggcgtgagttgaatttttcttttttatccttttgtcttgaatcagtatatttgaacaaaaacaaaagaagccaatattgctctatgctttgttccctctttccactatacaaattagacttgggcataataaccaagcaaaaagaaccaaacccaaaccaaaatttgaaaatactaaaatagatcctaagttctagaatttatagaacccgaacagaattgaaatagtttagatattcaaaaagaaaaaaagatactcagctacaccaattaggacgaaacatatggtcacaaatgcaaagtttagaaatgtacaacgaactaaatgtattgcatgcccacatatactaaatatatgatgacatgtggtcaacatcacaaacatttttccgatatactaatcgtcaaaatccagtgttgaccataattgaccggcattgacaaacaaaaatattttgtatttttttaaaaattattttattgaattgtttatagtgttgtataatttaaaagaaaacatattatatatttcccataaatatattttgtatatctattgaatacattgattattataattagatagtcttttcaatttcaaaagtaaattaaaagtgaaataaaaaatattaagcgaatttattgtttttacattgtcaataaaaaattagcgtcttattgtacaaatgtttttactaaattcgttatcgttaattttctatatattaaaaataaaactttgcgacctttttttatttagactaaagaatatgtaaatttttctctatttttttaactatgtattatgattttaattttggcaaaaaactttttttttaccatgtaaaatttagacgaaagaatcttctacttaatttattcctaatgaaattaataaaatttattttcatttcccttttaatttagcttgtaaaaaaataaaataataataagaatcatacaaaatatattttagttaaatatagaatgtgtttatctattatacaataccataaactattcaatagaatgttttaagtaatattaaaaataataaaaattcatatatttgaatatttttgttggtctatgccggtcaacgacggttaacatcggaatttgacaattcgtataccgaaaaaagatgtttgtggtgttgaccacatgtcgtcatatagttggtatatgtgggcatgcaatacatctaatttatgtagttggttgtacatttctaaacttggcatgtatggccatgtatttcattatacttggtatagctgaatatctttttccattcaaaaataccaaaaatattaaaataaacttggaaaaatatcaaaaatattaaaatatccgaaatgcccatatatatccaatatacatgaaaatatccgaacagatccataaatttaagaaccaaacaggattcgaaccggaaattttgtggttcctatatagatcctacactctaaaacagaaaaagtcggaaccaaaccgaatacataatagatgtatacctaaaatcgtataaaatactatcctcatacttcatgagacaacatgtatggctgcaagtccaaaatggacgggacactgatgggctacacagtttttctgtaatcgataggagttaattaaaatcattttatttgctgtcacaaaaaactagcaacattttattgttgatactaattttgtatattttatttaattgatgttttaatgtaaataacaaattagtatattatttattgatgtaaatatatagatttgtatcaaaaacattttataaaaacattagttattataattgatgctaatcagctatatttgtcatatttatacataagtgatttaatatagtatcacttagttttgtagtacaatttaagtgatttaattcaacttttttgtagtacaattgtagttgcaccaacgaagttggaaaaaagattagagcacatcttattaaatcaaatttaaaccacactcaaaaccaaagatgtatatagttcaaatttacttcttatcgtactgataaatctacgtttatttcttacatctatatacaccaaatctttttaaaaaccccacacattttaaaccttttaatgtgatgtgaagctatgactccatgtgactggagttaggtctaggaaacaaaagtaaataaaatggcataattcaacgttttctgcccaaaaatatcactttttcaaaaaaaaatctaaactgaagtatttattctaatagatgtgtgattacatagttgagagattgcctaaaataccaaaaaaaaaagatatttgatttcgtattccaataggttccggtcaaatgaaaattttcttaaacgtccaaaagaatttttcggaggctcccagtaaattaaatagagactggaccacgaaaatttgcttcaaaaattaatgttctaatgttttggctgagatgatgcactagttataccacaattttcggtatctccatatatgtatatgtacactctatgagtctgttcgctcaaccttctgaaaatctcaacaatattttctgacaacgcacggttccagatgatgaaaaaatattatattttatctacaataataatttaaaaagttacaaataataataatttaaaagatttttttttattctatcttatcaaataatatcataacaaattttttaaatattttattattatatatatatatatatattaatgaactaaaatatgagaataactataaaatatttttgtatataaaaatatatcaaaattaacctcttaaaataaatattaaatagaattaattttattctataatcatgatgagagagaggcgatttttcttgcgatcgtatctcttcatcttcgcctcttctttgtatcgtttcttgacaagcggttgtcgccggttatcggcggttccttcagagttgatcaacggtattacagttatcaatcgcataactgacgctacccaatacctatttaaactatgtgaatgtctctggagccaatgggttgatcagagtgaaataagccaatttcctttgttcatattaatcatggcagactgcaagaaattgcactaggaattgaagatgaagcgatcaatctcccttttgatttgtgtgaagaggcgattagctaaacccgctatagtctaattgtgaaaccggtgaatccaaggaagcagaacttacgagcaatggcgagtgccttaccccgtctatggggtgttggtgaggaagtttcaagtcgtattctggactcccgtaagatccaattcctcttccaatctgaagattcgatggcgtcggtcctgagacgcggtccttggtccttcaatgaatggatgtgtgtggtccagaaatggaacccaaatcacaccgaccaagatctgaaacaaattcctttttggattcagataagaggaatctctctccacttcctcactgaacgaatggtcacgtccattggaggacgcttaggtcatttcctggaaacggattttagcgctgatggaacgactctcgttgatttcgtcagggtcaagctcctttggaacattgatgatccgttacgcttccaacgcctattccaattcggcgatgaggcatgtatactcaagttccgatatgagaagctccgcaatttttgctcaaactgtggaatgattactcatgaagcgaccgaatgtcccctcggagccaaccttcctccgcctccaccatctgatgatgaggacgacgaaccagacgtccacccaggatgaatgacggacaatcttaatgcagaccaagaacaacaacttaaccatctcacagatagtggtgcagaagaagaaaatcaatcttcctctaagaagagaaagatggagcctactccttcagcagaacacatctctgtgttcccacttgtgtgttgtgagatgaaacaaggttatggtacaaaggaaacagaacataaggttgtcaaaagacagaggagggaatcggaggcacttgaactacgtaactggtttctgatgcaaacgactacaccaacacaatcatcatccacagcagggagattcactcagacccccccccaacaaccaaccgagaaggcacggtgggccagaagccaccggagccgccatgaatacagccttttggaactgtcggggcttaaaagggtccctggtagttcgacgcctaaagggaatcaaggcaacttattccccggacttactctttttgatcgagacaaagaactcgaatgacgtcgtccgagatgtggcagctcaacttggttatgattacgtgaaatgtgtttcccctttgggaattgggggtggtttagccttgttatggaacaagtctatttcagtttctttttatgatgttgatgcaagactcattgattgtaagataagtaataaagatgtgtgtctttttacttctcttgtgtttatgggcatcccaatcgcaaattaaggcacatcctttgggaacgacttcaacgaattgctctaaatcgattcgatccttggttattatgtggcgacttcaatgagatattacatcctaatgagaaaagagggggaagagtaagggagaattggagtttgttggatttcagaaacacagtcaaaatatgcaaagttaaagatctccctttcaaaggaaataacatgacgtggatgggtaaaagaagatctcacacagtggaatgttggcttgacagagcaatggcaaatgattattggcgcgcaacgtatccggcttcagaagtggaatacttggagatgatcgaatctgatcataggccagctatcatacgcattcgacgcacaaccgaacaaggcttcaaaccttttcaatttgatacaagactcacgggaattccagaatttgaagaagtcatttgtcagagttggaataaacatatgcagaataatgagggaacggtctatgagcgaattaaaatatgcagaagagaaatatcggcgtggaagagaagcaacgctaccaattcagcaaatcaaatcaaagaacttactcaggcaattgatgaggctcattcagatcacactttcactatggaaaaaattcgtgctttacgtaaagaattacttcaagcttacaaagacgaagaaattttatagaaggttaaaagcaggaatcaatggttgaatgaaggagaccgtaacacgagatttttttatgctgtaacaaagaatcagattgcaaggaaccggctcacatctatttccgatgtcaacggcacaaaatttagagggaatcgtgatatagccaatgaagcggtcagatattttggtgatttgttttcgagtggtggacagccagacgttagcagtgctctccgctatattcaaccagtcgtcacagaagaaacgaatatggctctgttacatgaaattactgaggaggaaattaaacaagctcttttctcaattggagctacaaacgcacatggcccagatggcttcaatgctgctttctaccaaaattattggaacatcgtaggccccgcaattgtatcagaggttcaaactttttttagaacaggtaaaatgctagaacaatggaatcacacaaatctttgcttgatcccaaagagcgatgccacaaaagaatgaaagacttccgccccataagtctctgtaatgttacatacaaaatcatctccaaaatcctggctagacggctaaagaatgtgatgacttcggtggtttcagaaaatcaggcagctttcataccaggaagatacatcacagataatgtgttcattgctcatgagatcatgcactctctacgagtccaaaaaaggtgtgctaattcatatatggccattaaaactgatataagtaaagcatatgatcggattgaatggaattttctggagggtgtactacgaaaaaagggttttgcgtcacagttgataaagtggataatggtatgtgttcgttcagtctctttctctgttttaatcaatggaagcccatatggactttttgaagcaagtcgcggactgaggcaaggagaccctctgtcgccacaatcattcatcttatgtgcggacgttctaagctcgatgataacacaagcgaatagagagagattaatccaaggtatacgcgttagtaatggaagacctcagatttcacatatactatttgcggatgactcactcttcttcctcaaggcggaccataaaaatagctcaaatctgcttgcgatttttaaagactacgagactgcttccggacagacgataaaccttgaaaagtcgtctattacatttgggaatcgtgttttccagcatacaagggatagcatcatgcagatattacagataccaaatatcggtggtggtggaaaatatcttggtctcccagaacaatttggaagaaagaaaaaagaaatgctgcagtatgtcaaggataaagtccaagagaaaataaatggatggcagacaaagtttttatcaaatgctgggaaagagacattaatcaaagcagttgcgtatgctatgccagtctattccatgaattgttttcaattccctaaggagctatgctcggaaatcgatagcatgattgcaaggttctggtggggttcaacagcgacgaagaacaagatgccttgggtggcgtggaggaagatggcaacaccaaaaaagatagggggacttgggtttacagatcttcatgtttttaaccaggccttattggcgaatcaggtatggaaaatggttcaacgtcctactagcttaatttatcggttactcaaagctagatacttccgggatagctctctccttgacgcgacacgaggctcacaaccctcctatggttggaactctctccgtttcggtcgcgatctgttacgaactaacatacaaataagcattggtgatggtaagaagaccatgttgggaaccgatccatggttaccatccgtaccacctcgagcgcccaaagtgttacctcacgttgatgtcgatactaaggttgaggccatcattgatcctatctctcgccaatgggatgagactaaaatcactcaactcattgaaccggacgatcatcatctcgtctacaaaaactatctaccttagtacccaacagaagacacatacttatggagccctgcaaaagagagaaattacatagtcaaatccggttactggactgcattaaatgaatcgttgaatgatgaaaccccacaaccaccattagcaaagcattccgggttctcatcatcaactatatggaagttagacgtcacaccaaagctaaaacatttcatctggcgttatgcttcatatgcgattggaatagtagagaatcttcgtaggcggaacataaatgttgatccttattgttcaaggtgctgtacagagctggaaacaaatgaccataccattttctcttgtccccaggtgacaatggtatggcgtgcggcaggcttcccgaccaatcatctgagtaacacaggcatctctgtccatgataagcttactcttctcttccagatgcacactgataaaaatataaaccgtttttctcgctatttacctttctggttaatgtggagaatctggaagagaaagaatgatctggtattcaaccgagtcaatagatccacaagtgaaattgtggaacaagctattaaagatacaaaagagtggctggataacaggtccatcgacaaggagcagagggagacaaaccaacaaggagtttctcgtattacgaagtggtgcaaaccgaatagaggatggctcaaatgtaattatgacgccttacatcgggagggaaatcaagattcaggacttggctggataattagagactcacatggcacggtgctacactgtggtatgggaaaatatcaaggccgcctcaccgctgaagaagcagagtgctcagctttaatttgggctttacaagccacatcggctcttggttatgcgaggatggagtttgagggagataacttgaacattaaccgatacataaaggagaaaggttcaaacccacgactacgtcattaccttgcaactatccagagctgggcgcagagcttcacggcgatcaaattttctttcagacctcgggaacaaaataaatgtgcggatcttctagctaagaccgtattatcatatactgatcaatgggctatgtatcagacttgtccaccatttttatggtctcttgtaaaaaacgaacaaacgtaacgtacgtaataaagttttaagaaggaaaaagaaaaaaaaatagaattaattttaaatcagaatttaaattctcttataataatatagtgtttggtttctacaatattacttgtttcacggacgcggcttggaacgcgtcctctggctcttgtggtatgggatcgatttttaagactcaataccaaagagttatccatcagggctcgtcttctcgacttcatacaccttcggccttagctgtcgaagcccttgcgattaaatcggcgttgactgcagcgttgcgaatggaatttacctccattacagtttgctcaatacagagaccacaacgaatgagcttcaggggatacttcatggtattacctgtttgtgtctttcactcctatcttttaaagtctgctttatttcatgtttagctaatgtttcagctaatgcagtaggcaaagagactatattttctttggaattctctgttgtatgaaccttttaaaaatactttaatgaaaattccagtttaaccaaaaataaaataaaatattatgtgtttttggtaattttttgttaaactgctattacaactcttgttagctagttataaattttacgcaaatgtatttttttctaactgctaaactagtcataaattgcttaacaacgcataactagtacatttgcaaccaaccgcttttgcaagttctgcatcctctgctaaactactcaagcgtttagcctgaattgttttttacaaaaacgtttaatacagtaaacttgatttttgacaaataggtgtaacaactcaaactacgatgaactaaaaaaatatagaataaattaatcgattatgaagtgaacaaatcgtcatacatattggagaataatgacctacttgaaaaattattgcatcattttgatcatcaaattgaaatagtccatctcttttttcttttcttttttcgtctaaaagaaatagtccatctcaaaactttaatatataagcttgcttgataggcttaagggtgtgtgttctttgttgcccaaacaaaaagttctagttccaaatatagcggattcattgggctccgaacaaatgagaagagatctattacatacaagtttaggttttagaaagtatctaaaatagtcataggttattgtataacatatgaaactgataattatttctgttttaacttaaaagaaacctttgaatttaaaagtagagataagtaactttgtagtagcgtattatcagctttaagttaccagaaacctttaaatttttgtaaaaaagataagtaaatttgtagtaatcattcccatttatcaaaatgtgtacagaattacaatggaaaaaaataatgcaaatcaatcccaatataaatatatatttactctaatttacaagatagaactccaaaaaaaaaaaaaaaaattgacccagagataagataaaattcaactgtaaataaagctgttgtgtggagttttctttcattcaattcgaataagagaagcaggcatctcatactgcaaagcaaatgcttcgactcggtttctaagctcagctatgtctttgttggtgcataaacttttcacaaactccttgtgtgactttccatgctctctctgcaacgcacttgttatctgagccgcctttatcagaaaatccgccattgtctcgaaatcagactctatacagcctcgggttgtcattgcgggtgtccctattgataaaaggatcgatgtgaatacgaatgtgacatgtcgctaactcaaaaacaatatgcaaaccaatctatctgtgcttacctattcttacacctccaggagatattgtaccattgtccccgaatatagccgtcttgtttaaagtgatatggcacatctcacacactttctcgtagactttccctggaaaacagatacaaacaaaatcagacaaaattttaaatttcgatcgacgagtagttatgtttaggttgagtgatttcagtacctgttaagcccataggagtgagatcccacagcaacaaatggttgtctgtaccaccagtaaccagtctgcattttcttctaagaagagctgctgctaaagcttgggcgtttttcttcatctgttgtatgtaagctttgtactctggagtggccacttgtttcaatgcaatggcaagagcagcgatatggttgttgtgtggacctccttgtagagatggaaaaacagcaaagttgatcttttcctctagatcgtaatgcgtggaagtgtcacaatggctagagtgatggccctgctttcttatctttgggcctctcctgtagaagatgatacctcctctaggaccacgtagacctttgtgagtagtggaggttactatgtcacagtgatcaaatggatttgaacattcctgtagataacaaaaataccaaaccaaattcagaaacaatatttcctggaacagaatcataacaaaagtctacatatacgaatagtttcaaacaatattgactgacacaccaaaaactcattcatcatattatttcaaagtcaccacagaaaaagactttgcatagaaagtaatcaaacaatctaaggtttcaatagaacatagaacaatcataacacaaacacattatatcaatacatggcctaaccaaattgaaactatctaatactgctacctctgacattcaataactagacatgcaacctaaaccattaaaaatctcagaactaatcaacatatcaataaaagtatagtagtagaagattcgaaccttagttgcaacaagaccgctaatatgagccatatcacacatcaaaacagctccacacttatctgcaatctgtctaacccttgcaaaatcccaatccctaggataagaactcccaccacaaataagaatcttaggacggtaatcaagcgccttatcttcaagcttatcataatcaatatacccagtttgaggattcactttataaggaaaactctcaaagaagatggaagcagccgaaatcttcttcccaccaggagtacaataaccatgactcatatgaccaccagaaggcgaatcaagccccataatccgttcaccgggcaataaaagtccggtatacaccgcgaagttagcagaagtacaagaataaggctgaacattaacaccccatttatcagattcaagaccaaacgcagtaagagcacgctcaatacagagattctcaatctgatcaatatattgattcccagtatagtatctagctccaggcataccttcagagtatttattcgttaaatgactacctaaagcttccattacagctctacacacgaaattctcagaagcaatcaattcaattcctcttacttgtcgttgcttctctttctccataagctcatgaatatcaggatccgccaaatgaatcggttgatcaccccaagctcgtacagcagcacgtcgcgattccagatctgaatcaccgatggaacttctcttcggatgctttgattgcgttaacaaaagtggacaatctctttgccttttgagacacatatggtgacctaagattctgaaatgctcgtcttccttttgatctcctcctcctcctccatctttctttggctcatcaacggtggtggtcttctcggctttttgttcgagtaattgtaacggaatcggagagaaagttgttggtaatgatcggaaactttgatcgacttgtagattaatcgaatcgtctgcgattggagctcttggtgttggtgttggagtcattgatgcgtgtgaacaaccaaaccctaattgaaaatttgtttgagaacgactcaaatccataaacgttgaagatgatgaagatttgggatttgtttttttgacctaattcgcttttttggttctgtggatttgagaagaagagaaggaacaaataaatgagaaaggagattaccgggtaccggtaatagagagttatgtatctggacgcttttcaggtttgattagcttatgcggtggaccttgtcgactggtaatagccggtagtagtaggatcgtgtcaatttgatgaaaaaagtgggtttctaaagctaatctagcccaaaaagttagttagattcattttgaccgatataaaacgttttttgttagaaaaattttagatttcaaagtgcaaagataagttcaaataaatatcttattatgcaactatgcaagatcagcttttgatctccttaaatagttttgtcttactttaagtaattagggtatgaatggatgataacaaaaaaaaatagaaaaaaaaagttttaccaataaaaatagaccataccaatagcatcaagattttggtaatgctaaaccgcatgaaaagtgagaagtggacgaaatgggatggagttggactatggtatattgtatgtattagagtagatttgtctttgaatattgaaacccggactagtatttgcctaaaatatattgattttaataaatttattacagttacaaactaaaatttgttattttgattcttgcaaatatatcggcgatagttttcgcaaatgtttgctacgtaatatatgtctattcttttggtttgatatatgcatttggttaatttgtttcgttttatgtacgtatttctgaaaaatcttaacaaaatttgtatataaacaaaataacaatgaccgccagaatgtatagacgactacctgaatcactttgcattgcgtgttggtccgctagttacttagcagctgaaaagcaaggcaaaaaagagaaaaattaatagccataagacttaatttatatttaatattaaaacttacgatttccaacaacagtaacgtcaattttcttatttttaaaggaagatgtacagatgactacgaatatgtttctctataagcataacaacaactgggataatatgaatttgaccattttttcccttcaattttaaaaatcaaaccaaaacatgtatgatcttttggactgtataatcttttgacaatttaacgctctcaaagtcccaaaaacaatttaacgcttttaatgaagggaagtttcgaaaatgtacaactaaataaagtatttttcatatagaaaatgcccctttataaattcgaaagattttaattataaatattcttcatgtagttttcattatgtgcgctttttactactcatgtatttccaatcttatttattgtttaattggtaaaacaaaacattatctcacttatacatattaatggtttataagtatttaaaaacttagttaacatatattctcttaaggttgatttttttattacaattaccgatttaacaaaatatttttgaaaataaattttatcattttctgaaaaattgttttgtacagtctcagctctttattataactctttgttatgtatttttcactaaaaatatttataagttcataaaaaaatgtttacaaagatcgtgttttaaattatatttctttctgtacatttttaatcataatattgttttaacaatctttgaaaaagatttatagaaatattcatgaaataacataaatatttgataaaatttatgtaatactccctccgttttaaaataaaataattttgcacataaattcaaaaaataattaaattttcgtttttgccctttattcatatatttataatttttttattagtcaaagcactaaaacaatagggacaaaactaaaatgttttccaaacatctgaattaaaactctaaaacgatgattattataaaacaaattttgagttctaaaacgatgaataaactaaaatgatgaataaaaacgaaggaaatatatcaatattttaatatataaacacaatcaagaaaacaaaaaatttgttgagaatgagttctctcacactcgtaaaaaacatatttaactgtttacagcggtgatgtagaaatgtagacgtgagagctagaaacatccaaaagcccagtgggctattataagcccatacatgatatatcatttttttaacatcatcactcgatttgtttaaagacaaaaccaaaacctgatctcaaaaactctttttaatttcagtttggtcttttcgtatcttcttcttccacgtaatcaaaaattacaaagagagagagagagagatctttgaaagcaagaaattctaatccatggaatcatctccttcgttccttgacaatctcttcttcttcttcctcatacgtccgcttctggcgatctcattcgtcatctgcttcatcgctctttgtactttctctcctcaaacctgaagtttagatctttagggctctttgatcttaatttgaaaatttgactttgtttttgctttggggttttgcagggtggtttctagcatggaagcttgtattaagccatgttcctctagtacaagagatctttggcttgaggaagaaaacctttataccaaaacctgaatctcgtggtcgaatcgccaaattctacaaaagtatcagttctcagaatcctgttccccaatggtaattactctttgaatcatgttccccaattgagccatattcatcttatttacttggtcttatggactcattttttctcagaaatcgcaagctccgaggtttatagaagcttcgatgatccgaaaaccgaacgagtaagaggatattcaatgtcacaatccagaaagattcaagttacagttttagtcactaaaagagttctgttatgttgttgactcttttatggtgggggatgtgtgcaatgtagtgtaacaacttgtgtagtgtgaagtatttcaagcccaaatcttgaatcactgtttccttgttgttgtgtgagagatgctttgattcatgaatctggtgataaaaaaatgatgttttcaccatcacatactacaagaaagaacatgaaccaaagtcatataaatcgtaaaacatgaatcataaactctgaagccaaagaactttctcattagacattgttgcaattttggtatccctttgataggtgaataaaaaatggacattagcacaagacattgaaacttttacccgacatcgaactcaagcagaaggtgttatttcctcagcagctgaaggagtcttcttgttgacgggtcctaaagaaactttaacctttgctggtctcagaacacgatctcctagaacaaatcccttgttcagctcctcggttattatccctgctttaaccgcctcagattcttcccgtgaaatagcctcgtgcaactacaacaaaaaagggtattaccaagtcactcaaaaccctccaaaaaactaacattacttctcttatcatcactcattcgcactcatcttaatcatgtaaccaagttgtctgaatataaatccttctactacatttcgcaaacacaatgactgactctgttatcaattccatgtggataagcgccttcctagtgatgcaacaaagagctttgacttaaacaaaacaacaaacattactcttattatcattactcactaagcacagacgaatcatgtaaccaaattagaataatctaaagcttcctacaacattttgcaaacaaaatcactaactatttctacactagataagcccctacttagtgattactcctcttatcatctcactcactagcctcagattcttctcgcgaggtagcctcatgaaactacaacaataaagggtatttgctaaagtcacccagaacaccaaaacaacaaacgtttttcatctaaaaacacactttaagtagccatgctgctttaccactcactcggaaacaaaaatcatataaccttatgttgtgttaaataaagccttcaactacatttagcataacactagtcctcttatcatcactcactaagcacagaagaatcatgtaaccaaattatcttaatctaaagccttcttctacaacacttggcaaacacaatccataacaaacttgctacactcgataagactataagcccctacttagtgatgcaacaaagagatacaacattcttccatttcaatagcttaaacttaccaaaggatcaaaaggcttgccaacagttgcaataaccgaaacacgaagatatctcaaaacctcaacaaattgcctataaatcccttgataactcgtatcaatcttcttctccttatcagtatcaactctaacctgtaacttagctttctcaaaactatcaataataggtaaaagagacttaagaatctgaacttttgcattagactctgtactaagcctatctttatcaagcttcttccttgtattatcaaaatcagcttgtaatcgaattttcatctctttctctgaagctatcttcattgataaagataaaaccttttgatccattttattcttctccttctcgattttgcaaaacatcgtttcgatttctgtaactgaggtttcgtctccgttgagaagagcttgtttatatgacctaattagggtttttacatctgcttgctgctttgaattcgcttcttcactgttattagtctacaaattataacagattcgaattagaagaagctttaaaagcaaagaacatgtaaatatgctgaagaagaagaacttacttggtgagcagagaagattgggaattttcgactgggttttgaaatgagtggagatattggtgaaggtctgccatggaaatggaggttgtttcgtaaaggtaaggtttttgatgaagaagatggagaggagaaggagaagcaaggagatatggaaggatcgattgcgaaagaaatcgccattgttggatttggtagtagtaatctcagtgagtcccaaaggaaaaaattctcagggcacaggcaagagtaatctcaaatactcatctgtaaggacagtaaggacatttccaatggtgacttttaaatatatatattttttaattagaacatgtatattgatagttttagaagtttttttttagaacaaatcctaaagaaaaatacaaaaaattaaataaaaaaacataagtttgttaaagaatacacatgagcttaggattttttgtgtttgttaaggactaatacgtgtcagtgtgattggtaaggagaaagagattgttttactattatagatataaatgtgtatatatatatactatatctcaacacataaaaattagagaatctgatttaaagatgaagctggtgattgtaattattacatgttaatattagcgtaataaacataattattacgtaagaaaaaactttttaattttgatttataatcacataagatattattcttatttgagtagctacagaaatttaggttggttaagaagtggattgagcagtgaaaataatttttctatcttttatataattaatagggaatgttccgtaataaggcactttgaaaaaaagtttagacaaaacagacactttccaaggttgagacacttttccttgtttttggagtgaaaatagaccattataccccaaataaactgaatcacgaaaagaagaataaccggtcattggttttggtttgtaattgtgtgtaccaaacacgtgtagaataatgggttaattcggatcaaatgaacgtgttaagatttgcagtttaaatagaagttaatgagaaataatgaccgtccgatcatataacaattaaacggacgagaagatggatttatctgcaaacataactaacttgcgttatgttaggtcttcagagattggtttcacaacataactaacaagactttgatagcaatcttatgttttctgtaaacaattaataatagaactaagaatgttgtagtaaaaattgactgcttttcagtaataataaatatacatgttctagttatttagttttatgcctacctgattatccacaacatcgtgtagatccatatcttgatagagagagattttatactgaaagatatgataatgatgatgtgaaattatgatactttactaagacatatttacaaatgatagatagagtgcatcgatagacagttgtagatgataagaaatacttccattggagataacccaactttgggattatgtgtgggagatgattgagtatgttggtcaagtttggaactggtatcaaatactagatcaccaacaaaaattgatgcctccaataagaagattatttaaatatctatccaaaaaatactgtccaatattacaaggactgtaaatcataaagataatttagtgtacatgtagaccttcatttgttcattagaattttttttcagtttggggatctttcaatgattgggatgcaggaagcctctccaaaatgttctgattgagttgaagtagaaatgaagatggtcagaaaaaccataagaaacacgaccttcaataaggaaaaaatgtaagaaagtatccaaaaaatcatgtccaacgtaacaaggagcagacgattaataaaatttggtaccccattgtaggtttgttgacttggatgttcccacttgtatcgaaaataggatctgacacaatgttcataacctaaattttgtttttaaagtaaattagtcaagtaatgacttgcaaactaaggtggggttttaaagtaaggagtgtccaaacaacagtaccttcatgtttgcgtatgaatggacagatttctttggatgacatcaataacgatgatcacatgatgtgcaaaagcaactctaactgatgtattcacccactcgcctaaagaaattaacaaagttaaaagtttgatattatgtactctaaggttttctattgactaatcacattataatgactaattatatcaacacaaatggataagtcaaattactcttttacaacttcataccagacaatcaatgttgagtagcagtaagaacaaagttaaatcaatatccaaatctggccatacgatcagctaaagctctagcatccaagcttacatattatttcttaaatcaatgatttgatttcttccaaaatataagattaagaaatagaacctttatgtggctttttccttgaattatcaaacaccaagttgtgcagtcatgtatagtcgtggacaatgattttcaattttgtaacgacacatacgctgcaaacaaaatgtgtggttgtccattacggattgtccaagtgttgtagtccatatgttcatcttctgtccaatagagaacctcaagtactgaatttcaaacaaactgggcagagaagttatcaaacattatcacagaattacgaacaagatctccgaagtcaacatgacaaaactttaccttagttgttccgaaattcttgaacttttctcgaagtaacctcaattgaaattgaaattgagtttggacggtacgagttaagggtttttcaggcaaagtaaatccaaatcgatttaagaaattgcagagatttagaggaaatgacaagagaattgggtttggtgttttacggttgaaagagcaaacgagagtgtagtgtgaaaagcactggtggtggacagtgacggaggagatggatatcccgtcgccggagtccccttttcgagaaattgtaatttaggattttttattggatttggatttttacgattctggaaaaaaaattgaaatcacaaaggcaactacaaaatcgtgggctccgtaaatctgaattggtttagtgaaaatggatttgatttgtttggttatagaaaaccgacgatatgagggtgaacaagtaattttaattattcaaagtgcctaattacggataaactttcaaaaaagtgtctaatcacgtaatattctctaattaatattaactttgtatcatttttaaacaatgtgggcaaaatgatagttatatcaattatttaagggaaatttgcaagaataactaataaaaaattataattcattaactaaccattctaactatgtaactataatattttttgtattatatgtaatattactaatttgttcttgttgtctcaataccaccattagccaccaccaccgccggtgaccattgtcggccatcaccaccaactccgaccaccaccaccatcggccgtcaccaccgtcggacactaccaccgccgcggccaccaccatcgaccaccaccaacaccgaccatcatcacctccgaccaccatcaactccagccaccaccaagaccggccaccaccaccgccggccaccaccatctgcaacctcttctactaccaaagaggctaatttagtaattatagtactctctagtattagtttctgcattttgcatattatggtgttagtttcttaattaacttgtgttagttttgcaattcacccatttttaactgatatcaattaacatctttaatacaaactaatattacgtatcatttttttaatctaattgtttttcgaatttttcatatatatatatatatatagttttacttttatgttatgtatgtttacaattttaatatttctaataattattatgttttgtcaaataaaaagttttataatattttattttaaaatatatataattttttaagaactcacttaaggattctaccattggacaatagaaaatgtaaaaatttaacaagaactctaaactttaaattattcaaaatttattattataaacacataaagagtacgaaattaggattctctaatagacttgctcttagagtttctttaaaattgaaggtaaaaatgaattttcgtcttgaaaatccctttttgtcgatgaagaagccaataaacccctgcgaaaaacagaagtgttttttctttttaattttaaatcgaaaatcaatgatattactagtatttctccatccgaacctaacaattacacgcaaaaccatggtccgtttctgaacctcttcatccgaaccacctttactttttttttttgaaaatcaaaaaatcaaatccctaatatttcgagatatttccaatttcgaattcttcttcttgtaaacgttaagcttttctttctatatctctcccttctccttttattcgggtaacctcataattcgtaaccgcattgcctctttaaattgttcaatctatcgatctgtcgcgaagagaagtcggagaaagatgccgcctaggacgaagaatggtggagagggtcaaagaaaatgaaagaaagaagcggcggctccaaaaagaaggtaccggaaacagagccggcgccggctctatcggcggtactgttgttgggacctccgccggctcgaacgactaagacggtggttgttgatgctacgttttatgaagctttaaacccgattcctgatggagaagagaatgagcaaactaatgagcaagatgagaatgaaagtaaacgaactgaagaagaatcagagagtagtagccaaatcttgggcttcgattacaaatttgataacactagattttaaccattttaagcccttgtttttcatgcatttatcttagtttcatgtctcttttcatgcattcttagtctcttttccttcctttgtacattttgcattgcattacatagcatacttgcatttggagtgttttacaggtaaataaggtacttttggactcaacttggacatttctagcacaaagagtggactagctcgagttcgtgggatcaaaggaaggacttggagtatactcggctttcttactcggctggagatcgagtggagcatacaagggagaagcaaggactatactcggccaagacactcggctgaagctcgagtggtgcacatgaggaagaagggaagctgctcgatcaagctactcggcctagacccgagtgatgtgaccaaaggaggctactcgacttttctactcggccaagacccgagtgatgcaacaccaactttcctattttgtctttttcccaattagggcatcctagtattgcctataaatagacctcttatgtttttgtccaaaatatcttagctttgtctgctggatattagggtttctagattttttttgcattttctggttgttgtgttgagaatttggatttgatttcttctgcaaactcgtttatcttattgagatctatcatttgctaagtttataatgatttctgggttttatgatttttctgagttttgttctatgatgttgttcactattcttgagtagtattcttcagagttcttgatggattcctctattctttagctagctaagtgtttatatgcatgattcccttctgtttttggagttcttaatgctattttctttctgatcaattgaaaattgatttcagactttctccacctaacaagtgtttgatgaaatgtctgaaccaactaatttcagagatttgtagattctagcccaagaccttggatgtttagactgcttattgactttaatagatttgtgtttaaagcctgctttgttatgtttcatcaatgaaaattgagattaggaagttataaagttatgaggatcattgtcacgaaagtggattgatttggttttgaatctattgtctagggatagcttgattgagtttgttagttagctaatggattgaggagtccactagaaccaattaccccattcttaagagctctgtttcgttttattgtgcaaaactcgtgtctttagtactttgctcgttttgtttagttctcgtgcaaaattggtgtttttagtattgtactcgacctgtttagtagtttgctcgaccgagtgcttcactttgtgcttggtttactttctggttcttgcatttgacagttcctggtctttagtttcatttctgctcttgttatttgagtttttttatcttctgcttagtatagttccgtttctgaatttgatttgcatgttaacctattgcttaggtttagtagaaacacaccaaacctattcacacttggcttgacttagtattctctgatcacatcctgattgttagcaattaaacccaattggattgacaccttaaaagctacaatggcataagatgcatttagggaattgacacacaaaacccttctatcaaaattagaggagacaaacgaggacgtctcaagcgctaatcgcgtggacgaggagagacaagaggatgaacttagcgctagtcccgtggatgagagaaaatggtttgaaactccctttttgtcgagagaaaacctcatatctccatgaaaaaacagaagcaatttttgatttaatttaaattcgtaaagtgatgattttaccaagataccctaatcgaaatcaaacatttacacactgaacctggatctattcgaacccagacccgacccatatctctaaacgaatttttctttggtttctttttcttttcaacttcaactcctcaacgacgctccactctccttatttgaaacttctcatttccgatttctcaacctcctcgacgcctctcctctctgttctcttctcgacaactaagaacgagaaccctaatctctcatttctgaatcctaatcttctccttctataaccctaacttcctagccattttctccaattctaaccctaatggcgccgagaacaattcctcctctaaagaagaggaagagaggagtagccggaggaacaaagccaatagatgctgtcacgaaggcaacgaaggagcctccgacaacgacggagaagccatcagcgacggagcaaaatctggtcgcaattgagggaggaagagttgaagaagaaccaattccgaccataatcccgaccgtagtggaagaaggagagcagtctgacaacaatgagaaagaaaattctgagaaggatgagaaagaagagagtgatgaagaagagaaagaagaagaagagaaagaagaagaggagaaagaagaagaggtttaccggaggatagtcctccgatgatagtagtaaaccttgggcgaagaaacctcgtccgatgagaatatggatgatgagactacagtggaaaatcaagtggaaattccggcagcaatgataagtatttctcgagtatttgaatggtatgaaactagtagaacaggataatactatcatttctggagaatactgtcattactaggatataactatgtgtatgaattttgggtaacattggtagtactaagatagaactatgtgtatgatttttggataatactgtcattactaggatataactatgcgtttctgggtaatactgtcattacttgaaaacaactacgtgtatgattcaaggtaatactgtcagtactaggatataactatgtgtatgattctaggtaacatcggtagtaatatgaatgaatatctgttgcaggagatcgacgaggaaatagaagcaatactgataagtgtgtattttacatgttttgagcatccatttgtcatcactttagcatcatatcatcactgttttataccatttctcatcatttgtcatcggtttacatgtttaggatagatttgcatgcatgttgcatatttgcgttgatttcagctgatttggagatgttgacgagctatctggaagaagcggacctgatcatgtcaaaccactcgaccccgaggtcgagtaggagcttcaagatctcaacagatcactcgaccccctggtcgagtagaggacatcactacttcaccacatcactcgaccccgaggtcgagtgtcttcatcccatcacctgaccatcactcgatcacatcactcgaccccgaggccgagtgtcttcaccttcattgccagaccactactcgaccccatcactccacctggaggtcaagtatcaccatcaccaccactcgactgcatactcgatgacaagcttcagagccttcttcattccgcactcaaccagacactcgagcacaaggaagaaaagaagactccagctattcactcgacctcccactcgaccacatgggtcgagtacaattcttaatccgtcccaattctcagtatgctaggtgattgagtattggttgatagatcccttctggattaattgttcttaatgcctattgctttctgatcaactggaatttgagcccagacatttccgcgccgaaaaggtgttcgatgaaatgtctgaaccactaattccagagattcgtgaccctgtaccaatgtattggttgcagggagcgttttggctttaacttgttgattcgtaatgcctgttaggttagctctcgtcaattgtgattgagtctgggactaggttaacttgagagtctctgttgcggtggcacttagatttggttaatgaacttgttgtctagggttaatttattgagcatgtcaatcacctgtaaactgaggaaacgaaactactcaattaccccatctttgggaattctttatctgattgaattctttgtttactctattgttgtttactgcatcttgttatctgtcgcttaatttctgcaattctttcttgttactcgacctcatactcgaccacccagttgtttggcaacagactgtgcagtcgagtatctgtgttttattttctgtctgttactcgacctgtcactcgacctcacccagtgctctgcaaagagctgtgttggtcgagtgttttactgtttctttttgattttctgttttctgcatgttcacttaggactgctagaacaaaccaaaacctgttattgcttggcttgacttagtgacttctgatcacatcttgattgttagcatcacactcatttggattgacaaccttcagtactacaacgacatgatagtgctttaggtttaattgacttaaaaacctattatcaaataccaccgctgagtatgtatttcccgccctcggaatatgtgaagaaaatcaagcaatgaactcggtgctatattcacgaagtgttgactacattcgataagttggagccggagatgagcaagtccaagagggcatggtttgagaaccatccaagtttccaacacatcttccacatgccaagagtcccaaaccaccgacttatggggatgtggatgttccttcttcgcacggcgcgcattgaaatgaagaaagaagcgtggttcatcgtcaatagcgttccaatccgatatggtatattggaacacacattgatatcgagcttcaattgcaagaactatacacttggatataaaaatacgaggaatttggatttcaagaagaagcatttcaagaatactgttgtgaaacgcgaagacgtgatagagaagctcataggaatggtactagcgggtgaaagataaaaagaaaggttgagaatgatggtcttgtatttcttaagcagcattatcatagcgcctatcaagaccagggataaggcacctcaagtggatgaattttgcctcaaggctgtgagtgatctcaagttttgtaggaatttttagtgggggaggtattctttcggttacatgctgccctgcttggaaattcttgtcgcaaagtcaaaccgataccgtcttcccattctttcttaaactgactagattctacaacaggtggtggctcaacgtattcatcaccagtatcatcatcatccctatcatcacgtgatccaatctcaggatcttgagtatcatcaacctccgctattgcctcattttgttctgttccttgtccctccaattcgcccatcacgatggttgcattatctctcatttaatcctcatttgaacccaaatcagcatagttcttaccaataaaacttttattgatggcctccactctcgacagttcctcgaacaatttcggtggagtgatgacgtcaacagtcaaagaatatctactaaccgtttcacctgaagatatatagacaccgacatcctcatcatcactaatgtgtatctcttgagttggtcccaacatcgctgcattgtacttcatttgcaatttaaccttactttcatctaatccaagcttcgagcaaatcctactttctaacatggagagagttattttccctcctggtgtattcatcatcaagctgtacgctcgatctttccatctaaaatatatgatcaccttctccaccattgtatcctaagacaacaatacaaaaactctgtcagttatactagttatactacaactctgggtaacacaagtataactagtcatactacacctatctgtataatacatgtataactaataatactacatgaaaattggtaatacaactgtaccaaataaatactacatgtaaatggttaatactagtgcaacaaagtcatactacatatatattttcaattgaatcatgtgcagttatactcagttctaccagatgtatttcccgacaagagctcaaattgaatggtttcgggttcaaaactataattcactatgattcagttgttgtaatctatttcttatccatttacagatctattcaacctatacagtatgcataaacttccaatgtgcatacccaaacacaatttgcttaatcttaaatctaattgacaaaatctcttagttctaatcttcaattttaagctctattcagctcgaaaaacataccttttctttctacgtcgacgaagctcaccgaagataaggatatggcaacaatggtgatgtaaatcgaattccggcaagagagcaatgagtgagcgaggagagagagtgagctcgagctttagaggagagagagagagagagaggagaggagagagagagagtttcacggattctgtttttttttccggtttcaatttttttttctttctaaaattatttaattttaaaatgaaaattagagaaagaaggaggaggggtaaattggtctatacacatctcattaaaagagaaagggatatagagatagtaagaggagttgagagatttgttgtttgcagaaagggagttatgagatcatttctccgtggacgaggagagacaagaggacgtctgtaatgccactatcgtggaggaggagagacacgaggcggtctcaatggaggaggagagagacgaggacgtcttagtggaaaaacccgtggaggagaagaggagcaaacacgaggacataaatgtatttggttcaaatattaaatataaaataaacttttatatgtataaatctatgaataagtatatgtaatttcgggtaagcggatactctttcgggtatcgggttcagatcgtgttttaccctatacccacgggtacgacaatctaagacccaatagggtaaatagctaatacccatacccacctcgaactgttttttttcgggtcgatttcggttcgggttttcgggtatgggttttttgcccaggcctacccgtgatgagccgcggtatacacgttccgtattccctttatgaggcttgcatttctatcgttcatgaagaccaattcagaagtatcgggtacaaccgtttttagcttctccaaaaaccaatcccaactagcatcattttcacctttgagtacgccaaacgctatgatgtaatggtaatggttagggtcttgagccgaggcaaatactagcacaccaccattcaaatgtgttgcatccacaattataactttcctcatcactttaaagccttcaatgctagctcccaaagctatgactaggtactaaaatttatcattctcatccaatttcaaatatgttattgtaccatcatttaccttcttcaacatgtacaaataactattgatatctttttagctttcttccgggctaccttttaaatcacaaaccgcattatatttcccccgtcgaatatgatactttcacacctaatttcgtcttaaccagcttcatgataacccttgaaacctgagtttccaattgtcccgaaaaatgatcatgaagaagagttgcgactaattgttgattgcctttccttttcctgatcctactactatctttacttagccgagtgcaaatttgcatcttattgtaccttctaatcgagaagaatatctgtattacagatatttgacgctcgtaaactctagacaattgttcgggcaattgctccggcgatttaaagatctcctccacaacaaaaacagttcttgcgtttttttttgcggatgttacataagtaaggacatcctcatcatcataaatgttcatctctttccctactccgaacaacggtgggttgtacctcatatgcaatttaaccttatttccatataatccaagcttcgtcaatatcctatcttctaatatggagatagttatcttctcccctaatgtcttcatcatcaaactatacatgcgaccttaaaatagatgatcaagttctctctcattgtatcctgccaaaacaatacacatactcagtcaatattactaatattaccggctctactacattttcattaatactagtcctaattatgaaatactacatgtgtcagtaatactaatacataaatgaaatactatatgtataagtaatactaattctattaaaacatactatctatatataaaaaccaattgtttaggtacaactatgcctagttagaccagtattattttcgcggcaagaacaaagattggattcaagttcaattcagtacgaatcagcatgtgaaatcaaattcttatccatttgcagaccaaatcgaccctaaaactatacttaaacttctaatgtaggtactaaaacacaataacccaaatctaattggattgaatctcaaaatcctcaaatcctaagtgaaagctctttgtagttctagaaacatacatgaactccgtatctcgatgcagcttgcaggaagagaataaacgacaacaatgcagcagcgagagagaggtgtcggagctcgaagtcgttggagaagaaggagctttaaacatatcgaataatttcttgattcttttttttttttactctttttttcctttttaattttaattcaatttcaattattcataagggtaaaatagtattctcactaatcattaaaagagaaagggatatgtagagtagaaagagatttaagaagttttgttgtgtttaaagggaacatgagagctattcaaaaacgaaacaaatttttttcaatggtttcctttattttctacttcaaaaataatattttaagtatattctatctctattttataattaattatgaataataccctttactttctaaacatatgaattttgacctatttatttgatttcatttagaatacattattataaaaaaatcacattccataacatttatttaaagtacgttgtttttccatttaatataaattattttttgtattttagtttgattggattaaataaaaataaatagtttgtttaataaaaaaatatactttgttataattttaaggaccattttgtaaataaaaaagttcattcaaaatatgaagatgtgaatagtataccttcaaatatgaagatacactattgaattcttcattttgaagataaaaatgaagcaccattggagaagatttctctatcttttacttcaaaatgaagaaaaatgtgaaatttaaagcaccattggagatggtctaaaaaagaaatttctttatgatttttttatcggtaaaagaagtaaatgactcaaaaagctttaaacatatcgaataattatgacccaaccaacctaaacggatcgcaaaattacacaagcccattttattcgggtcatatctaataaaacctaaataaaacactttctcactttttctctatggtaaaacagatcgacgacttttttttttccctttcttccttcttcttttagagaaaacctaggtaaaacatatcgtcaatcttcgtcaatgccatttgacaaaaacagatctatattcatttctcttatatttcttcaaagtcgatcttggtaatatttgtcgaaaactaagatattgggtaagttaaaattcgagttatttcattttgggttttgtgattgaaattaattaaagtagagtaactcgaagtgctaatccaaatgattttgtttgtaggtctggagtaatggctcgaacaaagaacgcatgtgtgccagcggcggcggaggtggtttcagacaaaatgaatgatgaagtagtagtactgtcggctggaggttattctgaagcaacaaattcaatttctaacgatgattcaacgttatgaactttaaactttacacaactagcagattatggtagaaatttgttgattttgtaacttacaaaattctgaaactaaagaagtataactacgtatgaattaggtatatctttgttgatattgtaacttagaaaattctgaaactaagaagtataactatgtattaactaggtatgtctatactgatttctaccttaaaattatatgattctaaaaagtatatctatgtataaattaggtttatctatgtttgaatctaacttaaaaaaatttcgaaactaaaatgtatatctatgtataaactaggtatatctattttggaatctaacttaaaaaaattctaaactaaaaggtatatctatgtaataactaggtatatctatgttcgaatataacttagaatttttagagactaaacggtatatctatgtattaattagatatatctatgttgatttttaccttaaaatttatatgaaactaaaagtatatctatttttgaaaataaaatgtatatctatgtataaactaggtatatctattttggaatgtaacttaaaaattttcacaactaaaaggtatatatgtataaactaggtatatctatgtttgaatataacttagaaattttagaaactaaaaggtatatctatgtataaattaggtatatctatgtataaattaggtatatctatgttgccttcaacctcttaaaatgttgtgagacccggctctctaatgaggtccaataacagcccaacttctctaatatcaaaaacctaatcgtgaaagtgtgtgtgcatacgtatgtatatatatatgtgcttatatctccttcttcgttatgccgtcacctccatgtatccatatcaaaacctgagagaagcaacaacaatcgttccttgttgtgtcacttgtaagtcagcagcactcgttcattgttgttgtcacgttgtgagccatcgctcatcaccatcgatctctacgttcaccggagtcatgatttgttctcattgtttttgggttaggaaaggaaacctaaccttatgttgatctcttttcatgatagtctgtgtagttccttgaggattaatgatttactattcaatctatttggatttttagtgaagaagaggaagaaagatatcagttcaggtagacctattcgtgagcattttcctgtccaatatgaaggaaccagatcacgaatttaatgttgttggatagatttcacagtgatgaatacacagaaacaaacgaatcttcgttacgtcgttacgaggtaaactccacccgcaaattctagttgaaagttggacaaaagtcacagtttcttaacccaaaataacaaagtatcagattttagattcaagttggcattttcgggaacagattccggttaactctaattacttaatgacaagtcgacggtggataccgatagagaaagtgttaggaaagccacaggacccttcatcgtcacaaggaaaggtataccctacctgccacgttgattgcttattgaggaagaatcacctcttttgttaaaactgcagaaaccctaatttgtctttgtgatgttttcttctgctgcaagtttcagattttgtctaggcatcttcaacatctttcttcaagtttgcgttctatttcgagttgccaaggtgagggcaggacctgtggaaacatagcatcacctttctacttttgtacttctgaagttcatttgtataggattagacattgggtgcagattgttaaaatgttaggaattatatttaaaatattataatacgtgttgtgtgatattatgcgataggttgttagcgtgatatgcaataagaggaaggatcaaactaagggcgtggtcttccataagaggcttgagtagccatgatgagttaaatgaggcttgagtagccataagtaaactacctaaactgaaaaatgaaagtaaaatatcttgcggtgtgcaagacgaatgtttgactgttatagcttgctacgaaaacataagctatatgcttgttgtttgattatatgcttatgaatggaagttgtgtgaaagtataaatgtgatattgtgcttcggggggcagttttgaccgcctcactaagtaattaattactcacccctttttctccattttcccgggtgaggatgagaatgttgagtagctgtctcgtttatagtgtatttcagaaactcggttttattaaatttcagcgttattttattattatcaacttgttttcaattaagttttacagaggtttctcaagtattttgatattatatttaagatgattatcaataagatttaataataaagaaaaagcgcgccgtctcaaggttgagggaaacgagcgttacaaatagtatcagaacggaggttatagttaagacggtgctgacccggaagactaattttttctttttaaagaaaagatttttataatcaattttttagaaaaatgttttagaaaataataataactttttagtacttgataaacgggaaggggatttttctaaaggatacaaaaagcaccaaatgagcgagacttgtgtttaaaagttgttgagtaaagtgtcagttgtcgtaggggttctaatgttcagtcttctataaacagaaaatgttgtcaagaagatcaaaacgtcctgcgaaccctcacggaaaccgagtaacgaatgcaccagttgttgaccaagatcagccacctgtggtagctctgccagctcaggcagatcagacagctaatgcagctcatgcagcagagattgcagcgaatcgtaccgagatgcaagaactctaaaacatgatgcgtgagattttgactcgacctgcgtatgcacccccaccactgccaccgacatctggagttgctgcaccttagcaccattaaccaccaccactggcacctagggttaaattacctcattactatcagccaccaacaccgcttgcacgaaccaactatttgggacaatgaagcttgtgggtaccatgggaacatagtacttcagtggtggatttggtcgaatttgcgctgatgattggagacagatgttggagaaaaattttaggacaacgaggtgtccggaggagtttaagaaggatcttgcagtgcattacttgaggggggaagcagatcattggtggaaattttttgagaggggcttgcctgttggatatgtgtctatggagctttgtcagggcacgaagattgttcgagagtatgatgaggagttcaatcgtttaaggaggttctctatgaagaattttggagagcaggatatgattcagagattcatgagagggctcagggatgatattcgtactcgtacctccattcgagggtgcactagcctggttgagttagttgaggaggctgctaggttggagagatgacttgtggaggaagctatggatctcaagagggctccagcaaaggtaacaaaagctgttgaatctcagaagcgcacttgggataatcgtggtgcgggaccagggcagaatggtcagcagtgtgccacatgtggtaagaggcacagcggggcttgttggagtaatactgggatatgctacaattgtagacaaaatggtcatacatggtcgaattgtccagggagagacaataattgcaagagatgtgaaaagcctggccattatgcaagggagtgcactacgtttctagttgaagggaatcagtagaacgaaaatgagggggaccaaccactccctaagatacaagctttaagatctcgtgtgtacgctataggagaccaaaggattgatgttgagaaagataaagtttgaaattcaaattccaaggtcgtacaagttcatgttggagtaggcggtctaatcgttttaagtgacaatttcttttaggaattcattctattttttttatattagagtttcagttgttggcttatgcttaaacatttttattcatttttttaatggtcaattgaattgttttaaatttgtgttgggaattaacaaagtttttctaaatgcatgagtggagaatatagtcgaataagaagtattgaattcggggacgatttcactttcagtgggggagaattgtgagacccatctctctaatgaggcccaataacagcccaatttctctaatatcaaaaacctaatcgtgaaagtgtgtgtgcatacgtatgtatatatataggtgcttatatcctcttcttcgttatgccatcacatccttgtatccatatcaaaacctgagagaagcaacaacaatcgttccttgttgtggatcacttgtgagtcagcagcactcgttcat

SEQ ID NO: 1175 - DNA, 97899 bp, Arabidopsis thaliana
aagcttttttttattttctacacattaaaacatggaaagaaattaataagttatttgattaattagtaagaagactaatttgtccttaaaatcctttggtggggggagggacaaatccgtcagttcattttctgagagcgaacgtgaggcctttcgacatctgctttaatatataagatgctgctacttcttcctcaacttccgtaccatcatattgttcccaatcgagatttttaagactcgataatagacattcgggaactaaacttggttcagcccagcacgcaagcccttcgtcagtcagatcatggcactgatataagtagattagattagaacaacataagagggtatagagaccaacacaacacagagagttgcttaaacacttattcttattgatagtaaaactgttttacaagtactatctcgattcttacttgatctaatctacccaaaagatcaaacccgactaaaaataactaagccctaattctcttctctgtttcttatcactaactcgtgaagacgaagagaactacacactcacctccaagctattacaacgctttgaagtttttacactatgtatcaaaaatatcctagggtgctcaaagcggctccccctttgttcaagaatccttatacctattctccagaaccctaaacttaggatctccgagaatctcacgatatggaatcttccttgtttccaagcctattcattttcgtattcttcgagacaatatcttctatatcttctcggtgaatcttgtctttgacaccacgccaagctaacttccattcttggctctccacatcatccgctacagcttgccacgtctgctcttgcatccatgtcagcaactcaggcgtttgatggaatttgatgcagcttcctgaaatccatcacggttctgatcgccatcagctgattgattgaactatgcatcttcaatctccacctttttgactgagtttgatactcaagcattcctccattgatataacctgaaactcaaatggaagacacaccacacagccaatagatagaatctagaactataaaccaatcaacataaagtaataagtttaaaaaaccatgtattaaacatcttattacacacccgtgatgatacaatcactcgagcaaagcattgttctggtctgaataaccctagacccaaacgactagaaacactcaaaacaacttaaaacaatactcccccacaaactaaacctcccccacaaatcatgcgcccccttagttcatagatcaaagtccccatccacatccgcagttctcgcatcatctccccatgcttgagtgcacaactcagttaaaaatttcaatgcgaagaacagagagcagaggcacaacacttacctgcatccaatgcagcatgcagaatgttgacctagagaagtggctggtgctgttgaagatggcaccttcctaccagttgactgaccttgtgaagcacttgcagatgtgcgtctgagtatttggatgtcagggtgttgagtctgaatcaaccgatagattagactagggaacatcaggaagaacttggagacagacatcagggctagttgaagaacatgatcatacaccatttctccaaaatcaatcggcattttgtgagcgatgcgatagacaagccttcctctgtcaatgcttgcatacccttcattggtttggggagaccaattccgacacgatatcttaaaaagactcttgcagttttctgaaaacttgttcatcgcaatgttctgcagattttggactcgaccatctgtcaaataccgagccacctcctcatcaaccaaccccgcagtctgaatgcattgagttctggctccaacatgttgcatataaaacagagcattgatctttgcgggtgagaattcacactcgaaaccccttactaacaccttgactaagtctccctccacccgaactgagggtagattggctcagaattcatagaccacttcttcctcaaaaccttggactcccgttactgtgttgagaagactcgcctcagaaatcacatccatgatccattgatccattgatcaaccagaagatccaaattcatttccttgatcatttgtcaatgagagaaatacaagtacctttgttcggcgagaggagaactgaatttgaactcatgaaatagatcgctccttccaagacttgaaacaacaactccctttcctttctgttgtttttgtgacagaaacttctcacttggggtgtctcgtttgcgctttgtcagacgcgatgccactgttagtacccttggaactttggcagacatcggcatggaaacctgttggcttttgactggaacgatggaagccaaattgtccttatcatcatcacttatatccacaagctcaacaggaagccgaacatgtggagtggagcggtccggtgatgaagtacgtcgcagatctgacccgccaaaatctgcatacaacaccaactgattgtgaggcgtactcacaagatcgtccagcagatttgggttgtagctttctgatgttgtggataaagattcggatcccgaagactcgattcttgattgcacaaaagtcttgaaaaacgatttcattttcaagcagagaatggaaatgatttttttttcttcagagatcagaatgaattctctagagcacgcaaacgacttttcactttcttgagcggttcagatttgatcctaaaaaccctagctttttccctccaatcgattcctgcctgttggacttgcacctcatgggcctagaaacggcccagacgaccttagactcagcaaacttgacaatctgaaacactcaacaattcattagtgctcacttgcaaatacacattcaatcaatcaataaccataataatttgagtgataattcggcaatcacaactttcatcatgcactcgaatagtgacccaaatagtcaattgatacaagcgagtaccaaccatatttaagatcttcaatatacctttcacttttgacccagttcagtgcattgttcccatcaattgttcagaactcagcaagaaactgtcacaaccaatcagatcgttgaggaatcagctcagtgattagtggctagtctttcacactgtcatgtcttcagtcctagacgatcaggacaacatataacaggcagctggaatttcctttgaagatactttaactaacacaggagtgtgatgataggtgtttttcgaaattctccttcttttgttatatcagcaatatcactttttctcaattgcttatattaaaacttagtgaccttgacacacacacatttttttttgtttttttttaatgtgtgtatcaagtccattcaattggttgatcttctcagctctttgacctcctgttaaatggcaacgtttgatgtctgatttgaaccggcatgacaagcaacgtttcatcctctattcatctttggatttctatgacctgttctcactttatgttcctgtcttagatcagcacaatttacaaacacatcatagttcacatacaccaatggaagttcgcagactaataaatctcttgaaatccaaaggtttggtaaatagatcacctagttgatgttcaatactcacatgatcaataactattagtttcgcctcaacaagttcacgaataaaatgatgcctaatatcaatgtgttttgtgcgagagtgttgatgttattctgggaatggattggttggatcattacagagtacatcttgactgccaccgtgggagagtttcttttgagcggctagaagggaggttgggttatcagggagtgagacctacctcagggagtctcgtcatctcagcagtgcaggtagagaaaatgatcgagaagggctacgaggcttacctggtgacgatatctatgccggagtctgtggggcaggtagcagtgagcgacattcgagttgttcatgagttcgaggatgtgtttcaatcgttgcagggattaccaccatcacggtctgatcctttcacgattgagttggaaccagggacagcgctgttgtctaaggcaccctacaggatggctccagcagagatggtagagctaaagaagcagctagaggatttgttgggtaagggattccttcgtcctagtacttcaccttggggagcgccgatgttatatgtgaagaagaaggacgggagtttccgcttatgtattgactaccgggggttgaaccgggtcactatgaagaacaagtaccctttgccaaggatcgatgagttgttggatcagttgaggggtgctacttgtttctccaaaattgatttgacgtcgggttatcaccaattcccgatagcggaggcagatgttcgcaatactgctttcaggacaagatatggaccttttgagtttgtggtgatgcctttcggtttgactaatgcacctacagcgttcatgaggttgatgaacagcgtgttttaggagtttttggatgagtttgtgatcatctttattgatgacatcctgatgtattctaagagtcctgaggagcatggggtacatctgaggagagtgatggagaaactgcgggagtagaagctgttcgctaagttgagcaagtgcagtttctggcagagagagatgggttttctaggtcacattgtttctgcagagggagtttcagtggatccagagaagattgaggctatcagagattggcctagaccgacgaatgccactgagatcaggagttttcttgggttggcagggtattacaagaggtttgtcaaggggtttgcgagtatggcacagccgatgactaagctgacagggaaggatgttccttttgtgtggtcacgggagtgcgaggagggtttcgtgagcctgaaggagatgttgacgagtacaccagtgttaacattgccagagcatggagagccttacatggtgtatattgatgcctcgagagttggtttgggttgtgttctattgcagcgtgggaaggttattgcttatgcatcacggcagttgaagaagcatgtgggcaactatcctactcacgatttagagatggctgcggtaatcattgccttgaagatttggaggtcttatctttatggcgggaaagtgcaggtgttcacggatcataagagtttgaagtatatctttactcagccagagctgaacctgaggcagaggcgatggatggagctggtggctgattatgatctggagatagcttaccatcctggtaaggctaatgtggttgcagacgtgttgagccgtaagcgcgtgggtgtggctccagggcagagtgttaaggccttggtgagtgagattggtgctttgcggttgtgtgctgtggcacgagagccattgggattggaagctgtggatcgagcaaatcttctgactagagttcggttggctcaggagaaggatgacgggttaattatggcttttaaggcagagggctctgaatattagtttgcagctaatgggactatccttgtgcatgagcgagtttgtgtgcctaaggatgaggagttgcgacgggagatcttgagtgaggctcatgcgagcatgttttccattcatccaggagcgactaagatgtaccgagacctcaagcggtattatcagtgggtcgggatgaagagggatgtagctaattgggtcgcaaagtgcgatgtttgtcagttagttaaggctgagcatcaggtgccgggtggcctattgcagagtttactcattcctaagtggaagtgagattttatcacgatggatttcgtggttggattgcctgtgtcgcgaaccaaagatgctatttgggtgatcgttgaccgtctgactaagtcagcacattttttggccatcacaaaaactgatgtagcggcggtgttggctaagaaatatgtgagcgagatcgtgaagttgcatggagtacctgtgagtattgtgtcagacagggattccaagtttacttctgcgttttggagagcctttcaggcagagatgggcactaaggtgcagatgagcacggcttatcatccacagacagatgggcaatccgagaggactattcagactcttgaggatatgttgcggatgtgtgtcttggagtggggaggtcattgggcggattacttgagtctggtagagtttgcttataacaacagctatcaggccagtattgggatgactccttttgaggcgttgtacgggaggccatgcaggacaccgttatgctggacccaagtgggggagaggagcatatgtggtgcggattatgttcaggaaatcacagagaggatccgggttcttaagctgaacatgaagtaagctcaggatcgacagcggagttacgctgacaagaggagaagagagcttgagtttgaggttggggacatagtgtatctcaagatggccatgttgcgaggtctgaacaggtctatctcagagactaagttgagtccgaggtacatgggtccgttcaggattgttgagagggtgggaccagtggcatacacaaggtctttcatgtgtcgatgctgaggaagtgtcttcacaaggatgatgaggtgttggctaggattccagaggatcttcaaccaaacatgactttggaggcgagaccagtgaaggttctcgaaaggaggatcaaggaacttcggcggaagaagattcctttgatcaaagtcctatgggactgcgatggtgtgacagaggagacttgggagccagaggcgaggatgaaggcaaggttcaagaagtggtccgagaagcaggttgctgcatgagtttgcctatccttgggttccagtttcagtgtttttgagcttttgagttgttgttcttatttctctttcaattgtattttcgtttggagttgtaaagatcatgacatttgatgattaataagatgagtattttttttcggggatttgacttgagttgtcttatttaagaatgagttatgcggtttctaaaaatggaaagttcccagaaaggacttgtctatttttagaaagtttgagtaaacaacctaagagagatgtgtgtttacgagacggccgggagttggtcctaaagatatcctcgaggggatatgatggatggtgagatatagaggtgtcttacgcaaatccatgagagagtctggagatatgctcggaagcatttagtattgtttgctcgagggacatgagggtcccaacgactcgtgaggagcggggtatgctcctgaggtaccggtaactcgagggactttttgtctttagagtgcgaggggtacggtggcttcgggtgacgatcagagagcacgcttttagggtgacgacccgagagcgagttttgaggtattattttcccggacagcctttccgcaaatgactacatcatcgacgtagacaatgacatgaagaactttggatccccgaattgatgtgaaaagagaataatctttcttagactgagtaaaaccaaacttgagtagagatgtagacaacttttcgaaccagcaacgaggcgcttgtttcaaaccatagatagatttcttgagcttgcatacaagagatggatctgttgttttaaaacccggaggtggtttcatatagatgtcttcttttaaatcaccatgaagaaaagcgttatgaacatccatttgatgaagttcccagtcctttgctgccgcaacatccaataaaagtctcactgtttgcattttgacaactggagcaaatgtctttgtgaaatcaataccttccttttgatgattgcctaaagccacaagacgcgctttgtaacgttcgacggtaccattagagttatacttgatacgaaatacccactttgatccaatagctttaactccttgcggaagtttggtaatatcccaagttccttgatcttcaagagcatcgacttcaaaaaaaactgcattacgccattctttctctcgaatggcttgattataagtctgaggaggatcaaccatactaatggcagctaagaagtgttgattacttggagagaatatttcacccgatacatagttggccatggggtagatacacgtaccaatgttgtcggacagagtttgagttgactcacattgagccgaataagtttgatagtcttttaggcgcacattttcttgtctttgacgtaaaccgcgacgaagaggaggaggtgatgcagcagccggtgttgcagtaattataggagagcttggaggtgagtcgttgacatcaataatagccgggagaggattcgtagcgggaacgtcaccaatttggtatatgtcaaggaattcatcatcatatggcaaaattggagatggaatgacggcagcaggtgaagagaatgtatctttattctttttgtcagcaaatgggaaaatatcttcctgaaagaccacatcgcgagagacaaaaaaaatttgtgattcaatatcataaatacgccaacctttttgtccatggggatagccaacgaatatgcattttcgtcctctctcttgaaatttatccaaacgaccagtgtgttttcttgcaaaacagaggctgccaaagacacgaagtgaagcataagacggtggttgtgagtagagaatcttgtatggggttttgccatctagaattggagtaggagttcgatttatgaggtaggcggctgtaagaacactttcttcccagaagctaatgggaagttctgcttgaaataagagtgaacgtgctacattcaagatgtgtctatgcttacgctcgacacgtccattttgctgatgtgtatagacacaagagatttgatgaacaattcctcgttcagcaaaatatgatttgagactcataaattcagtgccattattgcttcttactgttttaacttgtttgttgaattgtcgggacgccattgcaatgaactgttgaaggagagaggcaacctcactcttagcaagcatgagatgtatccaaaccgctctagagtgatcatcaacaatagttagaaagtaatgagctccgcaagaggaagcatgtttgtatggtccccaaacatcatagtgaataaaagaaaaacactcttcggctttattgaaactttcagaaaaacttgcacgagtttgtttggctcgaacacaaacgtcacaaatcgtctttaaatcagaactacaactatcaaaatcctctaaagatggcaaaacagaagataaaactttcgaagatggatggcctagtcgcatatgccacaaagctttattggttttccacttcaccacattagcacttgttgcaacgacttcagctctttgtaaatgatagactccattactctctgtcccaaccccaatcagcatcttggaagtacggtcctgtatcacgcaaactttatcagtgaatattgcgaagcaatgcaactcacgcagaagacgagccacagagatgagtgtgcaggagagatcaggtacaaataaaacatgtgtaagtttcatatttgcaccgagtattagggtgccttttttggtagcaatagtatgtttagcgttaggtagcacaacaacactatgagggatttcgtaaatctcagtgagcaaatccagaaaaccagtcatgtgatgtgaggcgcctgaatcaattagaaaatcgacacaatttgtcttaccagagagtttttctgatgaagtagctgtgtcttgtttcagcagatttctgatagcagaccatgcctctttgctaacgcctggaatgtcagaaaattctgaagcagaggatgacggatgagaagtttgagcattgttggctttgtatgagtttccatgtccccttcctctgccacgtggtgtgctgctgcgcccgcgaccacggcctgagctagtatcaccgtatttttcagtgtaccattcaggaacaccatgtagcttaaagcatgtatcagcactgtgatttgatctcccacaatgagtacatggacccatattattgactcgagtcaccgaagcaattgcattaactccagtttgaacagcgaagccgacagcatcaacacgctcttctttgctcctcgtaattgttagatgtcgttcttctgcaataatttcagagtagatgctgtcgagagaaatattatcatcacgacttaaacgacccaatatattggttctactggtgccaaattttgctgcatcaagtcccataagaaattgatgaatcctttcatgatcacgtcgttgactctgacgaactctgtgagtgcatgatggtctattacaacaacaagttaagagaggttcgtagtcgtctaggtcatcccacatgactttgagtttaccaaaatagttggcagctgtttgcccatcttgacgacaagctacgatgtcatattttaattggtgaacacgagaggcgttaccaacagagtatcgggttcgcaagctttcccacatgactcgtgcattatcaacaacagagattgatttctgcacctggggatcaagacttgcatacaaccagcctactaacatcgagtttgtctgcagccaccgtggatagtccggagagtcagatgatggcttcgttagggtgccatcgatgaaaccaagcttttgtttggcttgcaagttgttgcgagtaagtttagcccatcgttcatagttctcaccgttcaacaacatgggtgtgagaacatgatgaggatgatccgatggatgcaagtagtagggagatgcagagattgcatccttttcagaagaagctgtagtagcggtagatccgtcgactggtttggtcatgttgtgtgaagaagacgatgaagcttagtagaaaaaaaaaatttgtgtatttttttagggttttggctctgataccatgccaaagtgaatagaattgcttgagtattattgatgtgaatatgagaatatatatagtacaagagagtcggtatgtaaacgtatacgaatatacacaagaatattgacagatatctaataaggaatgtatccttatcctaacatttaaagctcttttgagacctcatgagaatattgatgattgtgtaggtattggtcaagataaaactgtgatgctcaatctgagtcaagagtcacgaaagccaatatctttgaaaactctgtttgaggtagtttttgatgatttgcagaggtcgaacgacaatcttttatcagttagtacctcgtcaacacttcttttatggtatcttgatagagggttgtgtttcttatgtaaatgcccttcttttatagattgttggtgcagaaaatccaatttcaaagatgatcaatcaacctaatggtttctacttgctcttttttacagatcctaccaataggttcaaagtgtgaaactatgatatattcgtaagaaggtgttcaaaacaatgaaatagctttaagagaagaggtatgaaactgaatcagtcatcatcactccatataaagtgaaactttttttggctggattagtttccaatttgtgaatattggatcagaaaagttggattaagaaactcacttaaagggctctaccattagacatagaaaaaattttaaggcccaacaaaaactcttaacatttaatttctcaaaatttatgctttaaaaatttggaagagcccttgtaagcggtcaaccattagggttgctcttatgatcttttgaatgagctcgcactgaatcactgcctcctacagcaatcttgatctcgttgaagaccttttgatcccaaaccccttttcctatttccttcccttgaagaaagcaacaattagctatatcagttcagatttttattttaaaatgaataatttatttttcattaccataggtaaattaaactatagtgaaaagtaaatgagacatcttaaattcatttctttttgaatattccttgatttgaagatatatattgctaaacatggaatcaaaaccaaaagataaaaataaaactttacacgccataaatttgaacaacaaccaagcctaaatcgtaaagaacctatataaaattgcttgcgaagaaaaaaatactcacttgaaactggagatccatattgtactcgggccagtgttgtatttggtaatccaaagaacaagagaatactcaaagctagtacgtaaaccacgactttgttcatgcttttgtttgatttaaaaatatgtattcaaaatgcatattcgtgaatatatatagataaatgaatctctcagtctctcacgttacgtgtccatcgtttttggtcaaacacgtgacttcaattttatattttagaaatgaaaccaggtcacacggattgtttccatgacattagattttcttttctcaacaaattttcgtgtccacataatgtttatgtaataaaagaaactgtatttgactcttgaaaaagtataaagtctttatcaaaaaaaaatacgaaaatgtttgaaatctttttttgaattggtccaacttaatttttgacttttagctattctatatattgtggagaacaaagtacatggtcttggtttaattgagcttaatttaacaacaacagctttcgttattgaatacattaccttggaaactcggtttgaagacttgtgtagggttgggcatatctaagattccacttgaacataaatggagaaatcatattatctataaatcacatgtcaacccaaattattttgtttgtaataagacttgaatgacttggatgtgaacacaaattgttataaagtataagactcgaataaaaatatatgtaaaacgaattttctttttggtacttgatcattatttatttataagaaaccttgatcattgcagacactaaatatctcaaaggactgtacaatagacaaacacacacttataaatttataacaaatgttttgaataccatatcgtcggaccatccggtacactaggaatcgtccatataaccgaatccagttgagtcaaaaatcaaatttgagttaaaccactaaaaccaattatttatcattgtgcttttctcttccgctttatgattatgtgaacgacaaaattttacgtatccgacaattatttttcatattgcattttcttttttttaatattcagaaattcaagtccaaaggtcctacatcttctagaggcagaatcctaaccagataaaaagatctcttccaatatgcttcgaactcagcacctctacctgaaagatttatcactggaccgacaacacgtgagtcgtattgcgttctcaagagcaaggtttttctaatattttaccatttattttctaaagatttagatccaacatatatatttgttgacttctcatcttgttgcgtttgtaatatcttttcagtatgttgtacattatctttattctaaaaattatttaaattcgaaaacgcgttccaaccagttcgatcagttgacaaattaaagtatttgcaactatattcattatatttgtttctctctctagctctaagctcttgattcttcctacaaaattaccacttgtaactcctaaagattctaatggattgcttgctgaaaatacagccacgagatgttcaagatcatcaaagttgaacttttaaaactcgcgagtgtcttgtttctgtgtttgttatttctactggagtggtcgtgaagtgtcaagtggtataggcatcacacatttgaacatgtggtattcagtgttagttattgcgatcaatcatgaaaagagaaggaagattatgaaatcgatcaaaatgtaatctaacaggagagaataggtcgaaacgttcaacttgaagcgcaagatacatatcttaatatgtcactgactttgccaaactagatcaacttgcgacagagattttttttttttttttggttaatgccggttaggtttacaactattattacatgaaggatctctccctgaattactgcccgatgcaccgatcttgatctcgcttaatagtgtttgttcccaaacttcttttcctattttcttccctaaaaacaaaacaactattagctaatcaatttgaagaagagaaacaaaataactgttaaattgtgaaacgtagaaacaaaaccaaaagatcaacgtatgaaaaaaattgaagaatatttggtttgcgttttaaattctggaatactataccaaacccaaattgtatcgaacatatctaaaattgcttagaaagtagaaaaaaaaaacaaaaaaaaaaatacttactttggcttggagatgcatactgtactcgagctaatactgtatttgataacaaaagaaaactcaaagttagtatacaaagcgtgagtttgtacatattttagatttcatgcatatatatagatatatgaagtcacgttacgtgttacgtgttcatttttctgttttggtcaaacacatcttcatttctttgttccccacaagtatttataataactaaaattaagctttgcccaaaaaaaaaaaaactaaaattaagctagttttcatataatagaaaaccgtaattgacttgaaaatgtatgaagtcttctgaattggtccaatctaattttagttattacacgacaagaaaattcttcagcgcaaaccatatgctatcttatatcttatgtaatacacaacaaatttataaatagtatgtttgcggtagctatagtaggtatcactcctatgataacattgtttagtaagctatagtatattttgatacgatagcaacgatagaacgctattatagtattttgatttaacactttaattttttgttataaaatactaatgtttctaatttcgtgtcataatatctttacctaacaggacaactaattattgctgtctaatttaatttttgtatctttgtgttttatgctataatatataatttttcgacaaggacatcgaagaattgctatagtaaacatgattaagtcttttgattatgctgtaatataatctactatagttgaaaaccatagccaatttttgctattatatctaatctaaaaaaactatcttttgtgattctaaacctgttttgcataacataaacatacaacatatcataaagtctcaatagatgttatatcatatataagtctgatttcaatccaacaaacaccattcaaaagttaaacataatcattcaacacaagtaactgcaaagccaaatacataagttctcggattccaaatttttataaaagaagtagattagtctagtcttaacctaatcaaaactagctattttggaccatagattcttcattcccttcaacaatcaacaatgtctcatttcagttcctgatataaaaccaaagcacaagcatcacaacaatttcaaaacttaccctagattctacaaagtcagtagatctccaacttattcattggccatgcaattgatgaaccaagtgaatctctcatatactcgatttcatttgatggcctccaaactgctgcatcatctacattaactacatctatccaaactctagctgcattctcccccaagcgaacatggtgcaccttttgatcttggtcgattgaatgcactcgtcctgcaccaaccacccgcttctttccacttatatccattaacttgcacttctgattagccttcaatccttcagatgctttttggcgctgacatgttacattataaaccaagattaaacggatgtaaaaattttattagagtcaatatgtcaaactaacaaacaaacttacaggagatctccgcagaggggattgtgatgctagatgagatttcttcacaggagactttggaactactgctggttgcttctcaccaagagattatgcaattgttcctgcagattctgaacctttggctgcagataccttaatagaagaattataacctgatgctgccttttgtatccctgttgctccattttgttgacttgttgctactgactttccccttgaggttgatgctgttggatgagttgattgagaactttgaagaggatctttctgaactgttgaatctatagtgttttcatagaaaactttgtgggcaggctgtgacagccccgaaccgtcctaggactaaggaacgaatccgaaagcgtcacgtatggttggcgaccgcccgcagacgaatccgacaaaagatcacccaaggccaggcccgaccgcagaagaccgcccctcgcgaccacgggagttagaggccttgcaacccgtaccgcgaccgcaagttgggattagtccggactagactaataagaggatacacgagagttttaagaaaaccaatttcttattcatagataatgtattgaaatacattaccaaatacaagtataggttttgggtataaaaacaaagctcaatcgagtcgtaaatactacgatacaaaaatatcattttacaaaggcaatgaaaactacaccggcttccctaacatccatgcttaaactaaggtttctaactaaggttacctacaaaagagaggggggaatgagcgctaatcgcccaacaagtcctagctccctctaacagacaataatttcccaacccaaaacccaaaataacaagcagcatgcggaagtataacaatattgaaagcataacatcaagcaatcaataaaataaacaatcaagctggttaccatgagtacgtcgagtacatggaaccacatgcaacacgcaatcaaacataactagaaacttaccttgctgaacggtttagactcgatctaatcctaatcctaatcagcctctaatcgcctaactaatctactcggcagaacttcggcagtacccgaaagctcctcgggacgaaccagtcgtaccggactctcaactctcactcacggacttttcagagagattttagttcgtttggtgtgaatgaggaagaatgaggcggaatgactatttataggggtggtggggcggtttgggaagcacgaggtggcgagataggctcaatcgagcttatctgtaactctatccaaaaacccgcggatagacttgatcgaccttatccgtacacggataaactcgaacgatcttatccatatggaacggatagacatgaacgaacttatccacaagtcgatccttatccgcttccatacttatccgaaattcatacttatccacactcgttcttatccgtaccttgtccctatccactcacgtccctatccactttcgtccctatccgttctcgctcctatccacaaccatacttatccaaatctcatctctatccgattccgctcttatctaaaataatacccatctgcccatgactatactaggccactaattctacctagctgcttacacaacagcaacactgcaatcatacgctcagtccgatcagttaaaatccccgatcaccaggcatgatctacatgatccaaatgccgatcgctcgggcacaagtaaagctcgacgaacacgtagcggcttgtttggaacatagtacataagcagcgcctagtaagggatgagatattactaacggccacggtacagggtgaaacacatcccacgcactcggggacattaccgttaccaacgatgatcatctcgtagaaccgtaaccacgacgagttcatgcgttccctcaacgcatcaacacattaatcccagtcatccaagtcctcgttccacttgactcacccatccggttccccgaccacttgctcataactatccccaaaactgccagaccgttggtccgacgaaacaatactcttcccgtaaggacttcttccgatcgttccgattgtacgacttgctaaattgtcgactaaaatccttggcttagtcctagtcctggtcaggggtattacacaggccatgctacaaaagactgtaaacagtcctcaaggtatgtcacctccatcgttggcctccatataaacgtctcaggttgaagtattacatccataaatactttcattgcagcaggtccgagaggaagcccattaactaatgtgttttggtcttttgtctaccaacgtccttctgcaacaacaacgtcattcgaagacaaatccagtagtttgcacttgtttccagaggtgggtcttggtccctgtcaaacacattgaaccaataatatgagtatgtgaacttaacgtttacaaatatattggtatgactctaaatatataacattttaccagtggtgcaatgtcttctggattgagctcttcctctaggttaacacacatagcaacaggccaagctatcatttgaccaatagctttctccataatttccatgttaactgcggaatcaagatacactaattaggttgtgatcttttgttcacactctctataagaaatcaatagggtattatcagctaattatgtatcaagagattaaaagtatcaaatagaagtgacttactcttgcagttaaggtttcaccaacttcaagtgattgtctctataccaaaaaaaaaacaaagtcaaatatatgtactaaccgactaatcagctttatgtataaatagataagtgtttacctggttctttattttgtcaatcacttcttgtaactcagtgaccttctactggagagggtcctgcttctattgcatttcagccatatatttgttttttacttggaaacaagctagtttggttttgttcatatttcttcccatcgccctcagtctcccaggattgtcaggccctaacagttggctaagtgaatcttgtgcttcattcttcccatttgattgaggaccactgctaacaatctcagctgcctttttttgcaaacatcacaaaccatcacaatttcaaaaccatcacaaaccaaaatttttcaagccatcacaatttcaaaaccatcacaaaccaaattttatcaagccatcacaatttccaaaccagcacaaactgtcacaacttccaaaccatcacatactcacaatttttcagccgcattcgtattcactggtgttccatctttcttggtctgtgacttaacccagaccattagcctcgtcacttcagctgggtccgcactaccagttttctgaacaacacaacatgccactattagtagtaagtttaataaaaactctaagcaataaaaaacataacaatcttctactagcttaaccatccctttgcgactacaagtatgaagaattcggttgcgccttctttccttgtagttatcgcttataacctaaaaatgattgttaattagtaactttctatataataaataaacttagttttttttctaaaaacataccttacattcagggctcattttgctcttcacgaattttctccactcaaatggagaaacatttttaggtcgcacattcatcctctgctggtttgtctttgcttctctaaacttgattacttgcctagatttccaggacctccacaaacatcccatctgcttaagcactgcaaccttttgatactcctcatctagttcaaaccttgccttcaatcaattacagaaaaaaagagattgatatagtgataaggacagatagtcaaatattacaaaaaaagagtgaagtgtccagagaagtgtcctgatatcttcacctgtttttgtccagcgatcaattgtgatagggacgtgttctcggaccaatgcgcctgcatatgatgctaacttaactgagcctttaccaataggctctcccatcatggtatactccacgctgactcttgcatttggatccttagcaatatctttcatcctagttggtccacgttgcctcttggtcttaggttgaactgcatcttcatctccagataattcaagctcgccttcaggttcttccacatcagggtctttatctccttgttctactgctgcttgaacttcagcttctttttctgtctctacattgtttacagcttcctcaatgttttctgctggaacttgattagtttgttctacatctgttggctctattgtacccacatacttcacctcatcgtcattgcatttcttaggagaagcttttttagattgtcttccacgctttttcttctgttgtcccactgtaaatcactgagaaaaaagaaaaaaagagcattaattccattaataagtgcaacacaataacagacagataatgaacacacaaaccgacagacaatcaacactcaaacagacaaacaatcatcactcaaagttaaaacaaagtcacttctctcacttcaaagacagacaaaaaatcatcactcgaatgtaaatcccttcacaatcacttctctcattctcagctacttccaagtcaacatcgatgtcaactgttgtgggcaatggcccaatgtcaagagtaacatcgtcactctcttcctctctgaatcttctcgacggacctctcattgcaacatgccaagttgacgagtcatcttcacgcatgtaaaacacttgttttgcgtgagaagctacaatatacagatcccttaaaaaagagacttgactatgattcaagttaataaatgtaaacccttcttcttccttagctccattgccctttactgcctagttgcaacggaataaaggaacatagaagacattatagtccaacaatataatgtctgttatgcagccataatactgcaccaaatccatcacttgtgaattgtcctttgcactagacctacaaactgttgtcgcttcatagaaaacaccactattctatgttttcttgtcaattgttctcgtgtaaaatcgttgcccattcactatgtaaccagtaaatgaccttgcgcaactacgtggaccataagccagccatttcagtgtttctccatgagtactagaatcaagatgtatctataaaaaaaacaaaaaaagtcaggctcttatatctatcacaaacaaattaataagtgaaagacaattactagcctgttctataagctaagaaacaaaattttgggtgtgcatactccataacagagatgcatcacgtctgcatctcccattagtgttttgtagaagctacaggtgctcactagtaaaaagataaaaaaaaatatgatttagccatagtaattgcctggaaaatgttgaatgaaaagcaattatggcacttactcaacatatggttcgacgacagccatattctggatgacagccaaatgggctattttggtctccatttctgtaagattaataaacctgcctgcagagataggacgccctccaaggatagagttgttctcgtactcagtatttatatctaccttttcctgaatttttgttgtcttcttcaaaaattcactactgaattggatgcactcttcagctaaataacacttagcaatacaccctttagatcttgtagtgttactcacaaaatctttgaggactttcatatatctctcgaaagggtacatccatctgaaatgaactggttcccctaaccgagcttctctccctaaatgaattgtcaagtgcaccatgatatcaaagaaactgggaggaaaaaaattttcaaacagataaagggtttcaacaatctcagcttccatttccaaaagctgctccatatcaatcactctctgacataagtgattgaaaaatttgcataagcgcccagttgctaccctaggacctttaggcaacaaccctctcaaagatattggaagaagctgctgcattaaaacgggataatcgtgtgatttcaagcctgttaccttacactcttctaaagatacacctcttgctatgtctaaacagtagccatctggtcctttgaaatcaaatagacgtttgcagaagatcttcttctctgtcttggagagagaccaaagtgctgtgagaagatatgttcttttgcctttggtttgcggatgcaagtccttccttatagcaagcacctcgagatctttgcgagcatttagaccatcctttgacttcacacaatccaacaatgttgatacaatagatgcagccacatttctctccacatgcatgacgtctaagttatgccttactggtaggtcctataaaaccaaaacaaaatgcatcagacatttttttcccttttttccaatcttcataatatgacatatctcaagaaaatagaacagacctgccaataagatagcctgaaaaagattgaccttttcttcaatcttgataactcttcctcatctactttgcctcttcttcctcatcctcctccgagtcactagatagatcatcactatctgatcctgatttaatagactctgttttttttcctcttcattgcagattgtttgaaattcccaaaattattttggaaattttcaaattatgagaaatttccaaaccacgtagtattctcctctttcacttttccaccgatttgtgggttttatctaacaattcataagttattttacaattaactacagctctcactatttgacacctgttttaagtctcaaattttcatctctcaccttttaaaacaattaaactttactgttttaaaaaaaaaaaaaaaaaaaaatacgacaaaatttctttctttcccatgatgttttaggtagatatctgaattttatttagcaaaaaaaaaatataagactttatcttcaataactgttcacccacgtccccatcccattattcatctttactttcacaaaatactagagatacacaacgtcaaaaattgttctttcccttgaagcacttggcaattttttttcatcacccattgattttattagcatttctctcgagtctcgatctcacttcgtcatcgttgtttgtaattcacacttgacgatgtttctcttgaggtatattcttggacgaggtttaactttatatctccattttttcctcttgcacgacctcatgttctcatgctttatattttctgagagtgagcaacaaatgcgttgagaaaaactcttaaacaaatgtatggaaattggttggtagaatgcatgttagagatatgaacaaaaattatataagtaactctctcaatttcaaatccaaaagaacatatgtgatatatttctataaacttttgtgtttttgaagaaattagacttctacaagaatatactttatcgctcataattaagtgtttgtgtttgtaattaattattaattggcatcgtcatgtgcatctataagcatattgacgagtacatataacaatttttaactctcttttctctctcatattaagaacgacatcggaacaaaacaaaatgcttgaataaccatgtgttacatgaagactcataaaaggagccaatcaacattgttttgttcagattgaatttaacatatcattcttagctcatgatggtagttgaaatgtgaaatagggaaagtatttttgttatgacataaatcagttttagttttgtaacaacttttgttttctatcttaacgaaatatatatagataataagtaacactattaatagatgtttactttaagtaaataaataattatccaaaaaaattttagtcaccttggatgtaaataattttttggcccgggcataatacgggctaagcactttcccttcattttttagaaaagttagacattgataccctctaactgaactgaatgtcctcaattgtttttcaaccaaattagtttagttatgttgaattgaatttttttgtttttaagatctatggctaagaataaaaaaaagttgttctttttataatatcagagatcaaatgagaaaaaattcaaaaagtgtctctcttcgtcaatgagaacgacattgacaatttgttcctcttgtgctctctaattaaccttgataatagaaatgagattgtccctcaaactgaaaacataatgaccatcacaatcatcctcccttaatggtggtgacaaaatcatcatgttgcttccatgtcctttaatcacaactcctttagcctaccccaaaaagtcaaaattcaatgtcagcatatcaaacctcacaaaaaaacataaatgctgctctttcctcaacattcttaccctaattctaatttccaaatgtcaaatattaataaaacaaaagaagaagaaaagagtaacctcttgttcaggtagggactcgtcccaagtcatacgaggacgttttgactcgttctttatccatattctcgaatccgttagctatcataactgacacagagaatcaatcaccgacacatccaaaaaggaatctaatgctcaatctgtagctaaaagagggaaataatccaccagaaattcttcatgtagatataattacgttgcgaaaaatcagaacgaaagtgataactacgaaaatggtgaaaacaaaggaccttgctgtggtttggaactagaaagagtgcaagagagagatttctttatcaaatctgaaattgctttacgttttgtggtgaaaaaatttccttcgataagattttgagaatcaattgaaatctgattttgctttgatgttcctctaataagagaagtagttacataatgaattttaggctattttaaacattagttttgggaagcaaatgagatggacaagcatcccatttttatcatatggtgaagttgatgatgttaaactgattattggctatttagatttcagattttgcttgtttatgaaatgtttgtatcttagttctaaaaatgtggatgacgatatatatggatggcacattgtggaggacgcatcatggattgtgcattatggattgttatgatgagagttgtgaatcttttggtcttacatgttaagaactggaaaaattatatgtggtgcttttggtacgattgttgtccacaaagttccatccatccgattcttaaagaacatttattcattttaaatcatatagatattatttttaaagacataattgttcactgacgagtgtccaaagaatcaagtccaaatgatcacctagtaactcacattttgtttcatatcaatgcacaaatttatacatgaacaataatcatcgataaaaaaatttgttgaacttttggggttcttccactatttaacttttagaggttcacttctcttacatctcttagttctctttaatgatttgtttcactcactcattttaacacaagcacaaaaagaaccttcactctcgttctctctagtctttggttagtttcttgttttgacacgaagatataaaacgatttacttgtttcactcacgaagaccgaaatacaccatccatttttctttgatcaatattcacttctgtatgagtatggacactatcataattataaatggatccatatccagcgataactcattaacagtaaacaaaggcaacattgtccattgatgtgtgtccaatatgtgcaatccatatggttatttatacctaacacataagttatacataaacagaacaagacgatgaataagtcataatgctccctcagttaccgtcaccaactcgatcgccaccaccaaccaatagacactttatcaccatatcaaagacaaccgtcgcaaggaaccataacaaatccgttggagaaacagctaagaagagacatcgaagtaagcaacgaattttagatctaaacccaaatcttccgtcgcaaattattgggtgtttcttccgtcgttgaatgtttccgctttcgtcattcacacacctgccgtttttatactccaccagagccaaaccttgactaatgaagcgagtacgttcaattagccaaaattgaatctcagattccaataaaaccataggaattcgagaagatcaaaataggggaacgaattgatgaattgacttctgatgagaagataaagagatagcaaaatcataggaaaggtttttttgttctggttaattttgtttatttctggataaagtgagaaaaagagagagacaagagagagaagagagagaagaatgaagagatacaagtcaaaaatattgtcacgaaaaaaagttgtagttagaagggcaaattggacaatttagcttggaaaatacagaatccttttaaagtgccttaatcggtaataagtttccaaaaagtgtctaattacgtaatattctccttgaattatatacttggaatgtgacacgtttaggcacttttagataatcttattttttttgaggcacttatgagggagagaacacttttttttattatttgacttattttaagacatttttacccctaatttaaccaacaacttttattttgaaatttaacataaattaaacactttctctctctttgatgatccttacacaagaaatctctctctctctctctctctctctctctctctctctctctctctctctctctctctctctccatgatttgtaatgcctttctctctccacatctccataacttctaggcttgatttctcttatcgattatggcggcggttcaccaaaaatcggtggtaccgattctgcaaataaatgggagaagtttcttaaacaattcgatctcgattatctcaggaatttgataaaatttctatgtccataaggtcttggaggtggaggtctctgcaaactgtaaaaaaaatcaacaaatatttttttggtgtccataataacgagtcctttgaaatatattcattcgaaaacctttttactgatccatatccaagctatatagcatgtccataataacaggagattcgattaacggtggtttgtaaagaaaccaaagttctatatccataaggtcttgaaagtggaggtctctgcaaactgaaagaaaaatcaacaaacaattttttggtatccataataacgagtccatttaaatatatccattcaaaaacctttctactgatctgtatccattctatatactatgtcaataataataggagattcgattaaccgtgttttgtaaagaaaccaaagttccatgttcataaggtcttgaaggtggaggtctctgcaaactagaaagaaaaatcaacaaacaattttttggtgtccataataacgaatctatttaaatatatccattcgtaaacctttttactgatctatattcattctatatagcatgtccatgataacatgagattcgattaactggaatctcgatgctacgtagatgaaacgagtttgacacatgagagatcaaaaatcaaatctagttgccattgttgaagaagaagaattttcttagagaactgaatctcaaatttatgtcaaaacaaagatttaaattgcaaaataaatcacaatctccaatcagtgaaaacgaataaaatatcgaactccccaatcaattcataatctcagaacaatccgagtaattctacaatatacaaatatcaaattttgcaaaatttgaatacccaatcccgtaactgaaagaagaacttcataccatctaaaataccaaaataaagaaacgcttgagtggatccaacaaataattataaggagatcgactattttgaacatccaacaaataactttttttagaaccgtctattttgaataattccattgaagtagacgcaacttacaaagagagagagagagagagagagagagagagagagagagaaatttatttaagagagtattttatttaagagggtattttagtaaaaaaacatagcgaaagtgtctacttctttggaaatgcctacccagggaaatagtttttagaaagtgtctaagaatgtaatattctctatatactttgactcgcttttttgaactctaatttatgaattaactggtaaagacgatcgggacgttacataaaatgacttgttctttataagataaaagattttaccatttattttctagagatttttggtccaacatatatatttgttgacttctcattttgttgcgtttgtaatatcttttcagtatgctgtacattatctttattctaaaaattataaaaattcgaaaacgcgttccaacccgttcgatcagttgacaagtttaaagtatttgcaactatattcattatatttgtttatctctctagctcttgattcttcctacaaaattatcacttgcaactcctaaagattctaatggattgcttgctgaaaatacaaccacgagacgctcaagatcatcaaagatgaactcgtaaaactcgcgagtgtcttgtttttgtgtttgttatttctattggagtggtcgtgaagtgtcaagtggtataggcatcacacatttgaacaagtggtattaagcgttagttattgctatcaaatatcaatcatgaaaagagaaagaagattatgaaatcgatcaaaatgtaatctaacaggagagaataggtcgaaaggttcagcttgaagcgtaagatacatatcttaatatgtcattgactttcccaaattagatcaacttgacacagatttttttttttttttttttttttttgttaaggccggttaggtttacaactattattacatgaaggagctctccctgaattactgcctgatgcaccgatcttgagatctcttaatagtgtttgatcccaaacttcttttcctattttgttccctaaaaacaaaacaactattagctaatcaatttgaagaagagaaataaaacaactgttaaattgtgaaacatagaaccaaaaccaaaagatcaacgtatgaacaaaattgaagaatacttggtttgcgtttcaaattttgaactactacaaaacccaaatcgtatcaaaaaaatacttactttggcttggagattcatattgtactcgggctaataccgtatttgataatccagataacaaaagaaaactcagagttagtatacaaagcgtgagtttgtacatattttggttgatttaaacgtataaatttaaaagatgggatttcatgcatatatatagatatatgaagtcacgttacgtcttaggtgttcatttttctgtcttggtcaaacacatcttcatttctttgttccctataagtatttataataacgaaaattaagctggttttcatataatagaaaaccgtaattgactttgaaaatgtataaagtcttctgaattggtccaatataattttagttattaattctatctatagtggagaacgaaatacaatttctatgtttaagtgagcataatttaaaagcaaacgcttttgttattcgataaaatcaaaatttgtttttttggggatggacaatatattatataagatcccacttgaatattttcaagaggaatggacaatatataatcctacttgcatttaaatgtttaaaaaatctaagatcctgtgtcaacccaaattattttgagcccaaattgttataagaattccataaatacatgtgaaaccaatgttctttttgctccttgatcaatacttttctattaaataaaacttgatctttagtatttggctgtaggaacttgatcattacataaataagaaatctcaaaatactatacaatggacaaacacacatacaaggaacgtgaaaacttcaccgaccagttagccggaagttgtcgtccatctatttgaattcatgttaagcaaaaattaattttagttcaaccgctaaaactggcggaaaactgtaaaatctagggaccgattgacgactgtagagacttttggtgtaagaattttgactgcaaaagttttaattgttaaaatctgctttttctgttttttggtcaaccgatataaattagaactcaaaagagccaatcatgtggaatattgtttacatatgtgacaagatgcggttgggaacgaatctttcgtgccaacttatccgcttttacatttacactacgagaaattaaagataaagagaagtttgtgaattcttccttgtcgttctgcaactcctccaaatacactgaaaatgccggtcttttggttggggaagacaccatcttcaccaaatctgaagagtctgtaaagaaagctacgtcctggttgtatgttccaatcatgcatttcatcgcccaaaaaaaagcttccacttcggtatgtagaggagatagacttcaacgaacgttggcggctcccatggttggcgactaaccaaaaaatgataggcagaaccatcatgttcctgagaactggtcacttgctttccaagatccatcaataaaacactgaaatccggaaaaagttgtatcttgtgatacatccttcacccgaattctagtatctaagaacaaagagccatgactttcattatggagttcgacttgagcctcctgctatgattgtgcctcttttaccgctaagagtaaaatttccattggatctttctccacattttcaaaaactttttcatttctttttttccatatataccaaattatccatgaataaaaagccgaatcgatgtctcaaggaattctgtagaacaaatgatccaaatttgtaaaaattgaattcgaaggaaaaaactctaggactgtaggagtttgagataaagcccaaatctgtcttgcatgatggcattgaaagagagtatgattaattgtttccactggggtaccacatctgacacaacccttttcacaaggtatagctctttcgtaaattctccgataccgacacacaaccggataaaatttgccataaaaatgacgtaacttaggtggacactgcactttccaaatatgcgcttttaacgtcaaaatattgggacctattagagttgtaccctcattaacttctaaccgagccgtgtgatatccagatttgactgtataatttatggcttttgtaaaatgccattcgaaggtatcctccttatttggattaccaagaggcagggcacttatcagcggtacatcttttggatcaaagagctcctttaagagatcaatattccaaaagtttgaccgagtgtctataagaattttgacttttagagatgtattaaaatctgattggtaacactaaagctgtagaaactgtgacttataaacttatgcttttaaataatataaactatagcaaatataaaccgaactgtaatataactttgaaattcacacaacaaaacttaatagtaattttttatacgttcatatatctccgtttttgcctcaaattaatattgatattattttaatatacacaagtagatcttaaaagaacagaaaaaaagaatgaaatgtaaaatagttaatattttcttaaatataatttatcagtaaatgggaagttttttagagaagagaaaattaaataaactattaatttctatttattttacttttaaagccatgtttacgtgactttaaaaaaaaaacaatttcaagagttaaaataataataatgactttagaggctttaaattatttaaagtaataaaagtgtgattggacaaaaaaacttttaaaattttaaaaactattttaagtcttacaagcttcttccaatcaccccctagtgatttggtttgatataaaaacccagttcaggatatttaagtctcaaatttatatatctatttacgaataaaaaatgttatatgaggtttctcaagtaatccatatcaacaaaaacaaaaaacacctgagagagtaccacatcagaacatcaaattgtccacatcagttttattaacttctttcaagatggatgccacatcacctaattaggttaagaaactaatctacgaaattattaaacgcttcttccctcataaaaacatacaagtagtaggaaactcatcatctcccgcaaccgtgaagccatgatctcaacggttcaagcttctctcatcgtttatggcttcctagttctcatatttaaccttcatcaagtagctattgatttagtttcatgtcatatggttttaagctcctcccatcttatttttaacttaaaaagccacctacccttcacatccaaataaagttttcacggctataagtaagatataagaccatctccatcggtagtattttattgggtttcttacaatttaaataatggaaaataaagaaaaagcatgagagagaatgaccaaagtgtctcagttgagagacggtaagaaacccatttgacatgtgacattgttttgattggcccaaagtttaagttaccatttaaaatatacataaataattacaatgatgaaaatattatatatgagaaactaaaacagtatgtgagcgatgtgagcgatggagatatatatctccatcggtattattttattgtagtatatatactattttattggtaggaataaaattctactattttgtaccaaaaaataattaaaataaagttttcggagattgacacaaatggcactaaaaaactttattattccaaaaattgcaccttcttttgaaacttccaaaaatagcacacaaaatttttaatcctctaaaaattgattaaatagtaaaattttttaataacatttgtgtcaatcccccaaataaaaatgagagcaaacactaatctaatattaaattgaatcaaatttgtatttaaatagtaaaaaaatataccgtaaattagaaatagagaactcaaatataataccacaaacaaatattaaaattaaaaatctcttttaaatgatgaaaatatataccctaaattggaaataggaaacccaaatataatactatatactaatattaaaataaatcaaaatttctattaaatggttgaaatatataccctaaattggaaacaaagaacccaaatataattttttaaaatttgtttctaatttattttggttgaatagattttatataaaattatagtattatgaaaataataaatcagtgataatacttttagaacaaaaacttcataataaatcaagtaaagctatttttggaagtttatagaatgtgtgctattattgtctataaaacttgttttagtgctatttttaggaatttctctaaggtttttactattttcctacaaattaatataataatataatatcaattagttaacctactaaattcctaccaaataagtaaaacctagatctacaaattttgattaatctcacgcttccaccattaaacttccaacgcctccaccaactttctcagctcaatgtgcaaattctcaggaaatccaatgagaccaccaagtctctgatatgtgctctcaataacatctcttcgtgaccttgctttgcctccttaccctttgctgcagtttcttcaatctaccatgacacctctacatctcaatctaaatccgatgtctctgcgcttcatactttgccgtctgtaagctcatccaatttccctctttgagcctcaccctagattttgttttgtacttcatttgtgaggtttcaatcgatttagtggttttgtaatttgcttttgttttgtgttcactcatgtggaagaggaatgtgtggccatcttggtacggaaacgaatcagacgagcttgttccaattcgattcgagttcgagtttccaagtcaagcgaacaaagagtagatttgaatcattgttgttgttgttggtgtttatcactgtctcaggtggtttcttgtacccatatgcttaatttcaattttatattagcttgtgttgcggatttgatcaaatgattgtttgagaattggtgactatgatgatcaaaagattttgtttgaacaaattagctcccttgtttgcattcataaacttccatttgtgaattaaaaaagtatgcttgaattgtgagtatagtttatactttgtaggatcatggacttgatttaagtcacttgaagtacgaacctacttgtatatgtatatctatatatgaatctgatatgatatggatatgcaataaccattctcttgccttttgtttattttgccttgtaagattttgggagatgatggctcggtttggtgttgggttatcatttatctgaattataccatttctagcttgatattatatgtttcataactacattgctttagtgttctgatatctacatttgttgcttaaatctataatgctttcagtcttttactagtaaatggatggccaacttggttttgaaaggtatggtcccagaaatatttttttagtgttgggttttcaagtaaaaaaactccagcacaatgatttttgttatgccttgcaggtttgtgttgttaagtccggatccatgatgtcgcttgctcttgataatgtcgaaggtcttcgatgtggatgtacttttaaagaagagaccaaactttgaaccatgctctagactttctttttatttatttatctctagtgtttttttagacatttaatttgtttattgtgttgtataaaataatttaatttttaatatattattcagattattaattaataattattttatttgttactatttaattttgaaattagcaaattaattcaaacaaattaattagtattattttgttttttattaagttgtagggaaattgtaagaaatttaggaagaaaaatggtaggaaatatattttctacaaatcttttggtaggaaaatagttaaaaatatctttttattttcctacgaaatttcttacgaattttcctacaaaatattttggtaggaaattttctacgaaattcttaccaaaatcgatttcctacgggagatttcctacgaacttttttggtaggaaaacggtaggaaagctatgtttcctaccattttcttatgattttagcggtaggaaaacaagagttttcttatagtaatatcatcattcttcttcgcttcattatatgggtttaaaaaaaaatggtgtctaatccctatattgaactcatattgtaaaggcattcctgtcaagtggtaatttaacacattgtataggttttgttttacttgttttattgagtgttctattcaaaaacaaatatttttttataaataaacctttttaaaaaaattggacctctagaactaaaataagcattagaaagacgaaatgttccaaaatatatcttaagcgaaaagatccattaaaatgtctgttcggtagatgatttatgccgaccagtgaagaatcacctggaccgctgatcggacagacctttccaccgatctcttgactttatgttaaactgctcttctctctcttttagggttgcatgcctcctcctatatgtactcttttatttgtagctgtagatgatattttgacttttacgttttgtaaagttttaatgtgtttttcttattttttcttctttttttattttatttttatttgttcatctctttgggacaactccttcaatacttctgatttttaaatacatagtataacatgacatattgttttatttagattgtagagggaaaaaggaggtgaataaagaagttcaccccaagtctcggcctatatatataatataactatctccatgaatgaaacttgcgttcacctctaggggtaaaatcttttattcacctccctttacattatccaataaaaacatgtcatgtcatatcatacttaaactacttaataagttaaagctaaaattacaaaacagaaaaaagaaaacaaaaatcatgttatttacttattaacgttgacgtcttctcctcatttttttttttaattttgtttataattaaatttagaaattttgaaagaagaaaaagacaagaagtttaataaaaggagatggaatttttgcagatacgaaactataattataccccagttattagaatatcattccatcaaaccttaataaaataatggtttatcaaaagcataaaaattgcaagcagactaaaaatttacgtcaattattaattgatgtcggattaagtggtggaataaaaaaaacatataaagaaaaaaaatatgagagaaaaataatatagaagaacaaagaaggttttatctagaagaaaataaaaataataatatgaatgtgattttgtgattctatacgtgaagaaagaaaatcaatctagcataatattttggagaaaaaaaaagaagcaaaagaacagaactttatgatgaaccaccataattttgatcaaattcctacaaaatataagattttaaatgattaagataataaaaataattcaaatataaacagtaagaatttaaatatttacttggaacacttgtgaaaaaatgatctattttgtaaggttgggttggtggtaacgacttataattgggtagagtcctgaagtatttagcaattttaaataagagttagtataaatagattaagttacattttgatgaaaattagacataaactaatataaaatatattatatcaaatgcctgaaataataactttttctttgttgttgcattacttgatttttttgagatacaccaattttttatttcaagaacactcagaaaacgattatggggtccgacttttttgtttttcgaccgtccaacaagagcttttctttttacccccacatgcatttgaaacatccttgtcttcttcttcttcttccacaagttcaatatctaaagtttggagcatccatgcatcagattttaaatgctcctttttttcctccaattttttgagcaacttaatggcatctttatttgcacacaacgtcaattctatatgatcagcagcaacagatgcaatctcatggaaagtatgacatatatggctatatcgctttccaatcgattgcttatgaatgtttcattaggtggctctaaatgataagaaactatttttcgtgtttttgcctctttactccatcgatttagaatgtaggtagatggaattcttctaacattcttcttgtccaacattttcaatgcatgaagacataaaatcccggcaaatctaaacttcatgcaactataacatatcgactcgtttacagcatcataattaaccaaatgctcccatgctacaccacagtaagatactttatattcatataccatctcagacttactaactttgttggcaacataatcaccaataactatgtattgtttctggaacaagttaaattttttgggtgtattcatttcctctgcatgttgcaacatctccacagtagcacataatacctacgaggtatgcatcatattgaagtcagcaattaattccttatatcgtcgatcctccaacattctctcgtagtgttcaaagaagcacaacaagttataactatgcttcaagtatttttttcaaaatattattcatactttcactacgttgtgtgctcaccatatctgctgtaaaagtatgacgttcatataccattgcccatttatctctcatctcaaacaaattcttcaaccatttatccgctgttaattatgcttctggagcatattactccatgccaataaccaatcttcttcttcctcatggtcatatacacacttactaaaatccatggcaaatcgttctgctccatgaaatacatgactcaacttctttgcagcattttggtaaatatgccaaacacataatcaatgttttgtatcagggaatacctttaggggttattgttaaaataggaacaattttgtcaaaatctttgattttagggcttttacgattgggcttcgaaaaagagcactttgggttctaaaatttgataaatttaccccctttaatatcatcttctctttttccttcttctttcttccttcttccttcatcttcgcagcttctcctcaatcccacgtttcttacaaaaaaaaaatctaatactattgattcatacatttactattgcattcgccattattgtacattggtctgtaagaattgtttttggttgttttccagacattgctccaagaaaagtctcaaaaaatacacttagatgagtcactggtttcatcatataagagagcattaccaaacacaactgtttgcttgtgatgattgaccccgacaaatgagcaaagggtctatcatatgcattggtcttataagttgttcaaagcaaatgacatctccaaaaagattgtaatcacttatagaccgatcatctgcccagaatatattaatgatcatatcatcctcatcaagttgcattgaataaaaaaagacgaattacactctctttttttctgaaagtattccaaaacagctccaccatcttccttttccatttttgccattcttttttggtatatgtaatttcgataatctttcttcaaaaaaacccagattttctcgcccccaacttctctacttgataatatgtttttatggtcaattatcctaaaacaccaatcatgtcgttgtagtattttaggtgtcaatccaaatgggtatgatgcaaacagataaaatgtgatcagaagtcactaagtcaagccaagcaataacagttttggggtttctaacagtcctaagcgaacatgcagaaaacagaagtaataacagaattactaaaatcactcgaccacaacaggctgatgctagaagtaggatgtggtcgagtaacaggtcgagtaacagacaggaaacaagacaatcttactcgactgcacagtctgttgccagacactgggtgtggtcgagtaagttggtcgagtgattgtaaaaactaagaaacaggcaatgagaacgatcaagcgataacgataaaacagagaaataagatagacgagaaattcctaaggatggggtaatcgagtagagtggtatcctagcctattcgaatggttaacaagcgcaatcaagctatccctagacaacaggttcaacaacagatcaattcactcccgtgatagaaatcctcaagcaaagctagcccagactaattcccattaacggaatctaactatggaggcaataagaacagactgataaagtcaataaacgctctaaacggccaatcccttgggatagagacgcatatctcaggaactagtggatcaagcattccatcgaacaccttctgggtgcgggaatgcttgagatcgaattccagttgatcagaaagaaataagcagtaaacgcaactagtcctaaagggatttaatcaattctaaaacttaaccattctacagactacggattccacaactactctatcccatccctaagagttctaagtcactactcagacaacatgctcaaagacataaacgcagataaacgataatattgcataagtaaagagataaagagtagagaaacaagatgacagatgaaatcaaacgcggaatctgaataacttggaaaaatctcgaattacaggttgtagaagcaaaagcggcgcagcagagtaaaacagaaaataaaactgaagcaaaaactcaatgtcgactggatgtctcaggacagaaccctaagacatctatttatacaaaacgaaataaaatgatagtagacgggccaataacctaatcgctcggcccatagagagataatgggccgagatgggcttcgtgatccgatggaggtccaggccgcttccaaacactttgtcttctcctcttctcttccttgtgctcagcttgtctagttgagtgcggatttgagtagactgtgaagacgtgatcgagtgtccggtcgagtgatgctgatggtggtgagtgatgatacttgaccagggggtcgagtaacttggtagagtgaatggtcgagtgatggtgatggtgtggcgaagtgatactcgaccagggggtcgagtagtgtcatcgagtggcctgagctgaggttactcgacctggtggtcgagtggatgggaagaatagcttcaaagtcactcgaccagggggtcgagtatgtcttctggttctggctcgtttcttccaatttgcttgcaaacagctccaaatcacctgaaaacaactcggaaatgcaatatgtatgcaaagctatcctaatcatgcaaagtatgcaagaatgatgagaaatgatataaaacagtgatgaatgatacgaaactggactcaaaacgatgatgaatggacaccgaaaatatgcaaattatagacatatcactactcatcatttcaacggttgcttttgctgaaatctctgacatctcggcacatctacatgttgtttttgagagatagttaattctcgatttcccttcaacaaatgcttcatagatgtcctcactaaataatggttatggttcatcttgaatgatacaaccttatattttccggtcttctcaacgtagcaagccatataagcattacaaccacaccgtgtgattggttgtgaatatgattttatgaccttaggttctttcctatacccttgttttgagcaaacataaagaagccttactaccttccctttttttcatcttccgttgtttgcctacattgaaaccatgattgcctccatactttttataagttatatatgcaatctgatcagaactgaactccattccaatatatatgtcatctttcttctcattatcattatttgcctctaaagcagcagcctctttagttacaacgtcatcctcgttgttagctatttcatcttcttcttcaaattcattggccgaagcttcgttttcccttattgagtcatattttttctcaaccaaaagttcttcacttatatgattactctcccttgcaactgttcttaacatttcctgatcaacaagttcaataacaaaaaaaaagttgctctaaaaaacataattcataaaacaaaattaacattaaaactcatacatgtattaattataattagttgtctctatttgttcacaaccaggcttaagaaatttttcttcaacaaagataagagaatctgaaactttacctcgagttgatgattaaaaaacaaagtattgttccttcttcaaaaaatctgtcgtgcttttgaaaagaacttctaaagataagttgggttacaagaaataaaataaagagatagcatctaaccctaatctatatctttgattaaaataaatatttatttatctataaaaaggaggagaaaacgtcataatttttttctttttattaaacttcttgtctttttcttcaaaattgctaaatttcattattaaaaaaaaagaggaaaagatttgaaaaacgtcagcttaatgtacggaagtgaataaaaagatttttatttcttttttctatttttaattttagctttaaattattatgtagtttaagtatgatatgacatgtttttattgggtaatgcaaagggaggtgaataaatgggttcaccccttcacccaagtttcgttccttggagagttggaaactttatcttgtagaacaaaagttatgtacattgtttactccaaactatttttaattttggaaaatagattagcaacttataatgcagttattggttttagactaatagttctagattctaaatatacttttacataacgttgcatgaacccaaagtaaacacaatgatgaacaaatatttttaaacaaatagtgaaaagagaaaaacatagatgataagaaaataaattacgacatatatgagaataatatttagacaaatagtaactaaaaagaaaaaattaaattctttaatttaatatcggaagctttgtggagaaattgaaaattaaaaataatcataagggactggtatgatatataagaagaaaagagaagaaaaataagagatgaaatgagaattaaaaaaaaaagtagaagaaatgtgtatgccacatgtatttatgggaggaaaaatttcagttatttagactaaaaagtagaagaattgggaagaaaatgtttaatttggatggtgaaaaaatgcttcgttattggacaaatgagagagtattgagaagatttatgttttcccaattcttttcctctatttacactatctagtcatacccttcatatatagagtcaaatactaaaataataattgatataacattacagacaagtaggtaaatgtttaatatctcaatgttgtttctctgaaataatatataacggtgccatataagttctgaatcaacatttcataccgcatagtctttcttgccatatcttaaatgtactagtaaacttgtttaaatttttactgtaatatttgacgcgattaaattcattttatgcaatataatccggagaatagcataaacagttcttctaatatatattacatctcggattttatacaaagatatcaatatcatttttattcatagtctctatatagtatccattactttggatatactttgaaacttattaagtttctatgaaactatctacaatagttacttagactacatacaatggtcatttttctaagcagttgaatgaaatacaatgatttattttttaaaaaataaagcttatgtggaggcaacaaagctgaaacattacaacatctttgaactctttgaagtgagcttcatattgccacatgtcatgcatttattgatttgttttttagttatataataaagattagataaagatatgtgtttgatatctattggacgttaagattttggaaatttgttatccaacccgatatttgaaattgattatatcgtagaatataaaatatttttttaatatttttatacccaaattcatcatttttatactctatatagaaacttgtttcattttattttgacaaaaaaaacaattttactatatttttgctaatagcttttagaaacttttgtttattttttgtcgtcttataagtaaaatagatcctaataataacctttttaccttccaaaattcttctaattaccctttcacctaccaaaattccaacaattttcagtttcaaaatcaatttcccaaccatccccaacatataccaaattatagatacccaccaaatttcttcatgtcgtcagctattacaaaccaccgtccatatcatggatcgattatgtcaccgtcgtctcaagcaccctcttattcttctactccaatgggtaatgaaactaatacgaatgttggagcaactgaattcccggaattttctacacaaatggctcttggtgttatgagtggtgttcacgaaactattccaaatgaagaggatttaacttgtaatcattcgagaagctccaaatggaccactgatcaaaatttggtgctactgagtaggtggattaaatatgaacaaatagtatcgttggtagaaaccaaaaaggtgagtcataatggggtaaaattgctgagtactgtgctcatttgatactccgtgtgatggagttttgtgcagaaataactacaactatgtgtacaaaagtttgggcaaatgggctggcgcttaggataacgttaaacgcatgcaacaaagtgggtggtctaaggatggtgtattggcaaaagcgcatgaactatattcaaatgctggtaatggaaattttgaattatattagagtggctctcaatccgtgatcaaccacattatggtagtcaagtagaaggaaatactggttctggaagtagtggatctaagagaacccacgagagtgatgtcagggatgcaaactctgtaggatctagtgctcgtccaatagggagtgatattgctaagaaaaaaacaaaaaagaaaggtaagggcgcagccgtagaagtaatcaacgaagaatggaatgaattcaaacaattaaagacttaagagttggatcgattgaacaacatatccatgttgcaaaatgagacaaacgaattgattaaggaaacgacccaaactaaaaagatgaagatgtatctcaacctaactgaaaaggaacatctcgatgacaagggcaaagagttgtttcagaagttgagccacaatttattttgaaaataattgttgtcaagtggctatttgtattttgtcacttcgtgctttaataatttgtgtttgtcactttctcattttgtaatgattgtttgtcattttctcctttaataatttgtattaattccttatgctttaataatgtgtgtttgtcactttctgcctttaataatttgtattgtcatgttatgatttaataatgtaatctgtcagttttggcttttaataacagaattttatccttatccttgtcttttgtgttttaaccactcaatttgaatccaatcctctagccattttttaaatataaatagggactctttcttccattgatgtaccaataccacaaatctcttcttactaaaaaatattcaatggatccatcaaaatatccttttgatattgaaccttaccaatagcagtctaaaattgaagagaagtatattatcaactggtttagggagcgccgaaacaaaataaaggaagactattcatctcatagcaagagaaaatacttcaagagagatcatgcagcagcaaatcaaagactaattgacgaatactttgcaattcaaccaacatatgaagatacaatgttttgtaagcgctccgagtgcgaaaacatgttttacttgggatcgttgcagacctatcaagcagcgacaactacttcaccaaacgatttgaggcaaccaagaaagaaggtatatctctattagaaaaatgtactacggccgtggagatggccgtggaaatggccgtggtggtggaagtagagatggtcgtggtggtggaagtggagatggtcgtggaattggtggtggttaccgtggaagaggaataattccggctgcatttatgggccgtggccgtggaagtggtaaccatggtcaaatgtccattgacgccttgctagctcaagaagcaaggaaattgatgtcggctcttcatccagacagacttgcgtgaacgttgtggtacatgtgaatgtctctcttgtatatatatatatatatatatatatatgagatttgcaaagtgattgtgtgcttggtgtttttaacttgagtaggacagaatttgcttcacaaattgataaatataagaacttgtcaaaatgtataactgaatttggtgtcggattataaatttcatcactggtttttatatatatgagatgcggaaaattgattgtgttatttgtgtataactgaacttgtgaaaaattgtatgattgatatcgatcaatatcattattgtatctctggtttttatagaacataattaaaagttacttgtctactttgttattgacttgattaggattaacagaaaatatgatttggttcacatctatatatacatttttgcagtcattttgtgaaataaatcctgtagttgagacttatttacaatggttgccactggattttaatatttgtttttgataattagaaaaaaaatcttcgaattaaatatttgacatttaacaattttcctaaaatctctctacattaactacacgattggttactaaaataaaactttcaaaatatttaatatcatttaattactacaaaattatcattattgatattgtttttctgcatgactattacaattcaattataatcatcaaaccgcagagatatttgatagcatttaattactagataattttaaaaataaatgattcataaacatatgataaataagatcaacattaataaaataaatgagttttttttacgggacgggttggcaggacgggtttggcaggacgttacttaataacaattctaaactataaaataaaaatattttatagatagttacatagatagttacaaattacaaacttttatatatattaattttaaagtataaattgtccccgcggtataccgcgggtgaagatctagttgatcataatttatgaacttgtgaaattgtttgactgatttggatcatgataataattgtgttattggtttttaagttgatgacataatcaaattgattgtttgttatttattaattgtgtctctggtttttatagaacataaataaaaataacttgtatgctttgttatatacttgattaggattaacagaagaaatgatttggttcatgttaataattgtttttgactcaagtaaatttgttaattggtttacatttacttgagtaaaacagaaaacgtgagtaaaacaaaacttgattgttttttaaccgtaaacgaaattatctacatttaactgaattgtttctgatttgtattttgttccaacgtctatttgtgaaacaaaacaaaaattaattgtgtgtctaatttgttaattttctggatttgaggtttggtatcgacaaccgtcctcagcgtgcaattgtagctgcagtaagaagacactttgatggtctatggttcaacatatcatttgttctccatcatgctatacttcaatggtggggagactttattataagtttgatatcttttaccaaatacttcaaaaaacttaatctttctaatttgtaaccttaattgtttgtttttctttcggagcaatctttctattggaatccaatccatttgaatgatgtgtatcacctctggtatcatgtagttgctgcccgccttagagacatgatctgtaaggctaaaacttccgagaataaacctgattggataagtgaggacacatggcaggctatgttggagtagtggagcactattgaagctaagaagtagagcaagacagactctgccaatcgactctccgaccgtaacgtgtttgggccacatcggcacacagcaggtgctagatcttatgaacaacttcgaaacataattgtaagtgaattcaaatttattacatttttgttatcttctttataagtaaacgtgtcattaatgtgttgtacatgttttctacagtggtagaaggaaggtgttgagccttcgatgctctgcatccttaggaagactcatcgtaaagctgatgacacatatgtggatgataaggcaaaggcctttgatgaagaaattcagagacagcttgacgagatcgagatctctagaaactcatcaggtccttctactactgatgatagcaccaatttcacaggcctcactcgtcttgacgaagacaatatatactacaaggtaacgagtttctagcactatagaaactgaagttgttaatatggtctaaagttgtttagcgctaaatttttggaaactgaagttgtttggtccaaaattattaaaaaatgaagttgtttagcactttaagaaactatagaaacagaagttgttttgtccaaacttattagaaactttatcaactgaagttgtttagaactttaagaaactttagaaactgaagttgtttagaaactgaagttgtttggtccaaacttattagaaaacttagaaatcgaaattttttttttttttttttttttaaaaaccaaatttgttttgtatgttctaaagttgtttagcactttcacaaactaaagttgtttatttggtctttgatttctttaaaggttatagcacctcaaaatggaaggatttttggtgttggagatatcagtacacgcgagcgaggtgaaagctcaacagctggtgctttgggtagagtcactcttgaacgccaagtcataaccttgcaagagcagctggcatctgttgtggagtacatgaaacaatacatgccaaatggtgcaccaaactttggctcgacgcagcgtacagaaggaaccgacgcttcagtgaccagtctagaccgtgctaacaacattgagaatgaacatactgatcgggaccaagatgatgacattaaatcatttaaccctttgaatgaggatgatgatgaggatcttgatggtgaggatgaagcaggttctgctgccttttaagtaatctactcgttaaatttcctactctttttatggtttgagtattgtttaattatgcttttcgtccaattaattaaggttacaagacattaaccttaatttattgctttctgaattatgttttttatcttattaatccagacttttgtggatgaagatataattaactattttgatgtatgatattaattatgcttttctgaattcttgtttttacatttgatttctttttttatgcaaaacaaattaatacactaattagaatgtattaaaacagaattagtcttttgataagttggcaacaaatataaaaaatataattaattgtaactaataacaccaaaatagtcgacataagttgttgctaaattgcaactaaagcatgtggtagtttgtaaataataagtgacaagaatatcgttagacttgttgttaaatttttgtgtctacatcgtaacatttgttacaagaagatttgttgcacataattacggttcgtctgaaggtaataagttgttgcaatttacttcaatgatcttgtgacagtttgtaagaggtacttacagtgtatcttgtaacaatttgtatcaagtttgttattaacatatattgtctcttccttgtatcattttatgacatgtttttttgttgcatttcatatcagttttgttattacatttctgtaactaagtggaaagaatatttactatatactttttgctatttggtagcaattagtttcaaaaattctgaagataaatgttactattgtgcttcaattattttagtggtaagtggtaataaagagtatcaaagtatgtccacgatatttgtaacaaattttccatgagtttttagtcttctttttgtaagtttataacaaggttttttgtggctacgttgtggcaaatttcttaccgtttgccacacaaatattttgcgtcaagaacattgttacatgttttattttgatgcttttccataacaaatccatatttgttacaaaattgttattatacccactattttatttgtaactatattaaccaaaaattaaagtgaatatagtattacttgttttaccactattacaaaaaaataatagatacatacatagtgttacttgttctaccagtagtaccaaaaaacaacagaaacatacatagtattacaaaaggaagaatccaatattacatagttgtccagtcaaacataaacaaaacaactgtagaaacaaattaaatactcgtatttccaaataataaccattgacacgattgccttggacgccatttgttttgcgtctttcatcgttgtggacgcttttccccggttgatggaaacttttagcatttttttttcattcctatgttttttagatagtggcactatcttgaacgctttgatttcatctgagactttccactgtgaactattcgacactaaataaatagttctataatacgccaatgtccaaaactccgcccaataatattttgaaaccaaatcaggtaattccaaacctcttcttctagtttcatcatcaatattactaatgagagcgcctaatgcatcaagcattggtattaacgagtacttccttgcgttgagaaacacactgttcaaagattgcacacaattgcttgtgtctaagttgtaactttccctggaaaacaacaccttggccatttttctttcataatggtatcctccatatacttggtcgcactaggatatctcaacttaaacattctatactatttgttgaagtcagcaatggtgcattgccgacataactccatgaatctccatgtgattacgctctattggtgttagtaggattaactttcacattttgggagaaatatcaaatataatacccttgatgagcccagtatacatattatgtatgccctttatgaggcttgcatttctgttgctcatgaataccaattcaaaagtatcagatacaacaggttttagcttctcgaaaaaccaatcccaactagcatcattctcacagtcgagtacgccaacctctatgatataatgatgacgattaggatcttgagccgaggaaaatactagtaaaccaccatattcgttcttcatatgtgttgcatccacaattataactttcctcatgactttaaagcgttcaatactagcttccaaagctataaataggtattaaaatttatcattctgatccagtttcaaatatgttattgtaccatcatttacattcttcaacatgtacaaataactattgatatccttgtagcttttttttgggctatctttcaaatcacaaaccgcatgatatttcctcattagcgttgtggagtatgatatcttcacacctaattttgtctgaaccagttccatgataatccttggaactggagtatccatttgtcccggaaacttatcatgaataagtgctgcgactaattgtgagttacctttcctttttctgatcctactactatttttacttagcccaatgcaactatgtatcttattgtaccttctaatcgagaagatgtaagtattacggatatttgacgctcgtaaacaccaagaacaactttttttagcacacttaaagacatagtgctccttatccgactttttaatcacataaccaaaactgttaacaaatgcaactctatccaccacctcgtgcaatgcctacttgtgtggaaatttttgacgtaaggacaaaccaattccttcttaccattcttttttaaactgaccatgttctacagcaggcggcggctcaacatattgttccccctatcagaattatccatagactcatcaacggtttcatcgcgtgaaacattttcatcttcttgagtcacgtgatcctccactattgcctcaagttgatgagttccttgttcctcttctaagcagaagataatgtattatccactctgatttcatcctcatctgaattcaactccgcatagttcttaccaacataactttttccactctagacaattgttctgtcaattgcggtttagagatttcctccacaactaaaacacttatgcggttattttcttcggatgctatataaacaaagagatcgtcatcatcacaaatgttcatctcttcctcgggtcccaacaatagtggattgtacctcatttgcaattttaccttactttcatctaatacaagcttcgtaaatatcctattttctaacatagagagagtaattttaacctatgatgtcttcatcatcaaactatacatgcgatctttgaatttaaaatatatgatcacgttctctctcattgtatcgtgccaaaacaatatacattctcagtcagtattactagtaataccggttctactacatttgttagtaatactagtacaaaaagaaatactacatttctaagtaatactattgcaattaagacatactaaatatataaaacctattgtttcaggtaaaactatacctagtttgaccaatattattttcgcgacaagaacacatattggattattcagtgtgaatcagcatgtaatcaattttttacccatttacagaccaaattgatcctaaaactatgcttaaacttctaatgtgggtaccaaaacataataacccaaatctaattggactgaatatcaaaatatgtaaatccaaagtgagagcttttgaagttctctccaactcaaagaacatacatggacttcgtagcttgacgcagcttacatgaggagaaaaaacgggaacaaatgcagcaggatagctagctcacctgaagaagttgacggaagaagaagagctggagttggagctcgtttttctttttgtttgtttttctttttttctgtttaattttttttatttataaattacaagggtaaaattatctttctacttttcattaacacacaaagggatatagagattacaaaaaaatatcagaggtttgatgtcctgaaaggaacatgagagcaatctctgatcgtcgagagaaaaaaaagaggaaacgcgttgcttccacgcgccaagggttttcaatttcatatagtttctcatttaaaacatccacaactttccaaattgatactattatgaattgtacaatctcggtaacattctcacatgtatcgatagataataagatgcatcagattcagttttgattgtacaatctatataagggtggagaaaaagaattatataggcaaatagatcaaatcgctctctcttttttttattttcttttaatcatgttttctgctttcagtttttttgtcagttggttctcgagttagtagagactcgaagtaagtcgagcagtttaatttgatgaagcctatttagggaggaatattgctgaagcccgcttgagttacttagcaagattctttgatttgagatcgtattactgtatactttgtgttttattgtgtattactgtttgagtttgatgtctttctctgtttcaattagtgtttaataatacaatctcgtgattaggacagatcttaaatatctttaagactccaagtatataaatttataaaataattaattaatccatttagaatatacagatttcagatgactaactaaacctttgaaattatttcatgaatacttaaaatttttgttagtattttgctaaagtttttattttatttattgttttattaattacaataagtaattattaatattgaagttcacgcgtccgtaagttatttgattacatgcttagtaaatttaaggaaatactcacaaacaaaacttggattttttctgaatcaaagctactgaggattgaaccatggcggtcatgaattagttaaccatagaaaataccagtagactaatacttataaccagtttaaaataatataaacccgcaaaaataatactttccgcagtcaaattaattttatttacagattatttaagagctaaagcaaagccttaaaaaaaatcgaaagggccatttggcccaagtctttgtatatttgtgattttccatatccctatagaaaatgaatcttctataaatgattggttgacttgtttagatgaaactagttttttttagtcaaacggaataattcctagataagtagatagaattactattttctaatcatccaaaacaaattcctaggggttttctatttattagatctatatcgtcttctttggtctagaataataatggctatgtctggtcctcacatgcaagatagtaagggttgagtgtatattgttttgttgttagcctaaactaaaatggatgaaaccaatttctacaaaattcatatgtttattaatcatttatagtacactggaaaacaagtatttcaactaaattactcttaaaaaggataaaacaaagacaattcttctttctatcttttattagctgaaaatttttgaccacttttctatctttttcttaaccttttcagtttttcattttctaacttccttttataattctcactttccaccgatcaaacttttaaaaagatttaatgtgcgataaccaagacgggccattggttaagtttggtgttgtctctcggggaaatggagataaaaaggaccaaagctactcttgccctagaaatgaggtcctcaaggtatggctcgacccatcgtttataggcaccttcaccaatttcgttgatacatgtgatgtagctagtaagaacgccactaagctaagtgtggacgttttcgtaagatccaagattagggctttctcctcctaaaacggatcatcctatcttttgccaactccatcatctcttcaaatagatttgtgtcctccttcacaccaagcatatcattctccatctcctcaagttgttttgtctcttccatcacaccaatcatagccatgtcaatcctcgcacggaattcttcaaaacgatgatcaataagtcacggcgtctcatctttgagagtgacgaggaaactgtcttaagctccaacaaaaagttttgacatgactgtttgcgatcacaatattttttgctaacgccaataaccattgttatcattaggatgaacaaacagaaactttaaccaatatttttgaaaggtttttgtttctttcttctctctttaattagtgaatttcaattatattaactggagaacgaggagggagctatggtgttcttttatacaagcaaaacaacttaatcaaattatccttaaaattattgtattcaataaactataatagttaggaaaaaaatttaattttgagatcaatctaaatagttcagtgcaatgtgaattgaagctataatctagtgaagttaggtttaattatccacaaagaggattcttaattaggttgtattattttcaaaaactttctatttaaaaggttgttatggtcatcttttcacataaactaatgaaaatttcttaatagtaaaaaaaaacaattatgcatgtgcaagtgaaataaatttattaactaagacaatacatgattgtaactttgttttatctgttcttgtttatagatagcttttgtttgtatctttctaaaaatagtaaagacaaaaattatgtttaatgtactagattttaacccgcggtataccgtttggacaatttatttttttaaattagtatatataaaagttcgcaaattatatctatctataatatattttttatagtttacaattgttattaagtaacgttcttccaaatccgtctcgccaaacccatcccgtaaaaaacgtctgcaatacaccgctaatataaatatataattataaataaatattttacaggattgcaattgtattttagtttgtcaaacaaatttttgttttacatagttgccgaaatctagttcaaattttggagaaataagatttagtgaattgataagaaatgtatttaggtgcgttttactcatttttaagggattggaattgtattttggtttgtcaaatattttttgttttaaatagctgctgacatctagttcaaattttggagaaatgtgcgtgatatatggaattggattatatatggaatgtttttcgtttgttaatcaatttattgtcagaaaataatcaataattaaaagcaagtggcactcattgaaaaaaagttctaaccccaggatttatttcacaaaatggccgcaaaaatctatatgtagatatggtcgtactagagccatcgtggtggagagagtagtagattttgacaaaaataaataaataaatatatatctatatattattctggatttttccaatataatacagatcaaaataattaaaaagaaacgaattctttttccttgcaaaagaaatttttgcactaggtagtatattttaatgtttaaaaactatttaacctttcgaaaactaattctctctttctttctttacaattagataaaatcattaaatccaagaaaaaattgtttgttcttataaagctagtttattttttgaataaaaaaataataataccattttgtttatttaagaaaaaaaaaactaagataaagaaatattgcattaaactttctaataaaaacgttcatacttggacatcatgatcatactgacagaaagcccacaatagttacgtaaaactttgaaaagttatttttgtcccaaaaacatgattaaatttgtttgtggttattagaggtaattactctaaaaacattctattaaattttctgctaaaaaaagttcttacttgcgcatcataatcacaaaagattcatcatatctctatgtaaaaacttaaccaaaaatatatcaaaaatctaaatgggccgataaaacaatagataataaatttaaagcccaatgttctgataaaacgttcatacatgggcatcatgatcacaaaaggctcactataatttaagaaaaatctaaaccccaaaacccaatatgccccagaaatcgagcaataataaaaaaacaattctccctttttagtgtcaacaatcgtgataaacattttatcccttttttctactgcttatagaatttcttctatttcttataaatcaggttctaaaaaagattgccgatgttatggtagcgaaagatgggaccggaaattacaacacaatgaatgcggcacctcaacacagccaaaagagattcgtcatctatataaaaagaggcgtttatgataaaatcgttgtcattggaaatacaaaatccaatttaactcttatcggtgatgcccaagattcaaccatcatcacagacaatttaagctctagcgatggtaaaagaacgttcaacaccacaactgttggtaagaattcatgttctcttcttgaatagtttatagttttctcttctttatatcaaattataacattcttaaagacattcctaattatactgaaaatacgttttgaaccttaagagtgattgattcatcggtgtagacatgtgcttccgaaacacggtcggaccagcacaaggaccagctattgccttcagtgtgagtggtgatatgtccgtaagttaccgatgtcgtgtcgagggatgcattctatttatagggaatgctttattattagcactgtagattttatttgtgaaaacgcggcgcggtctttcagatctgcctaattgtagcaagacagcctacgagggggcatagcaatggcattaccgcccagtcacgcacaatatggacgataactcgggcttctcgatttaaaaatgcaatatcactacgagttcagacctagatctggcaactgtgaagacatatcttggtcgaccttggaggatattttcaacagccgcggttatgcagtctttcatcggtgttttagtttatcccgcaggttggactctttgggaaggagaaacttgtgtatcaactctctactaccgcgaatatcaaaacagggtccgggagctatgactaacaaaaaggtaaagtggtcagggtttagagctattacagattctaaagcggctacaaaatttactgttgccaagctattagatggagaaatgtggctgaaagcaagtcgaatttcgtacaaacgcggactctcatgatatttttcttcttatgcttcacatgtatgagttaacatacttaataaaataaattatctaccaatttctctattattcgtctattattctagagcttttaatttaaactagatgaacacccatgctacgcatgggtttttgtttttaaaattacctaaaaatatgattatggttttgtgttgattttgatgttcattttgataaattcctatctattaaatacaattcttatattttatgattagatttatctataactcaaaatatcaattctactataatatgtacatatatttatatatctattattctaatatttcactatcatgatcacatacaaaaacagtatatgatatattgatacaatgtatgtagttatattacttatgtgttttaaaacttgcctaatttaattgtaacaaacaattatttattccatatattctcttgtcatcaactacacaatcacatcatgatatgctagtaattcaagtcaacactttaattcttttccttgcatttagccatatagagtctcatattttttttgtatgtcgaatgtcgaatgtctcagatgactattacgttataaaattgtatatcaatgttaccaagttatcagaacgcacacaaatatactgaaaacgtttatatgataaattatattcacataacgtaataataaaaaactatccaattaaaattactaaatttatatgaggttaggtagcaaacatctaaactacaacaaaaattaaatatttagccattatggattaatgaatattgataaaaaaaatttaataacataagtagaataaaatgaaaatagcacttgatacattattatgatttttttaattattgaatgtttttagaaatttatttaagcgtgagattaatgaagaatttaacacaacaaaagactcatgatttttctcaattaatttgctaatcttttaatttaattaatgtagaatgacacatgtcattttcttatatgatgatgtgtcactcctatggagagagttgaccaactttcatatatatgatttcagctgttgataggtttagcatcaacattgtcatactttgaacacaaaacaacatttccattgaaaaaggttgaagaagacattatcaatcatgatattaatttcatccatgattttctaagacatgactagttcaaactctaaaacttttgtaagaaaaatctctttatgtaataaattcacattgaatcatcaaaatcttctaattcactactctctgggtcatcaggctatttaaccacaatcatctgtgtacaaataaaaccattcatatttactatttagtcagaattcacacataaaagcaaaaagaaggatcaagcacattggtttacctgccaatatcaatagttttggctaatgcacaatcatgataagttttaaaagcctcaacaactgcaggaagataaagcagagaaggcgggtactcttcatttccaatcataaacgtcatgtttctctagtcctctactgtaacgcccgtgaaccgaaaaatcggttagggtttgtttttaaatcatctggtttaattggttgggttaattggaaaccctagagtgtgcctataaaataaggaaactcgaaattagggctttagttagccacttttcgttttataaaggagaaaaagagagaaaaggagaatgagcagaatcgttagggtttgggagaaatcagtttcgtcatatcaaatcgtggtaaaaggtaacgaaatttggtagagttattcccaagtcctttatcgttattttctagtttacagaattggatttggattaaaattggttgagttattcgcagtttcgtgagacacgttttctcaaacgcgaattaggaccagcggagattgaaactaagatcgtggtctcgtctgttctttgatcggcaggagattttgtgggccgttttgtgacgtctgcagatcagatttcaccggagcgattgaatagttaacggttagcttgtattttagggtttcatctttgagactgcttgtttctggtgttttcctgtccattttgcttcaaggttgcttttggttgtggacttgttgtaagacgtttctggactgtttcagacgcaaggagagtctctcctgggtttaattgctattagaatcaatttgttaaggtgagtgcgtgaccatgagcttatctgagcgattgggttgtgtgatttgttttgtgtgatgatatgtaggtgtggtgaatgtgttttgggtgaattgttcaatgactggtttgtttgtattgtattcgtgattatacctttgtatttgcttgtgtgtatagctcatagatgggaggatcgcctcactaagtatttatgataatacttacgcatctcattgtgttgttgatgcaagtaaagataaagtgtgatcgtggaatcatggcaaggaagagaggatgatctaggaactcgtttgtttgatttttggtgtttttggttattggaacccggttaggattgtcagttattcttggttttgttggtcgaattatttatttattcataaaatagtatttttgacttacggtttaattattatgttattggttgttttaattagatatttatgggaatatttaattatattttttaaaaaaaaatgggtcgggttgtttcaatttggtatcagagcgattacggttctaggatgtgtagaaaaattatttgatgaattattttcctgttgattgatgtgggatgagctagggtgttagcatattgaggattgattatggagtgtttagtcaattgtgtgtagttggagtcctagcatcatcttctccgagccttaaatgagattcgacggcaagttgtttgtaatatattcgtttgttttagtttcttagccatttgttcttgagtagcgcagatggttagaggagctggagttcgtggtcgtggtcgcggtcgtggtcacggtaggggacgagtcctcgagggtaccggcgagagtgatggccacagtgccacagttgagcagagtgtgggttcgcagcctgagtttgtggagcccggggttaggaacggtcttggtgccgatatagctggtgcagccggagtgggggctggtggagctggtgtcggtaccagtgtgcatgccgttggtgctgagggcccaggactgatgggtgccgcagctggaggagcccaggttccagaggttggtttggcgggcctgttgaggcagttgttggagcggttaccaggtgtggtaccagtggaggctccagttgcgccacgagtggcggaggtgcagcagcgggctgcggttgctgaggaggttccatcttatttgaggatgatggagcagttgcagaggattggcaccggttatttctctggtggtactagtcctgaggaggccgacagttggaggtcgcgggttgagcggaacttcggttcgaacagatgcccggcggagtatcgggtagatctagtagtgcattttctagagggggatgcacatttgtggtggcggagtgtgactgccagaaggaggcaggaggatatgtcttgggcagatttcgtggctgagtttaatgccaagtactttccgcaggaggcgctcgaccgtatggaggcgcgttttcttgagctgacacagggtgagcggtcggttcgggagtatgaccgggagtttaaccgactcttggcgtatgcgggtcggggcatggaggatgaccaggcccagatgaggaggttcttgaggggacttcgaccagatttgagagtgaggtgtagagtgtcgcagtacgccacgaaggcggcactggtggagacggctgctgaggtagaggaggaccttcagaggcaggtggtgggagtgagtccagcggtacaaccgaagaagactcagcagcaggtgacacctagcaagggcggcaagcctgcacaggggcagaagaggaagtgggatcatccttccagagctggacagggtggtcgtgcaggatgtttttcttgtgggagccttgaccacaaggtggcggattgcacgcagcgagctgagacgagggagtgctaccactgcagggagaggggacatctccacgtcaaggttgctggagggcagtttctagcggttctggagagagcgaagggtgtagatattcagattgcaggggagtcaatgccagcaaatttgattatcagccctgtagagttgtatgatgttattctggaaatggattggttggattattacagagtacatcttgactgccaccgtgggagagtttcttttgagcggccagagggaaggttggtttatcagggagtgagacctatctcagggagtctcgtcatctcagcagtgcaggcagagaaaatgatcgagaagggctgcgaggcttacctggtgacgatatctatgccggagtctgtggggcaggtagcagtgagcgacattcgggttgtttaggagttcgaggatgtgtttcaatcgttgtagggattaccaccatcatggtctgatcctttcacgattgagttggaaccagggacagcgccgttgtctaaggcaccctacaggatggctccagcagagatggcagagctaaagaagcagctagaggatttgttgggtaagggattcattcgtcctagtacttcaccttggggagcgccggtgttatttgtgaaaaagaaggacgggagtttccgcttatgtattgactaccgggagttgaaccgggtcactgtgaagaacaagtaccctttgccaaggatcgatgagttgttggatcagttgaggggtgctacttgtttctccaaaatcgatttgacgtcaggttatcaccagatcccgatagcggaggcagatgttcgcaagactgctttcaggacgagatatggacattttgagttcgtggtgatgcctttcgggttgactaatgcacctgcagcgttcatgaggttgatgaacagcgtgttccaggagtttttggatgagtttgtgatcatctttattgatgacattctggtgtattctaagagtcctgaggagcatgaggtacatctgaggagagtgatggagaagctgcgggagcagaagttgttcgctaagttgagtaagtgtagtttccggcagagaaagatgggttttctgggtcacattgtttctgcagagggagtttcagtggatctagagaagattgagactatcagagattggcctacaccgacgaatgccactgagatcaggagttttcttgggttggcagggtattacaggaggttcgtcaaggggtttgcgaatatggcacagccgatgactaagctgacggggaaggatgttccttttgtgtggtcaccggagtgcgaggagggtttcgtgagcctgaagtagatgttgacgagtacaccagtgttagcattgccagagcatggagagcattacatggtgtatactgatgcctcgggagttggtttgggttgtgttctaatgcagcgtgggaaggttattgtctatgcatcacggtaattgaggaagcatgagggcaactatcctactcacgatttggagatggctgcagtaatctttgccttgaaaatttggaggtcttatctttatggcgggaaagtgcaggtgttcacggatcataagagtttaaagtatatcttcactcagccagagctgaacctgaggcagaggcgatggatggagttggtggctgattatgatctggagataccttaccatctcggtaaggctaatgtggttgcagacgcgttgagccgtaagcccgtgggcgcggctccaggacagagtgttgaggccttggtgagtgagattgatgctttgcggttgtgtgctgtggcacgagagccattgggattggaagctgtggatcgagcagatcttctgattagagttcggttggctcaggagaaggatgaggggttgattgcggcttctaaggcaaagggctctgagtatcagtttgcagctaatgggactatccttgtgcatgggcgagtttgtgtgcctaaggatgaggagttgcgacgggagatcttgagtgaggctcatgcgagcatgttttccattcatccaggagcgactaagatgtaccgagacctcaagcggtactatcaaagcgtcgggatgaagagggatgtagctaattgggttgcagagtgcgatgtttgtcagttagttaaggctgagcatcaggtgccaggtggcattttgcagagtttacccattccttagtggaagtgggattttatcacgatggattttgtggttgggttgcctgtgtcgcgaaccaaagatgctatttgggtgatcgtggaccgtctgactaagtcaacatattttctggccatcagaaaaaccgatggagcggcggtgttggctaagaaatatgtgagcgagatcgtgaagttgcatagagtacctgtgagtattgtgtcagacagggattccaagtttacttctgcattttggagagcctttcaggcagtgatgggtactaaggtgcagatgagcacggtttatcatccacagacagatgggcaatctgagaggactattcagacgcttgaggatatgttgcggatgtgtgtcttggattggggaggtcattgggcggatcacttgagtctggtagagtttgcttataacaatagctatcaggcgagtattgggatggctccttttgaagcgttgtacgggaggccatgcaggacaccgttatggtggacccaggtgggggagaggagcatatatggtgcagattatgttcaggaaaccacggagaggatccgggttcttaagctgaacatgaaggaagctcaggatcgacagtggagttatgctgacaagaggaggagagaacttgagtttgaggttggggacagagtgtatcttaagatggccatgttgcgaggtccgaacaggtctatctcagagactaagttgagtccgaggtacatgggtccgttcaggattgttgagagggtgggaccagtggcatacaggttagagttgcctgatgttatgcgtgcgtttcacaaggtctttcatgtgtcgatgaggaagtgtctaaacaaggatgatgaggtgttggctaagattccagaggatcttcagcccaacctgactttggaggcgagaccagtgagggttctcgagaggaggatcaaggaacttcggcggaagaagattcctttgatcaaagtcctgtgggactgcgatggtgtgacagaggagacttgggagccagaggcgaggatgaaggcaaggttcaagaagtggttcgagaagcaggttgctgcatgagtttgtctttccttggtttccagtttcactgttgttgagtttttgagcttttgagttgttgttcttatttctctttcatttgtattttcgtttggagttgtaacgatcatgacagttgatgattaataagatgagtattttttcttggatttgacttcagttgtcttatttaagattgtgttgtgcggtttccaaaaatggaaagtttcctagaaaggacttgtctatttttggaaagtttgagtaaacaacctaagagaaaggtgtgtttacgagatggccgggagttggtcataaggatgttttcgaggggatatgatggatggtgaggcatagaggtgtcttacgcgaatccataagagagtctggagatatgctcggaagcgtttagtattgttgctcgagggacatgagggtcccaacgactcgtgaggagcggggtatgctcctgaggtaccggtaactcgagggacatggtgtctttagagtacgaggggtacggtggcttcaggtgacgatccgagagcacgctttagggtgacgactcgagagcgagttttgtggtattattttctacaagtgtcgtaactcgatgactttgtggctgagagtgagccgacacaactcagggtttgactttgagtggggaagataatatgtgtgatacccgagataccgtaggccgaggcctgagagtgatggtttatgctcgaagattgcggtctgagagtggagagtgagttgtgagcaacaatgactagtaaatcgtgagtatatcgactggatagaaagacctagagggggtctggttggagggagtgcggactgtagtgatggttacacggagttcctcggagtggaagggtgaagctagattcgaggacgaatctatgttagtgagggagaattgtaacgcccgtgaaccggaaaatcggttagggtttgtttttaaatcatccgatttaattggttgggttaattggaaaccctagagtgtgcctataaaagaaggaaactcgaaattagggctttagttagccacttttcgttttataaaggagaaaaagagaaaaaaggagaatgagcagaatcgttagggtttgggagaaatcagtttcgtcatatcaaatcgtggtaaaaggtaacgaaatttgttagagttattcccaagtcctttatcgttattctccagtttacataattggatttggattaaaattggttgagttattcgcagtttcgggggacacgttttctcagacgcgaattaggaccagcggagattgaaactgagatcgtggtctcttctgttttccgatcggcacgagattttgtgggcagctttttgacgtctgcagctaagatttcaccggagcgattgaatagttaacggttagcttgtattttagggtttcatctttgagactgcttgtttctggtgttttcctgtccattttgcttcaaggttgcttttggttgtggacttgttgtaggacgtttctggactgtttcagacgcaaggagagtctctcctgggtttaattgctattagaatcaatttgttaaggtgagtgcgtgaccatgagcttatctgagcgattgggttgtgtgatttgttttgtgtgatgatatgtaggtgtggtgaatgtgttttgggtgaattgttcaatgactggtttgtttgtattgtattcgtgattatacctttgtatttgcttgtgtgtatagctcgtagatgggaggatcgcctcactaagtatttatgataatacttacgcatctcattatgttgttgatgtaggtaaagataaagtgtgatcgtggaatcatggcaaggaagagaggatgatctaagaactcgtttgttttatttttggtgtttttggttattggaacccggttaggattgtcagttattcttggttttgttggtcgaattatttatttattcataaaatagtatttttgacttgcggtttaattattatgttattggttggtttaattagatatttatgggaatatttaattatatttaaaaaaaaaatgggtcgggttgtttcatctacaaatccaaatcataaaaacattgaatatcgagtttgttccagatttaaggaactttatttaaaataaatttctaaataaactttattcaagaatgatgcaacaaaaatgtttttagtcttctctgacaaaacatacaactcacaatatcaggtgttcaaggagacattgcaaaacacaagctttgatccttattgagattcaagaatgaattttatgcaaaaaaacattcaagaactcatcacgtgacgcaacgcaaggagcaaagtttccgtactaagttcaaaagaaattgccacacataaagacactaatgtcaaacctcagcaaagtttcgattacttgcaatcttgaacaaatttttgttaaaaaaattttgataggaaaaaaatttaaatgaacttaaagtgtttacatttgatattcatcattactcataacaaaataaaaataagactcactaatcagaatatggcgtaacaaaataaaataaaatatggcgtaacaaaataaaacaaaatatggcgtaacaaaataaaactaagactcactagtctagtaatcaaattatgcaatgattccaaatctatctcgtgtgagttgatattctcatgagcagaaatgacctatgtagcataaccacaagcacatcatattgtcaaaaattctgcaacacactacagatgcgtaacatgaaagccaatcattctaatcataggaactaatgtaaaggtaaacaacatcataattcatacctcgctattaatttccttagagagatcaatttgattttctaccttatcatcgacactccggttaggattgtcagttaaatgtcttttcacaacctgataatgaaacgagttaagatccagatttaactctagaactaaatatatcaccaaaaacaccatagataaagcatataaaaactcacttcaagggtcttagaaacttactccatattatttgtcaagttagccacggtagtagccatgttagcttttgtcacatacataaaggtcagtgaacaatcataaacagtttttagttccatacaacattgaaacctcctttgaccgaaatagtgtgtatgaacatcaagggtttgtaggttagctcaaaacaaccaaaaacgaagagagtcttgatgagcacacacacacatagaaaacaatacctaagaaactatttgagtagaattataatttcataatctttacataccacaagaaacaccattcatgatcgttatctgcttcagcgaaggtaactgtcaaacctccattgccaatcgttgaaccttcacattattcccaattgcaaaagaaatcaaatgaatttagtacatgaagaatctggcggaaccaacactcagtcacaacattttcacacttaattttactcttaatcaacagaatcatcagagaaatctcatgttttatcactagaacaataatcgacaaagagaaaagtctacaagcgtgtatttgtttttacaatcatcacctaatcaacggttgacatgtaactctctcaaattcctaaaactatatctattctaaatacattattagattttgaacccacgctacatgagggtatgtttgatatattttgataaaaaatacatacaattgattatggtttttaaattaaagtaaaagtttcttttcaaatataccatgttaaaaattataaaaatcaatagtgtttaagaatcataaatccattttattttctcatattcaattggctgtcaacacctatgttttcgtatttctcttcacattgattgtttattacgttttatattccttcatgtcatattagttatcaaatttcttttggccgttgtcatcattactttcaccgttcgcttcttcgttatagtcttcatcttcatcttccacgttatctttctcactttcttcctcatcttctctatattattcgttattatgtgattaaaaacagagcaataaatttaaagttactaaccttaaccaaacatagttcaataagcctatgaactaactaccaaaacgacttagttcatttcatcatctgaactcaaaatttgatcccttagttctcatctcccgaatactctacccaaattcagattattccatgctcattggattttttttattgtctccacatatttggtcagatctaaaactttaaaagaaatattctttaacttgttgaagaagttgtttaaatctatgtcccaccattgaacctcatgacagtaataccagacacctcgtcatcaagttgagttacatatatatgaactaaacgttgtcataaaaatttcatgtcataactttttctcactttttttccatatttgataatccaagtttatcttatggtgtcaaccgagtttctctctttctctgtcatttttagataaaaataattatctttgttacctaaattttaacgttaattgttcaaaatgcaaggaaactttcatcaattaattacatttcttacagcttgctaattcccctacttcttttattgaaattggtgctaaaaaaagaacaactatttccacaatttcaacacaaatcttcataatttttaactagttagaaactatctaaccgaagtatatacaacctaagttaaaaaaaaaaacatgcaaaatgtgacttatttataataataatattagtatgattgttggcattatctttttttaatacataaaaatataaaaatataaaacatttctccactccctctgtttacgaatctttcatttaaagctacattttttttttgttacaattatcacccaatgaacggtttgacacataactctctcaaattcctaaagctccatctaaagagagctcaaattcctaaagctccatctaaaaagagcccaaattcctaaagcttcatctgaagagagctcaaattcctaaagctccatctgaagagagctcaaattcctaaagctccatctgaagagagctcaaattcctaaagctccatctaaagagagctcaaattcctacagctccatctaaagagagctcgactctttacataattagttgttttgatttattataattcttctaaacccattaaaaaagatgctcttggatctcagtcaaatagtaacaacatgtatttcagtatcatatgcagtatcatattgctgttaaatcaaattgtaacatccttgtttcaggcatatgaaggtgcatgcagagaggtttaaaataactgaattgaccacctatgtcaccaaagtgcacttatattttcggtcacacgtcttgaaaaaactccacaattaagcgtgcttgggctataatagtttcaagataggtaaccttccgggaactaattggtggaaccatgcgagtgaggacaaagcatggagaaaggtcatatggtgatttgtagggtcggtaacaagtctttaaagcctcatggacgtggcccactgaccgacaaacaagggtggacccaagcgcacgagagaagttgtgggcccactggtaggggcggtgagggcgttacaagtggtagtagatccaaacccatacgagtgcggagtcaacagggctcacaccgttggggcttatggtcttggtgcgcaacgaggacgctgtgatctgttagtgggggtgaattgtaacatcccgatttcaagaatatggtggcgcatgcggagaggtgtaaaagaattgatttggctacctatgtcacaaaaatgcaagtatcattttcggtcaaacatcctgagagaactccaaagttaagcatgcttaggctagataagtttcaggatgggcgacaaactatgcgagtgaggaaaaagcatggaaaaaggtcatgtggttatttgtaaggtgagcaacaagtctttaaaacctctaaatgtggtgtactgactgtcgaacaaaggtggacccataggccagagagaggacgtgaggcccactagtaaggattgtttgggcgttacacaaatgaaatcaaaatcaaatatttttcttacctaaaaaaaatattcaaattatcaaaaaaaaaacattgaacagttttatatattaataaattaaatcatttaattatggtacatctgtaagcatttaattttgaagatattttcagcgtatataaatttcatataaattccaaaacatataatacaaaaaaaataggttgcatacatcgataaaaacttttcattgacttgtttttttggttttacttcttcttgttgactcatcttatgcaaggtttaatactatggttacaaaagattagatctacaccatatgcacccaacaagataccatttcttcattttgttttcaggttcgaaacgcaaattctgaaattgctaaattagattttctggtctcttcaaatttgtgttcaattattagcctcaaaatattttggatacgatgaaacaatttaaaacaatgaaaaacaaaatcaatataactaagatattgcatcatatgctataaaacaatggaaaacaaaatcatgtataattatagtaactaaacaaatctgaaataaaatataagcatgaaacggatggaggtttctattttacacgattttaaaatttttagattaaaaatagcgatttttagaaattagtatcgtttcttaaaaatatcattatttattttaacgttttttaacaagcattaacgcaaaatatcgattaaacaagatatatttaggtgaaactataaatgaagggttcttttaattaattttttttatttaaggcttatttttgttaaaaatttagttggcagtttttaaatggaccgactattacttgagaggatttttgattagaatctcttaaatggagggtttatctattaataatttagttgggggttttaaaatggatctgccaaaacttgagtgtttttcttcatataaatataaaactctaagtcttcctagtatccgttctaataaggtttaatttgttttggcttgatttgattcattttttaaataaattatttataaaagagaaaaacaaacaataaactgaaccaagaaaaatagaaattttgttgttggaatattaaacttgacatgaaagtaaaataccatttatgagttaagaaggcgaaattgtatggtagaatttttacaaaatactctgtgtttgatgatttcttataatataaacaaatatgtcgacgattgttgttaaaaactaaaagtaaattggttcaactttggtaagctgagaaaatctatgttctcaccaacatgttgttggcccactggtaaatcttttaggtggaggtgctgggttcgagtcacgttggaagggatctcttctctaaaagagatgaatttaacctggtgtagatcccgcctctagaaaatataaggcctttgcgcctgaatttccaaatatttttttaaaaaaaatctatgtttttaaagtcgttcgaacacaagaaatatcattatatcacttaatgaattacaaaagatcttagatttattttttttgttgggtaaaatttatcttttatcatgtttggaactttgtgttttaacgatagcataaaagtttctacacttttaaaatatcattgttttggtcaacaagttatctttatcattatacaaaaacaacaatgaagaagtaaaactaatacgatgtgccttcaaagactaacttagtatcaatagaagctaattaataaaaataagtagaaactataatataaaaattaatgacaattgttaatcaatttatattttaaattaaagttatagttatctcaatggtgtatttgaaatacaaattttgctcaaaagtaatttaaaaatatttagtaattaaaactttataatacatcatattctaatattatagcaaatggttcctaaagattttcctttcttattaaaacaaattcttaaacaacatatatgatttaaagaatataaattaaacaaaagttacgttaaaaagaatcaaaaatgaaaattattgtacttttgcattaccgtatgtcaatatatagctactaaaatgattactaaacccaaaactatagttaaacaattgatagatacaaacccctgtgtatcaaaggggtaatgacctagtacaaagtagttaaaggtaaaacgaccctaacaaatagtacacagctcaagcttgttacacaaaacaaataaatggttgatctaatcacatttaaattatgacaggaaagaatacaaattcagaaaaaatgataaaaaagtaacaaatgggttccctttaatttatatctgctcgcactaagtttcaacttataagtccaagctaaaccaaaaacattcattgaaatataagtaacatatgattaaaattaaacaaaaaaaaagaagtaacatatgataaaattaacaacacacaaaggaataacaaaaaaaatgtttagaatttatagaacaagattcaaaatataccctaaacaatacgaacaaatgtacatagaatcagcaatctacaaaagcaaacaacccctcaaaagcgcaggtcttctccctagtttgattaatgcagatttttttagtcaaaattacaatcataattcaaatttattttctgtttttttttataaaaaaattcttaaaaatctatttttcttgtccaattttagtcgacaaaatattactaaaaaaatatttctataaatttttcattgagtttttcgctttagtatcaagattttgtgtccagcaaatttgataaaatgtatattttgacatccagcaaatttgatgtatttacgacccattattttttcatgctgtgttttagagagtaagttttacttaaatctttcagaagttttagttaatctagtacaattcattttcttataaatttgaatccaatatatattatttttgttctaaatatataattttcagttaaaacatcaagaatttggttttgagtcactttgcaacctcttataaaattatcagttgtaactctaaagaatctagtggattgcttgctgagaataaagccatgacatacttattattcaaacaaaacaaagaagttatttcttgactcttggtacctgcctcagctgcacctacggaattacagaccatcgacgattttcgagtgtctagtttctttgtgtttgttcttcttttggtgtgatcgacaggtaatgtacacttcaacaagtagtattaaagtttaggcctaagttatggcgatcaatcgagagatatagccaaaatttacagtttaaatcagagatcgtagtcgaagaaagaaacaagatcgtgaaattgtcgatccagatcctcatatgttagagactttcaaacagaaccctggatcaacttgaaacaaagatctgttttggtaaccctcaacaatacctaatatgtttaatcgaattaaacacaaaggaatcgtcacagtagttctaagaaaagtagtaaccataaaaccaaagcatacaacttatacaacataagttgtctaagtcatgacaaatacaaagggacaaaacataaacaaaccatcaacagagagaccagtgactagtgttacttaacaagtagaagtaacctttgccagtgtcctcttaccttattcaagacgcacactgaaccagacagaaagacacacacaagacgcagaccaaattttgaaccacacaaagaaaaagaaacacagcatcactcttcctcggactcagactcagcattctggagccactcgatgaacggagtcacgttcttcaaaaccggggagcttttgacacctttattgtaccattcaacaatcacatcctcatccaaaatgtcttcatcgtaaagacctttgataacaagagcaacttctttggcagcctctgcgcttgccttcatgcaaaaggattcaattccattaagcaaacccatctgcgcaggagctcctgcttcttcttgcatcatcatcaaggccaagagatatttcttcttcttgatcacctcttttgcgaatcccttgcctgtgcctccaaagagggcagagaataaggcgtccattttctcctgggggtttgctgagtttgaagctagggctgttttgagttgggtaggagatgaaccactgctcagaagctcctttatctcattcacaagcttttcatgagcattttcagggatcttgctattgccattctcatgcacttgttctggtgccttcttcacctcagctactggctttttttcttcaactgtagacagcatcaccatttcagctgttaccgcgctgagctgttctttcatacgtttctcagcagcctccctggaagtatctgtttgccactggacatcgtcatcatcttcttcactgtctgcttggtcattttcatcagacaggcttcgaggtggagaatgatctttcttcttcgacactttgtctttcgaagtacccgtggtcgctgctttcttcttactagcagcctccttcttgagcttcctcatctcttcatcagctgcttcaccttctctgagtctttccttctcagctctcctcatcgacttcttgtccttagacgacttcttctgctctggaggattcttcaaaataaacgacgttagcttgtccctcatatcaacatccgagagaaacccacaagccgcacatttcagctgaagcatctgcgtcttagtgataagtatctcagtttcaggattcccacatccataacactgaacatacttcttaataaagttctccaataatcctgcaagtttggaagtgtcatgagccccattcacaagcgaggtcccattcttctcatcaaacttagactgtgcaccaagctcacaaccaaaatacttagtagtataagcagcaggtctccccaaggccttagcaatctcaaccatgttaaccacattagtcttgataccgttacctctaccttcaatcttggtcatcatcctcggcatcttatacctataaaaggcatcatcgcggttggaggcaccaatgttttgcaaagccatcttgattcaacaaacgtaaacaaacaagggatgtcagaagaggcagtgataatcactcagttgcataaactgaaatccaatacagctcgtgatgtcctcctcaaaacgcaaaccaccaactttatgagtggactttttcctagatataggacagtactctcctaaaagccggatagatgattgaaagagagaagcctgttcagacataaaagattcttcacactccacttttgacaaaactggtgatcccagcagctttaactgcccaacttcctgtattaaaaagacatattcaaagttattgtttcattctctgcttaagagaaacaaagacttgaccttttcaatacacaagattcactaattcaaaagatctaacaacaataatcctaaatcttgaaaagaatcaagaacccataagagaacagagaaaagtttcaatatttacaatctgaaaacctaattcagcataaacgaatcaaatcatctcttttttattcaaaaccaatcaaatctaagaaataatcatgtgggcaatccataaaatcgataaagaaactaaatttacaaatcggatcaaagaatcaattaaaaaggaagaagctttaccttgtaagatgagaaaagaagggaggataatctctgaacgaggttgaagaagaaacgtttgtagcggcgataagagagatggaataatgagagaaacagcgaagcaaaagagatgattttgtggatatatttatatataagaaggaagagaaggaggaggaggctgagaaactagaaatgagaagacgcgtgattgtggttcatccttttagggcaaactcatcgtttcgtgtccaattattttatttttattttttgttagtcttttatttattgtataaaagaaaaaaatcagacaacaaaggaagaaaagtctagaaagatgaatttgcaaggtcggttgatataaatcgatgaaattataatagtgaaacatgaaactttgttcatctagtaatagttaaatacacgaatcctttctagtcaagttaactaaaaaaagattaaatatattagtcgaaacccaataacttttctatttataaaatatattttaattttaatagtgcatgatcgatgtaatcatatttattctttttattattgtattttacttttgttaatatatttctaaatagtaatctaataataataataatttttgttggtgttttatcgtatttttttaaaaaaaatttgtagttattttttgcaattgtttttacttttcttaaacacttctgaatggttgtatcttttaattttgcttttcgttaaaataattacggttaatcttttgacagtattttctatctatctttgcgtcaaaatatttatgaaattttttatggttgtatcttttttttacaagcagttctgtacggttatatctttttaacgtatttttgttgaaatatttataattattttttacgattatgtttttttctctcaaacacttatgaatgtttgtatcttttaatcttaattttcgttaaaataattatggttattttttcgatagtgtatttttatctatctttgcgttgaaatatttatgatatttttttactgttgtgtctttttttttacaagcagttctgaacggttgtatctttttaacgtatttttgttgaaatatttacggtttgttttgttgttttatcgcatcttttcattgaaatatttacgcttatatctttttttgagttgcgtctttttatcgtaatgttttgcatttctgaattgatatgtttttatcgcaattttttgttaaattatttacggttatttaattataattgtgtctttttagcgtaatatatttttacttatgaacggttgtgtctttttattgtaaatttttgtttaactacttacagattttattgtttttttttccttcttatcgcatctttttatttaagggaatgtgacacgtttaagcacttttagagaattttattccatttgaggcactttgcagagatgagacactttttcaacttttttatcgaatttatgacaaatttgcccctaaaagtgaaaacgaaaatactttagcgtttggaagttggtatatgatgagtggatcgttggatgaaagtcgtaactattatcagattatatatataatttaattacttaaaaaagtataatgaatattatttctctatttgtactttttttcttcgtcttcttcatggtctactttttttcttcttcatcgactcttcttcttcttttctttctctatctatctctttctttatctttcagtctttccttgcaaaatcaaacatgagagactttgtcaaaatcgtgtagcttctgtattttcctttacggagaagcctctctagatttaagtgacgattaggcttattcgattggtttcggagcggcagcgcttgtgactaacggcggaagcttgagtgtagcagacaataacatctagaggtgaaagaagaaaaggatttgttccctcaatcttacaaccaatcgatccagcttttgcgatgattcttcaattctatgaatagaatttagagttttgttagattgtgtaaatatctgattcatatttgcgaaattgtgcttgtgaagacgatgagatcggttgcagatcgaaagttcctctttccttactctcctttgtttcagatctgttgcaagaaggcgacgagagaggcggtgataacgtaacgtgagacgttactcgacttacttaatttggattttgaaattccacctgagaatttaaactctctcccgaaaaagaagaagaaatggcagcgtacatggaagagattccgtgagaacaaaaattgttcggagtaacctcgatattacggggttacggagatgcgagatcctcgttactccgttctattccatggagcaccagattggcaaattccagtattgaatttcatatccatatgatcagcttgtttggtaccatttgattctagcttgataaattgatgtttcgttgaacctctaagctaagagcactttacttcgcacatgagaataaatcatttccacatggtcacatcttgttggacaagttttcatggacacaaactatcaaagcatccaacacgatttcattatgtataaactaataatcctataggtctccaagccccaagaacaatatgttgacattgctttcaaatagcaaccttcaaaacccaattagttaatgatagtttgtatccattataacttgtccaattaaactttaacatgtggagtaatggtgaaacatgacaaacacttgaacacaaatgattcatgtgtagagctttcatcaattttctatcgaatgaaaaagagtgtcatggtgatgcaagaatcacaacttagtcaaaacaaatcatgtgtctttttcttattcaacacagtatccacaataacaatacattacttacacaaaagaacgagacccatcaaacatgctttcatataaagacaaaaccataccaactaaaacccaaaatcttattaacatgctttctttcacgtattcttttctctgcatttgttattcttacaaatccataataatgtgtccatttcaaatgtgttcatacggaatcttgtttactaagcatatccatcaccccaagtccatacaaccatgtctacaccgttgtagaatcacaatacacaatttctataaaaagcataagtaataaccaccaatttcaaaaactatgtccactacggtgctttgcgtttatattctaaccctttacaagtagccatccactagcgaccattcaatgttgaccatatagttgtagggatcaattacaattttcttgtaaatggttagagttatgaccatatgatgtatcattgtacaatgcgcaaacaaaagaaagtgctaatttaccgagctataaacacattcacagcaaatcaaagacatagttgttgtccattgatgacagtccaaaaaatgtagtccatatggttatctaatgattcacatggtagttttataccaataaacaagtctatacatgaccaataaacgccaatccaaagtacattatccatttttctttgaccatttattcacttgtgtataaacaatcccatcagtaggacaatgtcagttatataacttttataaagaatttaacgaagatcttatcactctcaatgaagaccattagttcacttggataaacccgtctatactaatcatttgtaataggtataagatagaaggatgtgtccattgccataaactacagatttttattcaatagaaattcaacaaatatacatctattgtataacgtcataactcacaaaagttactttgattttcatcgtgtctcaacctctcgtttatttcttcatcttgactttgaattagaagtgattactctaaggaaatcaaatcaatcagaaacaatactttcaaatttatagatctgatgtcgaataagattaagaactttctaattttgtatatcagagataccagagtaattaggagcagagaggcaccaaacgaagcgacgaataaggcataaagctccctccgccaccgccaccaccaactacgccatcatgtcttgattagcttttcaaaaacaatcatagcaaggaatcaaagcaaatatgtcggagattagaagataaagccctcatttttgaactttgatttttcgtaaaagatttgatattggttttggaaatagaaaaataaaaacgatggagaagcgctgagaagatatgacaaagagaatgagtttgcagttaaaaagggtaaattggacaatttggtttggcaaagtgccttatcttttcaaagtgtctaaatccgtacatagttttttaaaagtgccctagaatgtaatattctctttatttaaatatttacgggtttttctaaaagattttgttaatttattgcaatgccttttgcacttctgaacggttatgtctattgaatgcaacttttttaaagaatattatagttattttgtggttatatccttttattgcattttttttgctaaaatatttacggttattttgttacccttgtcttattatcttatctcttctttaaactattgaaaaattctttctaatgcccttttcaattctacccttttctatttaccattttcatttataccctatttaaatttttaatgaccattttacccctatttgtaaattgatttaggttaacaaaatgaaatattaatatttttcgcctaaaatattccaaaataaaatttcccgccaaaaattttcgaaaaaaaatttcccgtcaaaattttttttcaaaaacattttcccgccaaaaaacttcggaaaaaattttcccgccaaaaaatttcgttaaaaaaatttccagccaaaagaaaatttcaaaaacatttttcccgtaaatttttttttggtgagaaatagatttacaagggattttaaaagggttttaaaatattttaaaaaggttttaaaatattttaaaagatttacaagagattttaaaagggtttagaagatttacaaaagatttcagaaaaagaaaatcatttaaaaactcttctaaatctgtttaaaaccttttgtaaaggtttacaagagttttaaaatgattcaaaaagagttgtaaatgttttaaatacttataattctttttctaagagttaaaaaatgcttgtaaagactttataagagttttaaaaagatttacaaaggtttaaaatccttgtaaatccttttaaaactctttaaaaactcttgtaaatcatgttttacccttttataagctttgaaaatccttgtaaatcattcgataccacttacttatcttttaaaaacgattgtaaaccatgcaaaccttttttaaaatcccttgtaaatcattctttaacacttacttatgctttaaaaacgattgtaaatcatgttaaccccttttaaaatcccttgtaaatcattctatgctacttacttatgctttaaaaacgattgtaaatcatgttttacctttttataagcttttaaaatccattgtaaatcattccaataccacttacttatacttaaaaaacattgtaaaccatgctaaccctttttaaaaatctttgtaaatcattctatgccacttacttatggtttaaaaacgattgtaaatcatgttttacccttttataagcttttaaaatcccttgtaaatcattcaatgccacttacttatgctaaaaaacgattgtaaaccatgctaaccctttttaaattccttgtaaatcattctatgccacttacttatgttttaaaacgattgtaaatcatgttttacctttttataagcttttaaaatcccttataaatcattcaatgccacttacttatgcttaaaaaacgattgtaaatcttgtaaaactattgtaaaaagttttaaaatgatttacaaatgtttaaaaaggggttttaaagtatttacctatgtttttaaagactttataaagattttaagaggttttaaaatgatttacaagggtttttaccaactactaaagcttttaaaaaactttacaaggttttttaaaagagtttttaaaaaatttacaaggatttttaaaagcatttttgtgtctaggaaaaaaaatttacgaaaaataattttggtgggaaactttttttttggcggggaaaaaaatttggcggaaatttttttttggcgccaaaaatttggcgggaaactttcactttccaattacatgttcttattagatgagggtaatttggtcattttgttaaagggaaaggatatttttaaaaatgaacaatataaaagggtattgttgcaaaagggtagtaaaaaagtgtagttttgcaaatctccctaaactatttgaggttattttttatatttatattcgttcagttacaatcatatttttttggtttatagttgtgtctttatagtagtatctactcatttaagttacgctttttcattatattttattacatattctcgtcacaagtttttgtatgaatacatgtttatttaaatgttcgtgacttttcaactctatatatttttctttttttctaagtagttcccaaattttgttttttcacacaaattatttgtttcatgataaatcccaaaaaaataatctctaaaatggctcaaaattcttttcttgctaaactatttctaaacataggtgattttttttgtcatcaaacatgattttaatattaaagaaattcctctaattattgatctaagaagaaaaatgttggcatcttcatttgaattttataattaaagttgaataaaatttctgtatttctaaaatctttccaaattttgatttagaatatgaaaatattaagaaaattatgtgactgtaatgtattttaatttattgttaaaacataaaattttgaaaaaatatcttaattcactatgacttttgtttgatattttccattttatagattttttgaaatattttcctatgtgacttcgtgggggttttgagtcctagttaaaaaaatattttatcaaccacacattaattaaaagatgacttcatcattggttacccaatctggaggagaagagtttacatatataggagacttaaaaaaataataatgtagaaaaacgagctaaacaatccgtcctagtattactcaagtgagaaatagaagagatcgaaaaagaggaaaaagatcacggagcaatccaaactcatctagaagattggagaatgcgaggcattcttcaggagactgcaccatcgagactacctctatgcaatcagattcaaacgtttgacagtcgatccttcttgaaaggatattcttcataccccaaattaaagcttccagctccgagtgaaggggagaatgacactccggaggcactttacaccaaggagtactgtttgatcattttcttgaaaataccatcatcctaatcccatggttgggtcggaagataatttccatgaactatcaatcctacatctaagagattgtgttgggactagtgtaaaaattaatactcgataaattaataacctctataaattaataaatttttctagtcccgagttgggactagtgtaaaaattgatacaaatcgataaattaaaaagataataatttttttgaaaatcctgtgtaaatatatgatcccatcaatattataaattaataattatataaatttatgaatatatatatttatatttatgaatatatattatgtaagacttagtaaaatatgactttagtattgtttttctttaatttttattaattctttgtaaaattcaattctaaaaattttactacgtataaaaaagttttttgtttttgtttttaaacctaataattattttctacttgtaatgatttttagaaaaattattgattgtatagaaaaactatcttttagatcacatttttgtaataattacaagatttggaaaatctctccataaattaataattattaatttatcgataaattaatacctctctaaattaataaattttttcggtcccgacattaataacttatagaggttttactgtatttagaatatctaaaggttccgattgtaaacctttgaaaacctttttattcctatctttccatataaaccataaaatccatgcaaaaaaaaaattacttccctccctctcatctattggggatggaccatcccggatggtaaaccacaaaaaaaggtaattaagatttgaaaattccgattttaaaggaaaacttcatgttattacaggagtcgaaaacattacccaaatttatcgagagcgaagacactcgaaaagagtatggttaattgtttcttctactatcacatacctcttacaaatagtgtcacattgtatcccacgatgagctaactttgtggtaattgcaagagatcccgatgcgatttgccatataaaatgtttgattttcagtggggctttaattttccacgctttcgcttttaatgaattaacatttggtcccactccaccgtatctgacaaaccaaaagctaatcggtaatctgattttactatatatcttcctgaattcgtttagtgtcaaattagtttatttgacttataagtatgacttatagccaaacccctaatgatttggatcttctccggatccatacactcatgtagaataggaaggtgtcaatcttttgttactggatttattaactgattaaccattagatttggatgtagagtttttcctcttccatttgcgggtcatggattaacatctggtatccaaggatccctccataccgatatattaaaacaagaccataaagaccatcttactcccatctccaccaattgttttgtcgaaaaaatacgtttccatccaaacgaaggggaatatggtatttttgcttgtaatgatgaatatttctgaaatatctaccttttagcactcacactactaaggaattcagaaattgaatcattaaatttatctaaagaatgaaaacccactcctccttcctctttggacttgaacattttctcctatgttgtccaatggagaccacggtctctcccgctatagctccaccaataatttgaaatagtacttgttaacttaatggttaactcttgaggaagtttaaaacaagacatagcgtatgttggaagagctaaagcacaaatttaatcactgtttctttcccacctttgaaaaaatactttgttgaccgaccattaattcgttcatttatcttttaccgaacataattaaaaaaaaaaagaaactctttgagcctcctagactctcttgtatacccaaatatgaactcattccttcttccttaaaaattatgaggagagtttttagttgtttttttttttttttgatacccttttaccaaacataattgatgatttggggaaagtttatttcttgccccaaagtcttcccgtaattcccagtaatatccacaaccgttggacattgctcagtttctactttacagaaaaagagactgtcatccgcaaatagcaaatgtgagatttaaggacttcttttcgctatcttaatcccggtaaatttcttctcttgttctgccttcataatattagcaatcaaaacctcagtacataaaataaacatataaggtgatagaggatgcccttgacgtaatcatctttgaagttcaataagacctcttggttgcccattcagcaatacctgatatgagaccgaactaacacaccacatgatccaagaaatccaagtagagttaaagcctaaacgggcaagaactgcagttaaaaagtctcattcgatcctattgtacgctttgctcatgtccgtcttaatagccaaaaagttaatctacaagcattattcgtacgtcgaccatgaaacatttcttgagctatcacgctggtatccgttattagtctacttgaaacaaacgccgattgtgtttcagaaattaaccgtggcaattatttttaaagcctcaagcaaaggactttagatatgatttatagctcacattacaaaggcttattggcctaaaccctgccatcctttgtggtttctccgtctttggaattaagcaaatatttgtttcatttattcttttatcaaaacttccggtttgaaagaaatctctaaccaatgctaccaagtcatcctagttaaattaaatatggattttaggataacaagaatgtatttttgggagaaaaaataaataatataaaaagaactggaaataaatttgaaagtgtgagggagtttttaagaggctaacaataaaatcccacctctctcttcaaaaccctagccgccttaatagatctgagggagaggagcttttccggcagctggcttcctcttctggtttgtgtttgctctcctcactttccctagtttctttatgttcttcttcgtcggccttgtttgtgcattctagtggtgaataggatctcttctccggcagtagctttatggtatctcttcctctcgaagtagctatggatccatattggcggtctagaagttatgttatcgagccacttagagaacgccgaaaagtgagcaacaaagttttctcgcgactcagccatgcatctggttgttgcggctactgcagaagtcgagggaagaaagatgggttatgttgttcaattggttgttagttgtagatcatgtggatcttagatagtggtcgtggaggacgggtttagaggaattgattgaaccatcaacttcaggattcgccacaatttatctccattagtccggattgaagggttcttgctcgctggggttagaaatgctcatgtctagaagagaggggatagatctggtttgtcaggttgtgctgatgtatttgagggttaagcattttgggagatttatagcggtcaggtggctcgctgaaaagggtagatggtggaaaccgatttcttccctcgatattttcaacttatctttattaatttaaagccatggatcttgaatccgccagaactggtgcttccgactctcttccaccgggaaacaacatgatctgatcttcattttttttttgcatcaatttctaatttttccatattgtattttgactatagtcgtcattgtccagcccatttattttttgcgaagcgcattgaattaaattagaatctgcttaaataaaaaaaaataaaaaaaattaagagttttattattttatggttctaggaataacatgtaattttttttgcctattataatatctttatagaaggtatctcaattttcctataaaaataatgaaaacatgaagaaaaaaaagattgaaaaagaaggaaagaaggttctcaagtgagaagtaacattgtatatcttaacaagaacacttcttaacacttgtttggtttatttaatgtttaaaaactaaaaattagatatataatcaaaatagaataaactattagtattttgattttaagatacccattggatatgtgaaccattggtgatgcttttagttccattgtgaaaaatactttattgtaattcaaccgattagagaactcaaggtttagaacaacaaagagaaaagcattcaacaatgcaacacagagataagcaagataacttgattaaataagaactcggagacatgagctataaagcgtcttgccacatgagagataaagttagtcgaagacacatccacgagcaatttaggaagttgacgattagtcgttctcatttgaccttgtgacaataaaaatggatccataacattgagtcttgtccgcacaaaatacacaacacaagatagtaaaaagggtgagatacacaaatgatttctcgacttaagagttggaaaacaaataatggtaacttgatagaagggttctccccatgaaagaggaggggaaataattctctccataaaagaggaaggttgcaccaaatgtctctcactaatggaggatttgggcgaaattggaccctctatgtaggatagaagactgtatgaaattctaaaccacagttcagaatctttctcgaatagttcgaaagctttttatgtatgtggaatctaagtctgaaagttcataaatgtttgtaaattgctaggtagaggcgaattttagaagattcatattgaaatggataaattagaaaacccaaagataatgatcaaacagagcacaccggaaaactgataacactgtattttatcaacgagagttgagattaggaagtggtagagttatgggggtctttgtcacgagagtggattgacccggtttttgaatttatcgtctagggtatctacctttcgcctgttagccacctgatgaaccctacagttgccccttatcaataaatccatccttatgacttttattcttcttagatttatttgtattcacccctgattgcacttttatttacttgttatttgtatcccctgttgattgcattttagttcttaatattgtcacctattggttctactcgacccaatgatcgagttgggctcttaagttcttatttttacctgtttgaatcgtgacctaggattgttactagaaacccaccatcattataatctggcttgacttagttgcttctgtacacatcttgattgctagcaataacagtggactggattgacaccccctatagctgcactgacatgttagtgtttaaggggaattgaattgaacctcacagtacttcagcacataagtaggcctaaaaacctacttatcgatttggcgccgttgccaattcattgttgcattgttacattccagatcttagaaacttttaagatcaagttcttttaaactttactttggttaatgactatgtgttcttctctttgtcttattgtttgaggtacaatttgagatctaccaaggagctcgaggtgaggtcgagttagtcacgaacttccttccataccacaacaatatagacccttttgcatgagaagcacatgagagaaatgcaggctctgaatgagaaattagacaagttcattctactccagaagaagcaagctcactttgctcggaaggatgagcagtttcatgttcagaatttggggaataatcagttagaagagataagatacatccagaaccatggaggccatataaatttttttaacaaccatagaaaacaacaaacccattacaagccttttgttccatacaatcaatgtcaatggtttgttcctatgcagcagtttcagggaagctaccagcagctgcagtacgcaccaccatgttttgctcaacaaaagccaactcccaatgcacaagatgcagacatgaagagtatccttcatcaaatactgcaaggtcaatctactggatctatggttttaaacaagaaacttgctgagataaaaccaaggttgattcctcttataatgatctgaatatcgagtttgaggcattgaactctaggctgagatacatggaaggacaaattgcatctcctttagcaccaacgcctccaggccaatttcctggaaaagccattcagaactccaaagaatatgcctatgctgttacacttcgaagtggacggaagctgctaaaccatcaacacaccgagaagatcactaaggacagtgaagttcaagaaggggaggatccgcatcaaaacgaagtccaaaccaatgaaccaactaaacttgatcagccttcagcttcactcgacgctctactcgatcgagcaaaaccaacttttgaagaaagaaaagctgctgttgaagcaaaggataaagaatttgctctgccgccctacaaaccaacaatgcctttccctggaagattcaagaaggaattaattgaaaagtacaaagcactttttgataggcagctaatggagatcgaattaagaatgccacttatggatgcatttaagcttattccacaatcccacaactacctaaaaaatctgattatggagagaatcaaagaagtacaaggaatggaagttcagagccaagagtgcaatcttattatacacaaggagcgtgtccgagaaaagctagaaaagcttgttgttgaagatcaactccaaacttctttaactaagagagctgaagctaagtatctccctagtgagaccttgatctctaagaagtctttagcctcccacaaggtagtggcatggacaaatgtcattaaaggtgtgattaggtcaaaaacagaggttatgacagcaaaagaagcatgttcaactcaagctcgaccatcaaactcgaccagtaggccgagttcatcctctactcacacaaaatgctcaagctcaacgtctaaactcgacctgcatgttaagcaaaacactctagcctctgataaaatctaaatggaaggagaaagccataggggagctaacacaaactgtgaaagaactcaaggatcaaattaaggacctccgtgggaaatccaaccaagtaccattcagcatcaaagacataccccctgatggaaccaccaccttggttagcaaaaatgaagctgaactcaaagtgaatgggcagagagtcaagccttgtatggcggagcagatcattcaagaggagagctcatttcctctcctctcatcacctttgcctaaaaacagtatgaaagtcaagctaaagactttaaactagctcacttgggaggaagtcccatgtctattcttgtatatacttttttcccttgttatttttgatgttttgtgtaagtatttcaggttttatagtccacggaagtcaacgatcgagtgatataaatcgagtcaaagaatcttagccgtgcgatagagtgacttaaggcgaagcatccagctaatccgagtcccacacaacctattccttggagctctaaacgggagagtatggacgacttcgtcaactcctatttcaccagatcactaaggtaacacaccacccccattgtatataccgttatcttttatttttctttgtttgttgtttgttttagtcttgaattctctctcagatttttaatacacaagggactgtgtaatttaagtgtgggggagggttcaagaaatatttgactttatgttctcttttcttatttcaaattttgcatcatctaaggcataaaaaaccataaaaatttaaaaacatttatgaaaatgatttcaccaaaacagagtgtcatgtagattgcattgcattttaggattgtatatagagtacttgcatttaggatttctcatttgcataggggataatgatgatttcgaaccgttaagcatgttttgattcaatgaagtaagttcaatgcccaggttgttagttctctgttgcataaccgattgtttctctgaagtaagactgcaccctgctttgaatttacaacttgactatacttctttgattcaaaactcgcttatctgatgccattccctatctattagaacctgaactgaatttgcaattatcatgtctatgcattgtttgtgaactcatggctaccatatacatacttgtattatcttattcacttcaccaccctctgttaatctaagtagctgactctcatttttagagcagtttcccatacccttagcctagccttatttcaagccaaagatcatttgtgtgtgattgtgaggtctttttcgattgagcttggtataacgtgtcaggtatgagccgacaagagcagtctttcatgtagacctagcccacgctttttgggttagctaggactaggtggagacttgtatttgggattggggttgtgtatggattgaatgggaaagagaatgagaatgaaaagaaaagaaaaaaagagagtaagagtttagagttcttaagggggatacaaaaagtgttagtctagtaaagggtttggaattcaaagaagttaggcattgtgatttaaagaaaagggtaaaacgacctaagattagaagaaaagccttaagtttgtcaaagtataaaaccaaacccactagactcttgaatcgttttaaagaagaaccccttagaacttgaaccaaaaagagaaagaatgagaaaaagggtagagttaggacatctatgggactggaaccatcttatgaactatcatactatatcattgggtagatgggagtctgttcttgtttgtgtccattggcttttacctttagcattctgctgacgctcaatcttttctttgagagtcccctgttactcgaccaaatcattaaagggaccatttttgtctcttagcctaagcctgaaaccaagtgagttcataaccattgcattgcttgatccattgttcgtgcttagtgaatgttaaaaagaattggttgatgtgaatgcttgaatagattaaggcaggttgttaggttgctttgtgacgagtatggctaaatttttaagtaagggtctatcattttgcaacctataattagctacctggacattgagcttacccgttctatatgcatgctacgggttttgaatccccaccttcaaacctctccttcaacttaagattttttgtttgcttgagggcaagcaagagataagtttgggggagttgataacactgtaatttactcattttgggcatgtatttatcatcatttagcttagtgatcactcattgtttcatatcattttgcatcacatttagcttattttgcacacttaggcatttagggtcatcttgcatacatattgcatgttatggtgtgttttcaggtgcaaaataagtttacaaggagtttactcgaccctctaccctattgccccagaggggaaccagaggagcagctactcgaccaattattcattgcctcagaggggaagcagcagagcagctactcgaccagttattcattgccctagaggggaacgagaggagaagtagttactcattgccctagaggggaaccagagtagaaacaatcattctattgccctagaggggaaccagaggaagcagcaatctactcgaccagtttactcgatccaggcagccacagaggaggcagcagattctactcgatcaaggcggccttagaggaagcaacagatcgatctacttgcccctcctactcgatcctctacttgacccctttactcgatcaagggcgacctactctacaagacttgttgatcattcaaagcgtcttcggatcctcctcattccccactcaatcagacagttgagcatacagataggaaaggaagaagcatctactcgaccatttgatcactcgaagcatagacactaaggcgtagactttgcagcaccctctttactcgatccccaagatcgagcactcgcccaaaccgcctcaagtctcttgtcttctagtgaatctagggtttctaagattttagtataaatagatcactttgggatttttccaaaggagctagcttttatcctttagtttttctttgtgttcttaaatcttcaaaacttaattactcttaatctatttcgtttttgcatttagttctttaagtaaagttgtttagcttgtttagatctacattttggtatgatttcaataatttctgggtttgtgttcttagttatgttgtttgagtaatgattagggttcttgaggatggagtagattagggtaatctctaggttagttaggtggttaagattaggttagatcccttctggattcgcttggcccctatgcggttttcgctggctaatgtggagattcgatcatagacgtccgacgtccaaaagacgttcaaatggatgtctaatctatgaattccagagatttgtagacttgatcaagagattggctagtctacttattgcctttggtagattgtagcgtaaaccttgctctgctatgtttcatcaatgagagttgagattaggaagttgtagagttatgggggtctttgtcacgagagtggattgacccagtttttgaatctatcgtctagggtatctacctttcgcctgttagccacctgatgaaccctagagttgcccttatcaatgaatccgtccttaggatttctattctttttagatttatttgtattcaacccctgattgcacttttatttacttgttatttgtatcccgagtggattgcattttagttcttaatattgtcacctgttggttctactcgacccaatgatctagtagggctcttaagttcttatttttacctgtttgaatcctgacctaggattgttactagaaacccaccatcattataatctggcttgacttagttgcttctgtacacatcttgattgctagcaataacaatggacttgattgacaccccctatagctgcatcgatatgttagtgtttaaggggaattaaactgaacctcacacttcagcacataagtaggcctaaaaacctacttattaaaaagtcaatctctccatcgacaaaaagagcccaatatagagaacatgaaattctttaagaatatatgtttttcggatataatctgagatgatttcttcaactagaatcatatcagttgggagtaataccacgctaacgatgtcgattcatatttaaaagcgaatagattgagagaaacaggccttggccaggctgaaaataagattgggaaaaatacctcataaattggcttaaaagagatgcacaacgggccacaaaattgcaagctatattgtagccccaatctatagagggagactactaagaaaatgagggttgcgtcattcaccgtcatcgtcttcattggtacaagcgacataccagaactcctcaacttcaacaacatgtatgattgataccttgtaaaagccaatataagcgcacgggaagtgtggatgtcagattcgcacactaaaagatttatttatttttgggaaagaaaacacttaaagacaaaatttgagtgtaaatgtgataaaacaaaggttgcttaataagaaaaagaatgagaatttatattgtattagctagaatttgccgaaaaatgcatgcgtcttttacatagtttgggaccttatattatatggttggtatcaccattattgaccattaatcttctttaatatgtctgttttgattctcaaacttaatgttccaatgttcaaatttgaactactttgacctcttcttgggatttgatttccggcccatcatgagctcctgagctgctaccccttttcgacgtcttcacttcgcgtaactcaaaacctctagctcaactcgaaattaagggtcgagttgtttgtgcttatgaggcaatctttggttgactctccttcaaatcgtctttctgtctatgaggcaatcttcggttggactcgaacgttaagttcacgttaggtttggggttcgataccaacaattagtcccccaaatctttcgagctgtcatgccagctcgaatgacgaattccttattcgacgaagattgcgcgacatgatctctgattttccgccattgatttatcacttccttaattttggaaatatccataatcatttacatgacacctttaacattatgaccgcatttcatttattcactattcaaatggggaaaacctttccactttctccacgactcccgaggcggttttgctaatcaccacaatttcgcgtgagggataaattttcttcttctatcttgttttatttttactttactctcttgtctttttgattaaaggaatcttaaatacctttcatcctcatcttctgaaaccatgaatccttcatctccttccgaaagacccaattccccctccgatgacgagggtcgttcatgggtcgacttatgcactcacccgaacgatattgcgagtctccactataggaccacttgtaccctccagtctcttaattggctagggatctatgtcgcattctagctgaagttatggtagagtcaatgaccccatttcccattgaatcgtcgaagaatcatcgtccgcgatacttttgcgtttacgagatttactttaaaggatagagattgactctctcgcttcctgaagccttagttcggttcctggcggccattggaatcgctcttcctcagctgaccccaaccttctcaagacgattttggaaattatcacagtagcagttgataataggtttttagtcaattatcctaaaacaccaatcatgtcgttgtagtattttaggttgtcaatccaaatgggtgtgatgctaacaatcaagatgtgatcagaagtcactaagtcaagccaagcaataacaggttttggtgtgttctaacagtcctaagtgaacatgcagaaaacagaaaatcaaacagaaacagtgaaacactcgaccaacacagctctttgcagagcactaatacttaggactgttaaaatgtctagaacacaaggtctgcggaataaaactagataaaaacttcttgtctgcgaaaatgtgaagtacatgctacttatagccaaatattccgaaaccctaatacttaaaacgacgaagtattgggacggattaagaactgtactcgacccatgtggtcgagtgggaggtcgagtgaatagctggagtcttcttttcttccttgtgctcgagtgtcttgttgagtgcggaatgaagaaggctctgaagcttgtcatcgagtatgtagtcgagtggtgttgatggtgatactcgacttccaggtggagtgatgaggtcgagtagtggtctggcaatgggatgaagacactcgacctcggggtcgagtgatgtgattgagtggtggtcaggagatggagatgaagacactcgacctggtggtcgagtggtgaggtgaattggtgatgtcttctactcgacctgggggtcgagtggtctcttgagatcttgaagctcctactcgacctctgggtcgagtggtttgtcatgatcaggtccgcttcttccagttagctcgtcgacagctccaaatcacctgaaaacaacacaaatatgtaacatgcatgcaaaactatcctaaacatgcaaagtgatgacaaatgatgtgaaatggtataaaaaagtgatgatattatgctaaagtgatgacaaatggatgctcaaaacattcaaaatacacacttatcaactcccccaaacttagtctttgcttgccctcaagcaaacaatcaagaacaagctggaggtgaggtttgaaagcggggactcagagccaaagcaccagataaccagatgaaatcaatgtttaagttgaaagttctaagctgcaagatcgaattctacttaaaaacgttagccatgcctcattatcaatcaatccgactcatatgctcgacctacacatgttttcaaatctaccaatccctttaacattcattagttctggaacgtgaatcaagcaatgcatcatcaatgaactcatttggctaaggtaaaaggtcaagagacaaagatggtcccttacagaataggcttcagtaacaggggatctctcaaaaaatgattaagctttagtagaatgctaaaggaatgtctgagtagtttgctcgcttgggttagggtttctcattagggatttagatgatttaccagagtgcccacttgctatgttatgtgtaggattcttcatttttacttgttcttaatgttggttctagagtagctaactagaccttgatcttaaacaataggtatacccatcataggtatctattacaagaactactatttgatgagccaacgtttataagtgtgcaataagaatcagcctgtcttaaattttcactggcacatatgtcttaaattagcgatttaccggcacatcactggggatctttagctttaggcattgtgagtagcacgagacatgaccggttattctataattaatgtttgagttcaagaacagttcgatcacatcctagctatttctaaatctactatcatctatttcctgagaataccctagacctaacgtatttataattttgttttacaaccaatcaatctgttatttgcttacttgctttctttttactttcgtcctattatcatctagcttaatcttgacacttaggcctattatgtaaacaaaaaagctt

SEQ ID NO: 1176 - DNA, 42663 bp, Arabidopsis thaliana
  modified_base (12792)..(12792): a, c, t, g, unknown or other
  modified_base (14427)..(14427): a, c, t, g, unknown or other
aagcttgttgttgaagatcaactccaaacttctttaactaagagagctgaagctaagtatctccctagtgagaccttgatctctaagaagtctttagcctcccacaaggtagtggcatggacaaatgtcattaaaggtgtgattaggtcaaaaacagaggttatgacagcaaaagaagcatgttcaactcaagctcgaccatcaaactcgaccagtaggccgagttcatcctctactcacacaaaatgctcaagctcaacgtctaaactcgacctgcatgttaagcaaaacactctagcctctgataaaatctaaatggaaggagaaagccataggggagctaacacaaactgtgaaagaactcaaggatcaaattaaggacctccgtgggaaatccaaccaagtaccattcagcatcaaagacataccccctgatggaaccaccaccttggttagcaaaaatgaagctgaactcaaagtgaatgggcagagagtcaagccttgtatggcggagcagatcattcaagaggagagctcatttcctctcctctcatcacctttgcctaaaaacagtatgaaagtcaagctaaagactttaaactagctcacttgggaggaagtcccatgtctattcttgtatatacttttttcccttgttatttttgatgttttgtgtaagtatttcaggttttatagtccacggaagtcaacgatcgagtgatataaatcgagtcaaagaatcttagccgtgcgatagagtgacttaaggcgaagcatccagctaatccgagtcccacacaacctattccttggagctctaaacgggagagtatggacgacttcgtcaactcctatttcaccagatcactaaggtaacacaccacccccattgtatataccgttatcttttatttttctttgtttgttgtttgttttagtcttgaattctctctcagatttttaatacacaagggactgtgtaatttaagtgtgggggagggttcaagaaatatttgactttatgttctcttttcttatttcaaattttgcatcatctaaggcataaaaaaccataaaaatttaaaaacatttatgaaaatgatttcaccaaaacagagtgtcatgtagattgcattgcattttaggattgtatatagagtacttgcatttaggatttctcatttgcataggggataatgatgatttcgaaccgttaagcatgttttgattcaatgaagtaagttcaatgcccaggttgttagttctctgttgcataaccgattgtttctctgaagtaagactgcaccctgctttgaatttacaacttgactatacttctttgattcaaaactcgcttatctgatgccattccctatctattagaacctgaactgaatttgcaattatcatgtctatgcattgtttgtgaactcatggctaccatatacatacttgtattatcttattcacttcaccaccctctgttaatctaagtagctgactctcatttttagagcagtttcccatacccttagcctagccttatttcaagccaaagatcatttgtgtgtgattgtgaggtctttttcgattgagcttggtataacgtgtcaggtatgagccgacaagagcagtctttcatgtagacctagcccacgctttttgggttagctaggactaggtggagacttgtatttgggattggggttgtgtatggattgaatgggaaagagaatgagaatgaaaagaaaagaaaaaaagagagtaagagtttagagttcttaagggggatacaaaaagtgttagtctagtaaagggtttggaattcaaagaagttaggcattgtgatttaaagaaaagggtaaaacgacctaagattagaagaaaagccttaagtttgtcaaagtataaaaccaaacccactagactcttgaatcgttttaaagaagaaccccttagaacttgaaccaaaaagagaaagaatgagaaaaagggtagagttaggacatctatgggactggaaccatcttatgaactatcatactatatcattgggtagatgggagtctgttcttgtttgtgtccattggcttttacctttagcattctgctgacgctcaatcttttctttgagagtcccctgttactcgaccaaatcattaaagggaccatttttgtctcttagcctaagcctgaaaccaagtgagttcataaccattgcattgcttgatccattgttcgtgcttagtgaatgttaaaaagaattggttgatgtgaatgcttgaatagattaaggcaggttgttaggttgctttgtgacgagtatggctaaatttttaagtaagggtctatcattttgcaacctataattagctacctggacattgagcttacccgttctatatgcatgctacgggttttgaatccccaccttcaaacctctccttcaacttaagattttttgtttgcttgagggcaagcaagagataagtttgggggagttgataacactgtaatttactcattttgggcatgtatttatcatcatttagcttagtgatcactcattgtttcatatcattttgcatcacatttagcttattttgcacacttaggcatttagggtcatcttgcatacatattgcatgttatggtgtgttttcaggtgcaaaataagtttacaaggagtttactcgaccctctaccctattgccccagaggggaaccagaggagcagctactcgaccaattattcattgcctcagaggggaagcagcagagcagctactcgaccagttattcattgccctagaggggaacgagaggagaagtagttactcattgccctagaggggaaccagagtagaaacaatcattctattgccctagaggggaaccagaggaagcagcaatctactcgaccagtttactcgatccaggcagccacagaggaggcagcagattctactcgatcaaggcggccttagaggaagcaacagatcgatctacttgcccctcctactcgatcctctacttgacccctttactcgatcaagggcgacctactctacaagacttgttgatcattcaaagcgtcttcggatcctcctcattccccactcaatcagacagttgagcatacagataggaaaggaagaagcatctactcgaccatttgatcactcgaagcatagacactaaggcgtagactttgcagcaccctctttactcgatccccaagatcgagcactcgcccaaaccgcctcaagtctcttgtcttctagtgaatctagggtttctaagattttagtataaatagatcactttgggatttttccaaaggagctagcttttatcctttagtttttctttgtgttcttaaatcttcaaaacttaattactcttaatctatttcgtttttgcatttagttctttaagtaaagttgtttagcttgtttagatctacattttggtatgatttcaataatttctgggtttgtgttcttagttatgttgtttgagtaatgattagggttcttgaggatggagtagattagggtaatctctaggttagttaggtggttaagattaggttagatcccttctggattcgcttggcccctatgcggttttcgctggctaatgtggagattcgatcatagacgtccgacgtccaaaagacgttcaaatggatgtctaatctatgaattccagagatttgtagacttgatcaagagattggctagtctacttattgcctttggtagattgtagcgtaaaccttgctctgctatgtttcatcaatgagagttgagattaggaagttgtagagttatgggggtctttgtcacgagagtggattgacccagtttttgaatctatcgtctagggtatctacctttcgcctgttagccacctgatgaaccctagagttgcccttatcaatgaatccgtccttaggatttctattctttttagatttatttgtattcaacccctgattgcacttttatttacttgttatttgtatcccgagtggattgcattttagttcttaatattgtcacctgttggttctactcgacccaatgatctagtagggctcttaagttcttatttttacctgtttgaatcctgacctaggattgttactagaaacccaccatcattataatctggcttgacttagttgcttctgtacacatcttgattgctagcaataacaatggacttgattgacaccccctatagctgcatcgatatgttagtgtttaaggggaattaaactgaacctcacacttcagcacataagtaggcctaaaaacctacttattaaaaagtcaatctctccatcgacaaaaagagcccaatatagagaacatgaaattctttaagaatatatgtttttcggatataatctgagatgatttcttcaactagaatcatatcagttgggagtaataccacgctaacgatgtcgattcatatttaaaagcgaatagattgagagaaacaggccttggccaggctgaaaataagattgggaaaaatacctcataaattggcttaaaagagatgcacaacgggccacaaaattgcaagctatattgtagccccaatctatagagggagactactaagaaaatgagggttgcgtcattcaccgtcatcgtcttcattggtacaagcgacataccagaactcctcaacttcaacaacatgtatgattgataccttgtaaaagccaatataagcgcacgggaagtgtggatgtcagattcgcacactaaaagatttatttatttttgggaaagaaaacacttaaagacaaaatttgagtgtaaatgtgataaaacaaaggttgcttaataagaaaaagaatgagaatttatattgtattagctagaatttgccgaaaaatgcatgcgtcttttacatagtttgggaccttatattatatggttggtatcaccattattgaccattaatcttctttaatatgtctgttttgattctcaaacttaatgttccaatgttcaaatttgaactactttgacctcttcttgggatttgatttccggcccatcatgagctcctgagctgctaccccttttcgacgtcttcacttcgcgtaactcaaaacctctagctcaactcgaaattaagggtcgagttgtttgtgcttatgaggcaatctttggttgactctccttcaaatcgtctttctgtctatgaggcaatcttcggttggactcgaacgttaagttcacgttaggtttggggttcgataccaacaattagtcccccaaatctttcgagctgtcatgccagctcgaatgacgaattccttattcgacgaagattgcgcgacatgatctctgattttccgccattgatttatcacttccttaattttggaaatatccataatcatttacatgacacctttaacattatgaccgcatttcatttattcactattcaaatggggaaaacctttccactttctccacgactcccgaggcggttttgctaatcaccacaatttcgcgtgagggataaattttcttcttctatcttgttttatttttactttactctcttgtctttttgattaaaggaatcttaaatacctttcatcctcatcttctgaaaccatgaatccttcatctccttccgaaagacccaattccccctccgatgacgagggtcgttcatgggtcgacttatgcactcacccgaacgatattgcgagtctccactataggaccacttgtaccctccagtctcttaattggctagggatctatgtcgcattctagctgaagttatggtagagtcaatgaccccatttcccattgaatcgtcgaagaatcatcgtccgcgatacttttgcgtttacgagatttactttaaaggatagagattgactctctcgcttcctgaagccttagttcggttcctggcggccattggaatcgctcttcctcagctgaccccaaccttctcaagacgattttggaaattatcacagtagcagttgataataggtttttagtcaattatcctaaaacaccaatcatgtcgttgtagtattttaggttgtcaatccaaatgggtgtgatgctaacaatcaagatgtgatcagaagtcactaagtcaagccaagcaataacaggttttggtgtgttctaacagtcctaagtgaacatgcagaaaacagaaaatcaaacagaaacagtgaaacactcgaccaacacagctctttgcagagcactaatacttaggactgttaaaatgtctagaacacaaggtctgcggaataaaactagataaaaacttcttgtctgcgaaaatgtgaagtacatgctacttatagccaaatattccgaaaccctaatacttaaaacgacgaagtattgggacggattaagaactgtactcgacccatgtggtcgagtgggaggtcgagtgaatagctggagtcttcttttcttccttgtgctcgagtgtcttgttgagtgcggaatgaagaaggctctgaagcttgtcatcgagtatgtagtcgagtggtgttgatggtgatactcgacttccaggtggagtgatgaggtcgagtagtggtctggcaatgggatgaagacactcgacctcggggtcgagtgatgtgattgagtggtggtcaggagatggagatgaagacactcgacctggtggtcgagtggtgaggtgaattggtgatgtcttctactcgacctgggggtcgagtggtctcttgagatcttgaagctcctactcgacctctgggtcgagtggtttgtcatgatcaggtccgcttcttccagttagctcgtcgacagctccaaatcacctgaaaacaacacaaatatgtaacatgcatgcaaaactatcctaaacatgcaaagtgatgacaaatgatgtgaaatggtataaaaaagtgatgatattatgctaaagtgatgacaaatggatgctcaaaacattcaaaatacacacttatcaactcccccaaacttagtctttgcttgccctcaagcaaacaatcaagaacaagctggaggtgaggtttgaaagcggggactcagagccaaagcaccagataaccagatgaaatcaatgtttaagttgaaagttctaagctgcaagatcgaattctacttaaaaacgttagccatgcctcattatcaatcaatccgactcatatgctcgacctacacatgttttcaaatctaccaatccctttaacattcattagttctggaacgtgaatcaagcaatgcatcatcaatgaactcatttggctaaggtaaaaggtcaagagacaaagatggtcccttacagaataggcttcagtaacaggggatctctcaaaaaatgattaagctttagtagaatgctaaaggaatgtctgagtagtttgctcgcttgggttagggtttctcattagggatttagatgatttaccagagtgcccacttgctatgttatgtgtaggattcttcatttttacttgttcttaatgttggttctagagtagctaactagaccttgatcttaaacaataggtatacccatcataggtatctattacaagaactactatttgatgagccaacgtttataagtgtgcaataagaatcagcctgtcttaaattttcactggcacatatgtcttaaattagcgatttaccggcacatcactggggatctttagctttaggcattgtgagtagcacgagacatgaccggttattctataattaatgtttgagttcaagaacagttcgatcacatcctagctatttctaaatctactatcatctatttcctgagaataccctagacctaacgtatttataattttgttttacaaccaatcaatctgttatttgcttacttgctttctttttactttcgtcctattatcatctagcttaatcttgacacttaggcctattgtgtgaacaaaaaagctttatggaattcgaccattaagtacgaacgacgatctcttgtttgagagagtacacttaaggcagtttgacctatatcaaatttggcgttattgccaaaattcttggggatcaccatttggtttagtttagagatgtcgagcgacacacgcgggttcagaacgagggagagctcggtgtcgagcgacaccaaccacagatccatgctgcaactaatctaccaattgccaagcagtattgtactcttgagaatttcaacaggcccgactcgttctatgctaatcgatcagcgatcgtacccacacccttccagaggaacgactatgagctgaagtccgactacttcgcactagtaggccagcatcctttccatggcttctctcacgaacaaccaatggaccatatcgagcgttttggggacctcgtatttagcattaaggctaatagagtctttgaagactacttgttgtgcaagcttttcccttactcacttgctggggaagatgcttcttggttgaaccaattgaaggttggttcactcacgacctagagaagcatcaagatagccttcctgaacaacttctatgatgatgccaagtctgaggagctatgaaacaaactgtctaccttcactcagggtccgacagaagctttcaaggcaaccagggtttgttataaagagtatcaacgtgacttcctgcatcacggcttcaatgaggtacaaattctaggtagcttcttcaggggagttgattggagatatcatatggctctcgatttagcgacagatgctacaaccttgattgagactgttgcttgcaacatcagtaccaagaatgctgacttcaagaggaagaagattacaggagctttatcgggaaatcagatggctggagtacatgctaagttagattcatttcacaacttgcttacatggaagaagcatgtgcactttgttgctgaagcagagaccattgagcccgatctagagacataagaaagagtcttctatatagatggacaaggttacaagaagtttggtctgcaacagggcaactttagtggcaacaggtttaccgggaaccagagttcttcaagtttcaccctaaaaccttccttccagaagacctatcctcagagcaacttcactaggacttatggtaattcttctcaccaaaccccatccttcacccactacagagagtaagatggaatctatgcttgagaagattcttgagggacaatccaagttggttgtggagttcaatgggaagtttgatgctatctacactgatcttaacgggaagatcgacaatctaagctctcacatgaagaagctagatgttcaagtagctcaaactgctcagtccatcaaaagacaagatggttttcttcttggcaatccagatattaatcctaggaagagcagcaatgctatcttggtcagagatgaagacaatgtatgggaggagctcgacacagaggatgagttggagctcacagctgcagaactagtgtcaattgacacatactagttttgatcgacactgtatggtcatccatctacagaaacaagtcatgaacatcgtgtcgatcgacacactcgaagcgtcgatcaacaattggtacgcactgcaccttatgaggttcatatccctatgcagctcgagtctgtttatgctcctaaggttccatatctgagaaagcgtcattctaagcacgagattcatgatgcaaaatgcaaaagaataatggagaagatcttgaccaccattattaaagatgctttagagaactcatctgctcaacttatgagatatgtcaagcccttggtcaagaatggaatcaactccgaggtagccaatcttctcaccagagatatcagttccatcatattgaagaaggtcaagaagggcaagtccaagagagtagggatttctgatttcgtggtcctggcatatgatgaagaacccaaggattctcttatccttggtagagcttcactagctacagctggtgctaggattgatgtgaagaagggaaggatatctctcaatatatgcgatgtggagatggagtttggcatggatggttcggaatataaattgcttgtcagtagcattgcaacaaacaaagacacacctctaaggctgctcagatttcaactccaacgccaactatagaggctgctacagctcagcccacagatgagcattacagagagacaatgtcgatcgacaccacaccccatgtcgatcgataccatcgcgcttcacagacagatgcttctgcacctcttccacagcccacaactgctttagttccctgtgataggtactcctctatctcttatccaactgttactttgattatttctttagactcttcgaaatgtgcttcacatgtaaacaagaatcgagattctcgagagcttgtttcttctgctgatcttgcagataacagaaagagtatcgatcgacaaatgatgctgcacggagccgatctgtttacacacccccttggaaggcaagattgcaatccgccaagtaacaagtcttctatcactcgatccaagttctgaactccgccaagtcaagttattgactctaaacaagcgcttagtgaaaggcaacccactagtatgttttttttactcaatcttttagttttgaattttgaatatatttttcttgcttactttggacttgaatgccactggggacagtgacgtttaggtctgagggaggcgcttactaactatgcttttatttttcactcttattatttttttcgtttttctgttattgagtcatttttcttttctaaattctaaattaaaaaaaaaagaaaaaaaaaagaacgggaactaaattgtaagtaagctcatttcattttgtaaatatacgaatgacaaacataaaatcaatgcatcaacatttcgattaaattatatggtatttaggaagttttttgttttgtttggtatggtatgaatgcaggactaagaatgggatagaggagatgtgtagggatctatggaattgggcaagcaataacccttacggctacaattcctcctccagtggctcctcttcataatcctcttcaacaaacacaaaagagagaggctgacaacaagtacaaaaacttttgaagaaattggggaaaattcttgtactattaatttatcattgaaactatattttattcttttccaaaaaaaaagaaactatattttattaaatcgtcagttcgtacattttaagtttttttcttgtatttgtgtatttgttctatttttcttatagttatgtttggaaatgtggatcattcattggtcgacaaatttttttatgtggatcattatttggatcaaaagatgttgtgacgaaaatttgacaaattactattttctgatatcagtccaatttacacaaaaatacaaatgtctttaagacgacttacaaacattattggatccactggtagtagagagacaatagaccaaacggttgcatttgcaaacggctactaaggaggacatatactcgatgctcttagttcttacaactttcatcagaagaaagagtgaagatcggaggagagaagagattagagagaaagagaaattatcgctaatgaaatatttctcataagataaggaaacaggtttaaatacaaccacattagttgcatgtgctttgatacaaaaaatgcacacatatgtttgcataagtacataaatgctctttctgtaataattcatgtaatggtaaatgtctgagttataaactagtcacatttaaatacttgaaagatgataaagtagaatattaaaactctattacttcaacaaacgaagctaagaaaaaagtgcaatccttatagaaataagaaaaaattagcatgatttaaaacctatcttttagataataataaattatcaatatatagatgcatacataacattattatgcaaaacataagcaaaacataagcatattttgtttatatgcacatcacatcacctagaacttgtttagcgatgtaaacactgtaaaatttattcattatgttagagtaaataagaagaagatggagaaggtggtaatatagatagataaaaagcagaaatatgccttaattatgggttatggctatataagtgaattttattgtacataaaacgttaatccgtccaaacaagaattcggagaacatgcatatctatgttaccagagttctactacaaggccggtccaaggtaaaatgctgcttaaagcaaaaaaaatatcagtccattattaaagttcaaaaaaagcataaacttgcaaatttgcgatgaaaaaagcatgaactttcaaatgcaataaaaatcctaaactttgctttgactttttgaaaaatgaccaactttygttgaccagactgtttcgggcatgacgttaattttccgttaacggaacgataacagagttgacttttcgttaacagtctccgataaacmaaacgacttcattttgaattcactaagaaaaaaagaaaactcagcactttagggatcaccccatgaccaattgatggatataacagacttgcaaccattgagacacgacatgactatgatgttatagcaaacactgatttatatatacaagttacctaaaaataacaaaagttaaaaatctttttatgtgtatatacaatgtattcataaaaaatctttgttacgtacaaatatacacaaaaaaatcttcattaaagatatatacaaaaatatttattgtgtatatattanatatatatatatataaatgttaaattattatttttaaaagttaattacatatacataaaacaatatataagccataaatatttttgtgygtatatttgtaatgaagattttttatgtatatttatacgtaataaatgtttttatgtatwtattgtatatacacataaatatttttttagttttgttatttaaggtattgtatatataaatctctgtttgctatcataatgtaaatcatgttgtagctcaatggttgcaagtctattaaatttatcaattggtcacggatttgatccttaatgtgctcagttttctttcctttttagtgaattcaaaacgacgtcgtttgattcaacggagactgttaactgaaagtatactctcttatcgtcttgttaacggaaaaataacgtcatgcccgaaatggcctagtcaacgaaagttgatcatttttcaaaaagtcaaagcaaagtttaggatttttatggtattttgaaagttcatgcttttttcgtcccaaatttgaaagttcacacttttttcgacatttttcccattaaaaattttagtctagttagaaattatgatatgaatttcttttagattattgccttgttgattattgctacatgttygactcaatccgcctattagaaaatcmagatggaaaactgacacacttgatgatatcctcgtttccaacacaattcattaaggctggagctaatcctacttcttttccatttacctcatcaaaatgattagtattcatagaacttgaatccttgttcataccttatatatgagaccctatagaataagttatcttctcctctatgataattaaaaaaaaaaagagagtgattgagttgataacctatagtgtaaagggttagaaatatttcctttgatcccattattttatattctaaggaatgatcaattgcaaaggttggaaatatgcggaggatatctatccgatggagcgagtactactttgtcctatctccgaaaagaataagtctgggggagagaaagaataaaaaagagaatggtcgagttatcatggtatagtacatgaatgagtctagaaggttcttgaatattagcttgattgatgagacccagcgatgaaagcctaatggatatagttgtgaaacttaggtatagaatctagaatgttgtgtaagcttgcggagaattacattttggttaggaattgattagacttgctaagcatatggattttggtactagaattatgatggctgatataacccgattttcacttcttttagctatgattaaggtatagttgttccttttgttatttctagtgtattttctaatctttttcaggtctttacatattttggatgcatttggagattatggaacattcttgagtaaaagagagaaattatgctgcagaagcaatcaggagacaaaacttcacgtaggtgtcgattgacaccacccctggtatcgagcgacaccaatacctgacgacaattcaaagatgcagmttattgaagttttgaagatttcaaaatttggctcagaactttcccttatttctaaaramggcccataacgttttaggtcatatatatatatatatatatatatatatangttttaaaggtcattgtttagacttatacttggagaggctaatatccttttctcttttgtacttggagcaaaaccctttaaagaaaatatttctaaactctattctcttattgtttcttacattgatttcttattcaaacatgtttttttctttcataatcatgtctgagtagttctcttgttgtgtttagggattctcattagggatttagatgaataagtagatcaaaaaccctgttaggataatatatttagaattcttcatctttgattatttttaatgctagttctagagtaattaactagaacttgattttaggataataggtatacccgccataggtatttattactgtaacgatcttagatgagcctagtatttagatgcggactagcgtctatttagatacttaggtgaacttatcaaacctgattacaatgcttgattagttctagagattttcaagagagttgggatcaatactattmagcatagtgagtaatacggcatgccaccggttactctataatagtgatttgagttctagaatggttcgataataatcctaatttactgctagatctactaktctgataattcctgagaatttccctaaacccgacgttttaatcatttgaatctacaaccaatctattttattgctttcttgtcttttacttttataatattttctgtttagctttattcgaaattgttattctattgtgtgatccgagaactttgtggaattcgatcccttagtgctataacaacatctttgtttgagagagtagtcattaggataatttgacacacatcaaatttggcgccgttgccgaagttctctttgattcaccattagataaggtgtagaatttagtctaaatttgtcttttcctttgttactcatggttctttttcttcttattcttgtgactgcagctaataggaattcgaacgcaactaccggaaagctagcaatctgtggatatgttgagactgattatcagacctgatgttgcatgagtcttacgagacagagatggtcatgcatacaatgaagagggccagcaaattgatgaacagggaaacctgctacctgaaatcgccaagtctrtcaatcgacacaacttgggtgtcgctcgacaccaagaaaatatcagagcagatggtcgtcggatgactcttggtgactccaacagaccggatcttttctattccaatcggtctacaatccgaccacctacgtttgacagaagcgttttcgagataaaccctgctttctatactcttgtgagtatgcacccttttcatggtgaaccacaagaacacccggtggatcacattgagcggtttgaagacttggtttcaagcattaaggcaaaaagtgtttcttatgactaccttccctgcaaggtcttcccatattctcttactggggaagcatctttttggcctaagtagttgaagcatggatgtttgacaacttggaaagaaataaaggtttcttttctaaacaacttctataatgatgcaaggtccgaggagctgagaatgaagatctctaccttctctcaagaagcagctgaagcatttaaagccgcttggatcagattcagaagatatcagagggactgcccacatcatggttttagtgacgttaagttgttaggtgtcttcttcagaggagttgattggcattatcagatggctttggatgcagctagtaacgggaattttatgtcaagatatccagaggatgcgacaatgtttattgaaagcttagcttcaagcagtagcaccaaaagcgctgacaatgaaaggaaaactcaagctgaaacatttgataaccaacagattcagtatgytgcacaggttgactgtttagtcactttagagaagatggatcaacagggatacatgagatacaatcataaatctacatatcagaagccggtttagcaatctacaagctttactccgacttatgcttcttcaacccaagcccactaagacgattgaatcgatgctcgaacagattctcagaggtcaagagaagcaaacgaaagagtttgatcacaaattgatgctttatccaaagatgtgaattggaagattcaagtattgaacaatcggatcaagcaattgactataaacatagcaratgttagtgttattaagttaaggagtggaaaacagctaaatccggttcttcaaaggaagcttyctgctrtcaaactcgtcaatttggaagagaatgatgttgcagtttttgcagacaagacaccagtgtcgaccgacactactgggtgtcgatcgacaccaggctacgcagacactacagaactcgacagtgttgacaaacaccaacagggtgtcgatcgacaccaaccyagtctagacctgcgaatcctccaaaacccgatttcagctgcaaaaaaggcaaccaaacccaagattcctttccccatgagtcctaggaagtccaaacaagagctagatgatgctagatgcaaagctatgatggataagctgattgttgagatgccacttatagatgttgtgaagtctttccctatgatcaagcattatgttaagagaatggttactaaggatttgaatagtgagcatggtgtgatgatgatctctgcacatgtaaccgactttattcagaacaagactccatagaaacaagaggataaaacgaagacaatggttatctcggaacagattgtagatctgaattgtagacagactatagatggtcgagttggaaaatgagtgtcgatcgacaccccttctagtatcgatcgacacccacaacatactgctccagaattgtttctcaagactgaaatcgatgttgtaagtccaggacgaattgtcaagtcaagcactacacctttactactcattcaacctcctaaacggctaaggtacttatcacctctatctaaacttccagatttcatcaatacgactttgaaattttccaagactgtttcacagttagtttctcgttgactgcttgtttcttcttttgatgattttgcaggaaagaggagtataccacccatacttgagtcccaccctgcagatcttcctcacttcaatggtcgatctcacgcgctaactgctcatacaccaccatggatgatgcgatattcttctaagaagcatttactgccaccttctgatccacctgattcctgaactccagcaaagtcaagctattgactataaacaagcgcttcgtgggaggcaacccactggtatgattttctttttcctttatatatatttttcttttatttattttttcgctaacttcggatttgaatgccactggggacagtgacgtttaagtctaggggaagtagttactaactacaattttctttttgagtcttattcttactcttatttttctaatttttgagtagttttattgagtcaagattttgtttggaattatgatatgtatgtctttagattattgtctgattgattattgcagcaggttcgacttaatccgactactggaaaatacagatggcaaaccgatatacttgaggatatcctggtttccaacacaatacactaaggctggagttaatctcattgctcttcctttaacctcatccaaactattagttttcatagaacttgattccttgttcatacctgatattgagacctatgtggaaaaaaagtattcctctccccttataaaaaaaataaaataagagattgatatgatttttggtagtgtataggggtaggaatgttttccatgacctcattactgtatattattaggaatgatcaattacaaaggttggaaatatgccgagggtatcaattcattatgcgagttcccctttgtttactcttcaaaaagaataagtctcgggaaagaaagaataccaaaagaaaaaaaaataaagaatggtcaatttatcatggtatagtacaagaatgaatctagcaggttcttgaatattaccttgcttgatgagacccagcgatgaaagccttgtggatatagttgtggaacttaagtatggaatctagaatgttgtgtaagcttgcagagacatacatgttggttaggatttgattagagctgctaggcatatggatttgggtagaatgattcagggtataaactagagaatgttgggagctcctttgtttttaaaacctcttctactggttccggttttgagtatggggaagttgatataaccctattttgactgttcttagctatgttttaggtatagctttttgagtctttttgttatttctagagtccttttatagtcttttcaggtattctatgattgggacaagaatggatgataagaagacattttggagcaaaagctgaagaaaataagtcaaaggacgaatttggtttcagatcaagtcgagagtgtcgatcgacacactcttggtgtagggaggaggcaacggaagcagaagggacacaaggaagatctcataacggaatcaagctatgctcgtgagacttattacggaacttagaagtgagcggaggctcgggattggatgagaaagaagcaatttcttccgtcaattgaaaaaacagtaaaccctaatttcccaaatcactgtctaatagcaacagcaccagccacgagtacttcaacaccgctttcatctaatacggcaccgtatcagattccacgaagggccacgctagtccatcttggccagagtctccttgacgaacctatcaaaatctcttttactttgttttctttgatgacacgaagggatcagctacaagaaaatagacgatttgcgaggcaaatttgcgatggcaaatagtcctcgctaattgcttcagacttgcgagaactttgcgaggtagaaggaccacctcgctactcctcgcaaatttgcgagaagattgcgaggaaattgcgtggagagcaggattcctcgcaaaagagtcacaatttgcgagggaattgcgtgtattggtgacgactcggaaattgcgacgaacttgcgatgcgtaataattctctagcaatatttgcgatggattttcgagtctttggcgggttaggtgagcacgttttaaatttttttaccaatctggtttgtaggtgggcttccctcgcaaattcctcgcactaaagatcttttcctagcaaatccatcgcaatcggccttgcaattccctcgcaatatttttttaggcagctacaaataaccaacgtaacatgtaagaaatcataacttaaaacatatcatttacttgcaaacaaaaaaaaattctaaaaaaaaaatttcgtatgaaaataataatgtcttgggggtagagagcatgagatttacatattacaaagttggatgtacaatcatagagatcaagcgaccagtgaggtgacgagagagtattatgacggactgcgccgtttcatgtatcaagcgacaaacgaaccatttgctcgtgagaacggtacaatattctgtccatgtcgtaagtgtctcaatgagaaatatttggaatttaatgtagtgaaaaagcatctttataatagaggatttatgccaaaattgaagaaaaaactcaatgtcgactagatgtctcaggacagaaccctaagacatctatttatacaaaacgaaataaaatgatagtaaacgggccagggggtcgagtagatgggaagaatggctccagagtcactcgacctgggggtcgagtatggtgctggatgcacacgacctggtggtcgagtatgtcttctggttctggctcgtttcttccaatttgctcgcaaacagctccaaatcacctgaaaataactgagaaatgcaatatgtatgcaaagctatcctaatcatgcaaagtatgcaagaatgatgagaaatgatataaaatagtgatgaatgatacgaaactggactcaaaacgatgatgaatggacactggaaacatgcaaattatagacatatcaactcccccaaacttagtctttgcttgccctcaagcaaataagaagacatagttgaaggagaggtttgaaggcggggactcagaaccaaagcatatgatagagcaaataaaatcaatgtccaagttggtagttctaagatgagatatgattgaattttactcaaaaacgttagccatgccttgttatcaatcaatccgtctcttatacttgacctacacatgctttcaaatctaccaatccctttaacattcattagttctggaacgtgaatcaagcaatgcatcatcaatgaactcatttggctaaggtgaaggtcaagagacaaagatggtcccttacagaataggcttaagtaacaggggatccctcaagaatgattgagctttagtagaatgctaaaggtaagtcccaagttatgcatacagagataagatcccatctacccagagtataacaatgaagttctaatggtaatcccaactccagtcccaacttaactctaccctttgcactcatgaatctttcaaactctttttcatatcattcttttcttttctcttaactctaggagaagctttctcaacactctgatacatctagcggatttggatttctttaacaactaaagttcctgtttttaatctttaaaaccaaaggcttttaacccttcttctttagctaacaagaacctcattcttttctttaacattcccaaaacctttactagattttttttctaacttctttagcttacttcccctagaattctttccctttccttatcaacaatgaattcacccttttcttttaaacacatcccaacccatgatataagcgcccacctaatcctatccagtccgaagaacgcgaactagaactacatgagacactatctttgtcgttacgaacctaacactttctaccaagctcaatcgaaataagacctcacaaacactcacaagtgatatagggcttgaaagaaagttcaggtttgggttcgggttaactgctctaataaggagagtcagctacttggattaacaagagtggttaaaatgagtaagaaaatccaagtattttagggtatccatgtgttcaaattcgatgccaagacatgataattctaaatcagattcaagttcaaattgatagggaatgatatcagatcctaatagtgtggtcgagtagagcaatctaggcatggtgcagttttacttcaatttcaatgactacgcatcagacaactaacaacgagggcaatgagcttatctggtgaaccaaaatgcttacaaagctatctcatcattatcccctatgcatatgcaacaatcctaaacgaaacactctacactcgatcctaaatgcaatgcaactacatgagcactctatttttgtgaaatcattttctaaaatttttcaatttttttggttttttctatgccttagatgaatgcagactcaaaattatatacaatgcaacaaacacttcctgagccctgccccaaacttatatcacacaatccactgtttgaccaaatttggaagagagtactcaggacaaaacacatcacaaaaacaaaataagaacaagagatggtatattgcaatggtggagtgaggtgcatacctcagtggaagaaggagcggagttggtcgtcaatagctgcctgtgattgctcccaggccatcgaagaatctccctgttgtgtctcagcttccccctgggggtactcgacctctgctccttcgtcgcggccagcaccgctctgatgatactcgacctctcttcttctgctgcggccagcaccgcggtcgagtgaattactgacatggagaagttgtgactgcatcatttgctatactcgaccacatcgtcattcggtccctgtagggtgtggtcgagtgatttcctagggtgaaagccagaacaatgtcgattttgattgctctgtggtcgagtatattgttgctccttcaaagccagaatctttttccctcagctcttcatacttatctcctgaaaacactaacaagatgcatcaaaaacaataaggaaaattaaagatatgtacaaagataggcttgagacttcctcccaagtgagcttgttttaaagtctctagcttgactcctcacactcattaagaagaaaatgggtgatagagaggatctgcatagccctctctgatctcatcatcatattcaacatcctctcttgagagatgagtagcagaatactcaattcttctctcctcgaaataggcctctttctcttctggtggataatctatctcctcagaccatcttgaagtaaactttttcctcgggatagaatcaatcccgcattttgattgagctttctcttgcatctgatccagtttactcttaagttcctcaactgtctaagctagcttctctatggtttcttcttgctcatcagatttctttttgagatctcgcaagtcaggtgtagaggttgtgcttggcctggtgattgaatccgaaggttgaggttgagccctgatcttttcttctacaaccgtcctttgcgaagtttcgttgatgtcaaactgcagcttgatgtgcttcccaaggttgagacttattctcccgtctttgacatctatcatcgctcccacgtaggctaaaaaaggtcttcctaggattaaaggatccttaggttctgcttccatctcaagcacaacgaaatctgtaggtacttccactccattaatcattactgcagatcttgtagcaggccaaagggtttccttgaagacctatcagcaaggatcaaggtcaggtcgcaaggcctatactgagtgaattccagcttccttgccacggagagtggcattaagcttactgaagctcccaaatcacatagacaattgttgaaaaccaattgaccaatggaacacggtagagtgaaagttccaggatcttccagtttttcttgaacactcctcttaacagtggtcctagacggattagcatcacattcgtcttctgattcttgataaatcttgataaatcttgatcctttccagaattgactttctcacatctttgtgaggattcgaaatcaggttgagaagttctattagaggcatcactgcttccatctcatcaagctgcttctctgcaagagaattgtatctttctatccatgctttcctgaatttccatggaagagcacgtgaaggtgatggtgccggcttgaatcgttttaccatcctctctatgatggctgctttctcgtctaggttagactgagtttgaaatttcaatctgagtagaaacctccccgtcctgaacatcactgtcctcggtgattgatgtggagacatgtcgagtaggcagctctcgatcatgacaaatggtgatagcgtgagcggtggcgtattccttcgtgttctgtatggactttcctggaagtcttgttacttttggagcagaagttgtcgctgtttgtccttccatgtatctaaccttagaggtaagtgcctcaagtttgatattcagatcgttaaaagtgcaatcaaccttgttgtggatttctgccatctttttggcgagatccattgcacctgcagcttatccctggagaatctgctgtaacatgttcttcaagtctgaatctggagttgttgaagctggttgttgttgctgctgtgtgaacccaggtggtggaagttgctgcggatagtttccctgatactgctgattaggaacataaccctaaccttggttgtatggaacaaagggcttgggttgattctgctacgttgaaaggtagacttggtcctgcgggtttgcaacgttagaagcggtatcaagaagcatcctgatcttgggaacgacacctctgtagagggtgctgagaagtgaagctttggagaaaccatgatgaggacattgtgtctggtaacctttgaatcgctctcatgcttcgcagaaagtctcattatttgtctgtatgaaaccggagatatcattccttagtctcgcagtcctggagtttgagaaaaacttagccaagaaggctttcttgcagtaattccaggaggtgatagagccttgaggaagcgacttttcccactgatgggctttgtctccaagagagaatggaaacaatctgagcttgaagccatgctcactaactccattgatctttgttaggctgcagagcctatcaaactcgtccaggtgatcgagtggatcctccatagggaggccgtggaacttgttgctctgaaccatggcaataagaccgctcttgatctcaaagttgttgttctgcacaggtggaggcacgatgccattacactgattgtggttgtgtggtgcatcgcctgcacctatgttgtttggttgcacttgctcatctacaacagcagccattgtgtctgtttctgtttgtgttctgagttggtgtgcaatacggtcgatgttatcgttgaacaagagattctgatttcctcgtgaccgtgtttgcatacaaagttagtaactttcagaaaaattgaaaaagaacttgatcttaagtattctgaaatctcaaatatagcaaacaaacacccaattggcaacggcgccaaattgataataggtttttgctcaattaatcctatagcactatcatgtcgttgtagtattttagttgccagacactgggtgtggtcgagtaagttggtcgagtaattgtaaaaactaagaaacagacaatgagaacgattaagcgataacgataaaacagagaaataatatagacgagaaattcctaaggatggggtaatcgagtagagtggtatcctagcctattcgaatggttaacaaacgcaatcaagctatccctagacaacaggttcagcagcagatcaattcactttcgtgatagaattcctcaagcaaagctagcccagactagttcccattaatggaatctaactatgcaggcaataagaacagactgataaagtcaataaacgctctaaacggccaatcccttgggatagagacgcatatctcaggaactagtggatcaagcattcaatcgaacaccttctgggtgcgggaatgcttgggatcgaattccagttgatcagaaagaaataagcagtaaacgcaactagtcctaaagggattcaatcaattctaaaacttcaccattctacagagtacggattccacaactattctaacccatccctaggaattctaagtcactactcagacaacatgcttaaagacataaacgcaaataaatgataatattgcataagtaaagagataaagagtagagaaacaagatgacagatgaaatcaaatgcggaatctaaataacttggaaaaatctagaattacaggttggagaagcaaaagcggcgcagcagagtaaaacagaaaataaaactgaagcaaaaactcaatgtcgactagaagtctcaggacagaaccctaagacatctatttatacaaaacgaaataaaatgatcgtaaacgggccaataacctaatcgctcggcccatagaaaatgggccgagatgggcttcgtgatccgatggaggtccaggccgcttccaaacactttgtcttctcttcttctcttccttgtgctcagcttgtctggttgagtgcggatttgagtagactgtgaagacgtgatcgagtgtccggtcgagtgatggtgttggtggtgagtgatgatactcgaccacagggtcgagtaacgtggtagagtgaacggtcgagtgttgtcaggtggtgttgcgaagtgatactcgaccaggtggtcgagtggtgtcatagagtggcctgagctgaggttactcgacctgggggtcgagtagatgggaagaatgtgaaacgtcccatcccgggctgtccgcccggtgaggttgttcccatccgaggataactcaagtgtccttaggtcctatccgaattcgctctaagtgtaattctcaccggaaattctgagattcataagtaaaaaagagacaaattcacacaaagaaacaagccaactttattcatataaggtttcgaacgacatgagtgtttgcactataggctattacaatcattcgatccaatactttaacttaaacaccacccacttgcccggacaaccatccttgccgctaagccatatccttcccacgaacttggtcacattctgaaattaacgaatcatgagtatgatgtggtttacacttagcgatcatgcatatgctatgatgctccccatgtttcaccccccacacataactcaatcgttaggacagaataatagaaggatagatcgcatcaaccgaattcccgagccctttaagaccgttcggcctaaggtcggtacggttacgcctcaccttggtcgttcgaccattcgcttcctcggcctccgtcggcctagtggtgccgggagtgcccatgatctcaatctcggccatcttgttccgttcgctcgcacccttagaaagatcacgtttcttttctgagttttggtgagagtttcggtatatggacttctgttacttccttggctgaagggcgagttatttataaggaaggggcgagtaaccgcccttgcgaacgggcgcctctaggtccttccagatccttcagggcgcttccttcctaaccacacacgtggcgcgtccttatggcccggtaaccgccgggtaaccgctcaaggtaactgtcggggaaaccgtccgacaaccgtccgagtaaccgcctcatccccttccagctaagtcgagctagtggagctagctagcagtctcccgagctggtccagcttccctttgagctgtccgagctaccccgagcttcccttgagctgctccagcttcccacttagctttccgagctatttattcccacttctttccctcgggctcttggccattcatgttcacacgatttggccgcccttctctgggccttgggacgagttttctcgcccgactctctataagtctcgtcccagcccttcccctcgattcaagttcggatcggggatgttacaagtctcccccacctgagaaggattcgtccccgaatccggcccaagtcgttcctcgaccgttagacttttgtaccacttaggatagtcggcgaccattcgattctccgtttcccaagtgaactcatctcggccgataattgaccataggactttaaccattcggatgggtttcctccttgtgccttacagattctcgttagtaagtcggccttgtccgccgcacttaatcctaacggttccgtattcgcctccaaggtgttgagactcattgccctgatcgttccaatcagttcctccttattcctttccgtgtctacctctgcccttcttcggcttagagcatcggccacggtgttagcctttcctagatgataaacaatgtcgagatcttaatctgcgactagttccatccatctcctttgtcggaggttcaactccggctgcgtgaatatgtacttacgactcttgtggtcggtgaatatctgcaccttagagtcatagagataggatctccatattttaagtgcgaatatcaccgccgccatctccaagtcatgggttgggtaattgccctcgtgcttccgcaactgccgagaggcataggcaatcaccttttccctttgcatgagtacacaccccagcccggttattgaagcatctgtgtatactacatagggctcgtcggcttccggcagaaccagaaccggagcgctcgtaagcatattcttcaacttggcgaagctcttttcgcattccttggaccaagtgaattttgcttctttccgagtcaacttggtcatggcttgggctatcgtaaataactcgacttatacttgtttttcaccgtaacccgattgattcccctatagtcgatacatagacggaaactcccgtccttctttttgacgaataacaccggtgctccccacggcgaactgctcggttgtatgaaccctttctccaataggtcgtccagttgtttctttagctcggccatttctggcggagccatccgatatggagccttgaacggatccgaccggtctgggggtacccaagacaaggactggaacacgtccgcgaagtcttttgccaccggtatgtcctctaattccgaactcgttccaccatccgtggtagttattgtggccaagtaggcctcgcgtccgttccggagcattctctcggcttggactgcggacactactagctttcccgaggcgggtcggattccttggaattccaacttccctccttctcgttcgaaccgcacctttcctcggtgacagttcaacgttgctttatacttgcccaaccaatccatacccaagattacttcatgtttttcaagcggtatgatgatcaagtcaaccggcatttctatgcctttgatactcaccggtatcccacagacttgtccctcagggatcatagcctgtccgcccgccgcattcactacggtcgggtccattcttggttccttctggaacttcccttttccgatcatccgcgggctcacgaaactatgcgtagccccggagtcgaataggaccatggtctcaataccaccaatttgtagggtccctatacatcgccttcaatgctgagtaccctaccccaaacatgccatgcaatgtttatatttgactaggatggcttagtgacttaccggagatcgcattgaagttactggcctcgctagttttcttcgttagttcatacacacggggcaccacggcggctctcttggcctgtccggatggctcaccacctccgcggttgactttctcaccaactggcccttccgtctgtagttgcgggcactcccttatgtaatgccctgtcttaccacagcggtagcacagcttttggtcatcacgcgtccctctcgtctacctttgtcctgtctccgagcaatgctgggtgccgtgactcatacagccacacctctcacatgtcccctttgctttccagcattcgcccaagtgcctctttccccaatgagagcattcgtcccgacttcccgacgatttcttcatatcgtcgagttggtcgaacttccttttcttttcattcttcggattaccacccttcgggcggatcctttcctcctcatcgagattcgcctcgatcaatgccgccctttcaaccagttccgagaccgtgttgaaggtacggatcgagcaaagagtcctcaactcaacccgaaggcctctgaggaatcgacggacttgcaccgcttcgtcctcgagttctctccccacgtagcgcctgagtttgttgaactcctcctcgtactcacggacggtacgacgaccctggacaagatccaggaagttactctcaagtcggtcccatgcctcggacggaaagtacatcctgttgaactcgtcctcaaagtccttgaaggtctcgacacgctcacccttgcgtttatcaaccgcaagccaccagttatgcgcatcgccctccaagaggtggatcgctatgtccttcttgtagtcctccgggaaacttgacgtcacatcaactcacacaactcttaaggtaacttctctcctcctttattatttactgcgctttgttttgtagaagtagaaaaatcacgtttttgttttttttgctatctccttcgtttctctgttattccctctttctcgatctgccttcattgctcttttctttcatctctctcgtccttctccttcgaaacccaaagatgagcgacttcgaagattctcagaacaagagcaaccacagttacggcgatgattcgagttcatccgagacaaggtcggcggcgtcaccgccgcgagtacagagacacgccataaccctaggcggaatgggtccaattcatccgccgtcaaccagagctgacaagccaaagaagaaaaaggctgccaagcaaggggaggcacgccgatgacgaacgacgacctggtcgacctccggaggagatgccaggttccggcggaggtacatatgatcctcccaaggccaccgctgcatcctgagaacgtgccggtcgggtggtgctgcgcttatgccaatttcttcgagaaatgcggcctatttttcccaattccggcgtgaattctcgagatgctctactgtctcggcctcgccttttccgagatgtgtccgaacttcgtccgccatgtgttggcgttattcacccgggctcgggaagtaaacagagaattcagctgtcatgacctgcttcagctctgccaggtcaagaccaatgctaggagtgaccaaggcacgtactacatcagtgcacgtcccggatctctggtcctcggcggtttgaaagcctgtcgagacaccaattgccgatccaagtatttctttttcagagtagatcgtcattcaggtggcaattttgatcccgcgaggataataaggacctggtctaccaacctgggtcagatggagacctgagcgtcttgatttttttttgttgtttgggtcgaatccttgactgcttttgctaatcgttagtactgaaactaattgcttctttttgatgatttgcagcaaggaccaaggaagttactctgtcggagatgaaacttgagctgttaacccttctccgacgtggtcagactgattggtccactttcagcagaaatcccatcgtagctgctcttgccgtagctccagcagttcccgtagctccagcagttcccgcaatcgttcctccagcagcaccgctagatccgatcaaagaggtcccgcggattgaaccagttctcgaggctgatctgcctataggtacgagttccgttatattttctttggtttttaaaaatgtacgagttatcaagacagctgcgcaatttgaattgctaactaacaaatgtcgtgctctatttattcagttcctcctgattccagctccactttggaactcccgctcatcagaagaatgaggcgcccaagccttcgtattcaacgagccaacgccggggctcctgctcgtgctggtgatctgtcggccgcggtgaccgcggcttgaaacactctacctgtttccagcgcatctgcctcagcatctcatccctcgcttcctgaggtcaacgtcgggacctcagctacagcatgtcaaccggataacaatcaggtcgctcaggtatctggactatctgcagttcttcgttctgatggaacctgcggctgctactccggaggcagctgcgtctgcggataggtgatcctcgggcaggtcgcatggcggaggacgaggctccagaggtgggggccagtctttaaactggtctcaggaagtgaggcagacgtccaactccggtggaggatccgcgggaagcaggcctttccactggtcttacactcacgaccgtgatcacacgatcgttgaggaagaggctgggttagcgaacctgcttcgccacatcaaagggaggaactgccagattcctggagtgaagaacatggccgaggcggcggcctatgctgacatgatgacgaaggagggccaggtaattatcgataactgtctccttctaatttatatctttatgctagttgtgactttctgttttgctttcggtaggcgatagctgccacaaacaagctggatgctctctatgagcagcgtctgagctaggtcccctcggtgaatgagcttgaagaaggaaaggccctcatccgggagctgacgtcgagtgtgaaggctggtcaagatcgcgaagtctcgttccaggtatacctcggttttgacttgtttataaataattcgtcgatgatttgatgattctaacctgattgttatttcaggcggagatcgagaggctgaaaatggagctgtccacttcaaaagacctcgagaaaggttttgctgagaagatcgggttcatggagatggagatctgggggttacaagctgacaagcagacgtcgaggagcctaatccattgcttggagcagaagagggaagagctctccaaaaaggtggtggacctgacttcgattgcacaaggggcgaagagggcggttcacgatgctaaggttgagctggctgctgcgtattcgaagctactggctgggatcaaggagaagtgggtcgccaaaaaggagtacacggtactggaggggcaagcggctgaggtggaatcgaacctggctttgatcgaccagatcaccaaggctgctatcgatctgactgtggagaaacctcggctgcgagcagagctggatgacttagaggcgtagtgcaagtcaaaggaggtatcagactttactctaagcaagttggatctcccgcaggttttaaagatttcggtggtacgtccgatggacgtcgacgaacaagggacgccaattggcttggatgagttcgggagcaacaaagacgtgtttccgagaggtctcgcggatggttctggtgttgtcttcgctacgccagccggagaatcgagggagtgatcactttcgctccttgtttgttttaggatttcgtgttttgtttcagacttaatgcctgggaaggcttttatcctttcgtttattgccttttgaacttggtgcctggaaggcttttatcctttgttcgtttaagtactcgaatgcctgggaaggcttttatcttttttagctagtattttttgtctttcgttcgagtgttgacacttcgttggttttggtgcgagaccacctcgctttgtccatgttccggataataatcgaacttgtttcgcgtccaaattatttcggatgtgatatggtatgttcttcgaaggttaaaacttcgaatgagtttgagttgttttgtcttgggaaccgattgaagtgaggtcacacaagggacctgccagattttgggagctgggcttgtggtatcgccaggtcgcgaatgaaacctttgtttcttccttgtttactatgttatgtgttgatagcgaaagagttagatttggttgtagtaggtgagctccgatgaagccgaagtgatgtgttcttataagtttagttcactattgactttttggaagcgagatcacaaaatggatcctccaacgttcaggcgttgggctttgggtatcgtaagattacgaatgagtttaaatcatactgtaaatgattgtctttgcgaaatatgataataagtatcaaaattttcttttattcttatctccaaattgttaagtacaaaaggaggtaaagcaagcgacgatctggcgtttggtcattgagcagggacctgctcgataccgaagaaaggttaaactgtcaggtgagcagctgatcttcgttgatgggggatgcgatatctatttcccttattgaagtttcgcctttcagatggaagggttgaggtggtaattgcgtttgcggaggtgactgcctgcatacctggttaagggattaagcccttttgtgatttgattgaattggtggttctgctcttgggggagctgcctacgtatcctgccaagggatcaagctttatcgtagtttgattgtttttgagtacctattcgtggtatttcttgagatgcatggcattccaaggccgtaactcacgtactccgttgataacttttacgagcttatagacgccgcaacgtaccacctcggtgattcgatagggaccttcctagttagttcccagttttccagcgtttagctctctcgtgttgctgaacacttttcgcaaaacgagctctcccacttcgaatctccggattttgatattggagttatagtagcgggtgacagcttgttgataattttgaactcggatcattgcctgatctctgcgttcatcgatgaagtccatgttgtcgcgtaacatttgcgtgttcatgtccgagttagcatgactggcggtccttctcacgcttggtattatggttacgatagggattactgcttctaaaccataggcgagagagaacggtgtttcttgcgttgatttgcgaggtgtagttcggtaggcccagagaactccgtgaagtacgtcggaccacattgattttttggaatcaagtattttcttgatgttgctaagtatagctttgttggcggcttctgcctgtccgttaccttgtgggtaatggggggtggatgtggtaagacggatcttccatttgtcgcaaaatgctttgatttttctcgaggtgaggttagtcccgttatcggtgataatctcataaggtatgccatgttgacatacgatattttcccataggaagtcctcgacttgtttctcggttacctgttggaaggctttagcctcaatccatttggtagagtagtcggtgaggactagcaggttttttagtttcttcttcccaccggaggcttccatgggacctacgacgtccatggaccacttcataaataggtaaggagaagatatcgaggacatttcctcgggaggttgatgaagagtaggtgcatgagttatcacagaaaacctgatatactcagaagccctcagtgtaaatgatcagcgagctaaagacttgtgggtgctagattctggatgcacttctcacatgacttcaaggcgagattggttctgtagtttccaagagaaggacactacaaagattttacttggtgatgaccattctgttgagtcacagggacaaggctctatcagattagacactcatgggggaaccattacaatccttgagaatgtcaagtatgtaccaaatcttagaagaaacctaatctctacaggtaccttagacagacttgggtacaaacatgaaggtggagacggtcaagtgagatactacaagaacaacaagacagctctacgtggatctctctcaggtggtttatatgttttggatggtaatacagtgatcgctgaaagctgcattgctgaaaggtccaaggagttgacaacactctggcatagtcgtctgggacacatgggtggtaacaacatgaagatcctagcaggaaaaggattgatcaagcctagtgaagctacaagcttggagttctacgaacactgtgtcatgggaaaggcaaagaaagtcagtttcaatattggaaaacataattctgaagaaattctaagctatgttcacgcagatctctggggttcacagaatgtaactccatccatgtcaggtaacaaatacttcctctccattattgatgataaatccagaaaagtttggttgtattttctcaggtctaaggatgagacgtttgacaaattctgtgagtggaaggagcttgtagagaaccagacagacaagagagtcaaatgtctaagaacagacaatggattggaattctgtaacatcaagtttgattcatactgcaagaagtatggcattgagaggcacaaaacgtgtacttacactccacaacagaatggagtagcagaaaggatgaatagaactgtgatggaaaaggttcgatgtttgctaaatgaatcaggattagaagaagagttctgggcagaggtagcaactacagcggtgtacatcataaacagatcaccgtctgcagctattgaccacaatgttcctgaggagctttggcttaatcgaaaacctggatacaaacatctgagaaggttgagagcagtagcttatgttcatgtggatcaaggcaagttgaaaccgagagctattaaaggaattttcatcgggtatccatcgggtacaaaaggatacaaggtatggctcttggaagaacaaaaatgtgtcataagcaggaatgtaatattccaggaagaagtggtctacaaggacctgaatgacaaagaaacagttgttaagaaggaagatatcagaactcaaactgataatcatcttgtcatttccaagactaaagaagtttcagaccaaggtggagtaactcacatagaagagtgtgaggagtctgatgaaaatgatgaacaagagccggagacagtgaatgagactgatcccacagtggagagtgaaggttctttggccaactatcaactggctaaagatagagtaagaagacagatcaatccaccagctagatttacagaagaaagtggagttgcttttgcgttagtggtggttgaaagtctcagtctggaggaaccagaaagctatcaggaagccacacaagacaaagagtggttgaagtggaagaatgccacacatgaagaaatggattcactgattaagaatggcacttgggatctagttgataaaccgactaacagaaagataattggttgcagatggctattcaagttgaagagtggtatacctggggtagaaccagtaagattcaaagcccgccttgtggcaaagggctacactcaaagagaaggagtggattaccaagaaatatttgcgccagttgtgaagcacacatctatccgagtactcatgtcagttgtggttgatcaggatatggaactagaacaaatggatgttaagacagcgtttctccatggcgacttagaagaggagctgtacatggagcaaccagaagggttcataacagataaaacaaaagataaagtgtgcttactgaagaaatccttgtatggtttaaagcaatcaccaaggcagtggaacaagcgttttggcaggttcatgatggagcagaaattcattagaagtgctcatgatgcttgtgtatatgtgaaacaggttgaacaaggttttgtgtacctgttactgtacgttgatgacatgttaattgctgggaaaagcaaggctgaagtcaacatgatcaaagaacagctgagtgtagaatttgaaatgaaagatatgggacctgcaagcagaatactgggtaaagacattactcgagatcgaaagaaaggcattctgcgcttgtctcaggcaccttacatcagaaagattgttcagaggtttaatctggatgaagctagagtggtgcggactcctattggcgcccatttcaaacttccagctgttagagaggacgatgagtgcattgatacagaacaagttccctactcaagtgcagtaggcagcatcatgtacgccatgataggtactcgtcctgatttggcctatgccatttgtcttgttagtagatacatgagtaggcctggtagtttgcactgggatgcagtgaaatagatattgagatatttgaaagggtctcaggatttaagtttggtgttcaacaatgaaaaagaatttagagttgcaggttattgtgactcagatcatgctgctgatttggacaagagaaggtccattagtggttatgtgtttactgtaggaggaaatatagttagctggaaagcaaatctgcagcctgtagttgcagtgtcttctacagaagcagaatatatagcattagcagaagctgcaaaagaagctatatggataaaaggactgttaaaagacatgggatgtgagcaggagaaagcttgcatttggtgtgactcacagtcagctatatgcttgtccaagaactcgtgtatcacgagaggactaagcatatagacgtcaggttccatttcataagagaggtggtgcgtgcaggagtagttgatgtgttgaagattcacacctcaaggaatcctgcagatgcattaacaaaatgcattccaataaacaagtttgagtcagctttggatgctctgaagctgatcaagtgggaatgattaagttcagcccctgctggaggttatgaccaagtatagtgattcactggtatgaagaagaggaatgaggatcaaggtggagattgttaagaagtgatcctaattctggtttagttgcagaaacctgaagtcgacctggttaaaagactgaattggatttggattggtattggagccggttaagctctaatgttcggttattggaagaagactggtttgactctggtttataaggagaaacagaagactcttgatggcctagagggtttactaatgagacttctatatataaggtctctgtagtcgtcttccacaattattcagttagaaaaacagactctgtaatcttcttcttcctcttgaagctccattgttgtgagctgagagaaacacttctttgatagtgaattgttggtcagaatccagccgagacgtaggcttgctcacaccgagtaagctgaactcgtaaaactcgccgtgttgttctttgcttgtttctcatcttctttctttgttctttaatcaaatcgaagagcgtaagagagagagcttgagagatcgattggggtctttgatcggatcgatttcgaggttggttttagtacaattggcctcgatgcctctttcggttactaggtatatgaggaattctcctgagggaactccgaaagagcatttcttggggtttaacttcatttcgaatttgtttaggattttgaagcattctcttaattgcgggacgtggtcttttcacgagctgacttgaccagcatatcgtcgatatagacctccatcgttttacctagctggtcggcgaacattctattcaccaatctttggtaagtagctccagcgttttttaaaccaaagggcattactttataacagtaggtgcctcggtcagttataaaagctgttttttcttggtcatctgggcgcataagtatttggttgtacccgaagaatgcatccatgaaagacaatagttcgtgtcccgcagtggcagtgggaaactgtctttaggacatgccttatttaggtccgtaaagtcgatgcatactctccacttcccgtttttctttttaacgacgaccgggttggcgagccagtcagggtattttacttctcttatcgatccgatcttgagcaatcgatcgacctcatcgtgcacaactttagccctctcgggacctagcttgcgacgtttctgctttataggttggtaggtcggatcaacgttgagttcgtgtgaggttacctcgaggcttattcctcggaggttcgcacttgaccaggcaaagctgtctttgttttctttgagaaaggttatgagatcctctcgtatcgctgggtcgaggtcttgacctatcccaacgcatcgtttgggatctgattcgtctatgcagacctgtgttatcaatgactttcgaggtccgcattgagaaggatcagaggatctgactgttttcatttccgcgagtttgtcttctatcattagtactacggggtcagcctttttgataaggtcgtagctgcccatatagcattttcgggagctgcgttggctgccgtgcacgactgctattcccttgtccgaggggaatttaatgcattggtggtaggttgatgggacggctttcatggtgtgtagccatggtcttcccagtattgcgttgaaaggagctttcttgtcgactacgaggaaacttgtgagtcgcctcactcctcgtgcgacggtcgggagctggatggttcctagagaaaaggtcgtatctccagcgaacccggtaagtgacgttttcctgccctgcagctcagaatcgaggtgccccattcttttgaaggcgtcgtaaaagagtacgtcaactgagcttcccgtgtcgatcattatacgggagcgtcatcgtgaggtttatcgaggtcggtggtttcgctttcccagaatgtgatctggtggtcaggtcccatcatcgggctcttgccttttgtgtaaaaatctgccttcctctgatgagttttgatcgaattgattgagtcgttgcagagctgagaccctcccatgatgaaatcgatgcgtttaggggagaggtgctcggttgcgcttctgcagaatttcgagaggcgtaatggaaacctcatgtttttcttatgcggggcggtgggaggtgtggtgacgtaccttcctgtcccgccacctaaatcgagtgctgcaaagactaggtctatgcgttctctcatagcaggtgggggagaatcacttccatccggtgttcgttcccgtttcttttgcttgggagtttgctcctcctcctgttcgtcgggaggaggggtttcaactttggggtttgaaccttttttagtctttcccctagctgcgattaactttttaaaggcgcgacactcctcggtggaatgtccccttttcatgtgaaactacttcaatgatggaagccgctactttcgttagcaagggtggtgaaaactttaaagaaaacccaagtatgtatttggtaccatgagttcaaattcgatgctaagacatgataattgcaagttagattcaggttcaaattgatagggaatgatatcagataatgacagtgtgatcgagtagagcattcaagacatggtgcagttttacttcaatcattgactatgcatcaaacaactagcaacgatgaaccaaaatgcttacaaggctatctcatcataatcccctatgcatatgcgacaatcctatatgaaacatcgtagactcaatcctaaatgtgatgcaactatatgaacctaaatgtgatgcaactatacgaacactgcaactatacgaacactctgtttttcttcttcttcttcttcttcttcttcttcttcttcttcatctgaagtttgaacaatccatgcactagattttagaagctctttttttcggtcctccaattttttgagtaacttaatagattctttatttggacacaacgtcaattctatatgatcagcagcaacagatgcaatatctcaattctatatgatcagcagcaacagatgcaatatcacggaaagtacgacatagatgtctatatcgctttccaatcgattctttgactgtttcattacgtggctctgaatgataataagatatttttcgtgcttttgcctctttactccatcgatttagaatgtagttagatgggattcttctaacattcttcttgtccaacattttcaatgcatgaagacataaaatcccggcaaaactaaacttcatgcaactgcaacatatcgtctcgtttgcaacatcataattaaccaaatgctcttgtgctacaccacgataagatactttatgttcatataccatctcagacttactaaccttgttggcaacataatcaccaataactatgtattgtttttggaacaagctaaaaatttcgggtgtatacacttcctctgcatgttgcaacatctctacagtagcacataataccggcaaggtatgcatcatattgaaatcagcaactaattccttatatcgtcgatcctccaacactctctcgtagtgttcaaagaagcgcaacaagttataactatgcttcaagtattttttcaaaatattattcatactttcactacgttgtgtgctcaccatatatgctgtaaaagtatgacgtccatataccattgcccatttttctctcagctcaaacaaattcttcaaccatttatcctctgtcaagttatgcttctggagcatattactccatgccaataaccaatattcttcttcctcatggtcatatacacacttactaaaatccatgacaaattattctgctcaatgaaatacatgactcaatttctttgcagcattttggtaaatatgccaaacacataatctatgttttgtatcagggaatacctttactattgcattcgccattgctgcacattggtctgtaagaattgtttttggttgttttccagacattgctccaagaaaagtctcgaaaagccacttatatgactcactggtttcctcatataagagagcagcaccaaacacaactgtttgcttgtgatgattgaccacgacaaatggagcaaatggtctatcatattcattggtcttataagttgtgtcaaagcaaatgacatctccaaaaagattgtaatcacttattgaccgatcatctgcccagaatatattagtgatcatatcatcctcatcaagttgcattgaataaaaaaaagacgaattaccctccttttttctgaaagtattccaaaacagctccagcatctcccttttccatttttgccattctctttctcggtatatgtaattttgataatctttcttcaaaaaacccagattttcttgccccccaacttctctactcatcatttcaacagttgcttttgctgaaatccctgacatatcatctgcatgttgtttttgagagatagataattcccgattttctttcaacaaatgcttcataggtgtttcactaaatcaggtgtgtgatagggaggatatgcatagccctctctgatctggtcatcatattc

SEQ ID NO: 1177 - DNA, 74265 bp, Arabidopsis thaliana
gaattcaaaacgacgtcgtttgattcaacggagactgttaactgaaagtatactctcttatcgtcttgttaacggaaaaataacgtcatgcccgaaatggcctagtcaacgaaagttgatcatttttcaaaaagtcaaagcaaagtttaggatttttatggtattttgaaagttcatgcttttttcgtcccaaatttgaaagttcacacttttttcgacatttttcccattaaaaattttagtctagttagaaattatgatatgaatttcttttagattattgccttgttgattattgctacatgtttgactcaatccgcctattagaaaatcaagatggaaaactgacacacttgatgatatcctcgtttccaacacaattcattaaggctggagctaatcctacttcttttccatttacctcatcaaaatgattagtattcatagaacttgaatccttgttcataccttatatatgagaccctatagaataagttatcttctcctctatgataataaaaaaaaaaagagagtgattgagttgataacctatagtgtaaagggttagaaatatttcctttgatcccattattttatattctaaggaatgatcaattgcaaaggttggaaatatgcggaggatatctatccgatggagcgagtactactttgtcctatctccgaaaagaataagtctgggggagagaaagaataaaaaagagaatggtcgagttatcatggtatagtacatgaatgagtctagaaggttcttgaatattagcttgattgatgagacccagcgatgaaagcctaatggatatagttgtgaaacttaggtatagaatctagaatgttgtgtaagcttgcggagaattacattttggttaggaattgattagacttgctaagcatatggattttggtactagaattatgatggctgatataacccgattttcacttcttttagctatgattaaggtatagttgttccttttgttatttctagtgtattttctaatctttttcaggtctttacatattttggatgcatttggagattatggaacattcttgagtaaaagagagaaattatgctgcagaagcaatcaggagacaaaacttcacgtaggtgtcgattgacaccacccctggtatcgagcgacaccaatacctgacgacaattcaaagatgcagcttattgaagttttgaagatttcaaaatttggctcagaactttcccttatttctaaaaacggcccataacgttttaggtcatatatatatatatatatatatatatatagttttaaaggtcattgtttagacttatacttggagaggctaatatccttttctcttttgtacttggagcaaaaccctttaaagaaaatatttctaaactctattctcttattgtttcttacattgatttcttattcaaacatgtttttttctttcataatcatgtctgagtagttctcttgttgtgtttagggattctcattagggatttagatgaataagtagatcaaaaaccctgttaggataatatatttagaattcttcatctttgattatttttaatgctagttctagagtaattaactagaacttgattttaggataataggtatacccgccataggtatttattactgtaacgatcttagatgagcctagtatttagatgcggactagcgtctatttagatacttaggtgaacttatcaaacctgattacaatgcttgattagttctagagattttcaagagagttgggatcaatactattaagcatagtgagtaatacggcatgccaccggttactctataatagtgatttgagttctagaatggttcgataataatcctaatttactgctagatctactagtctgataattcctgagaatttccctaaacccgacgttttaatcatttgaatctacaaccaatctattttattgctttcttgtcttttacttttataatattttctgtttagctttattcgaaattgttattctattgtgtgatccgagaactttgtggaattcgatcccttagtgctataacaacatctttgtttgagagagtagtcattaggataatttgacacacatcaaatttggcgccgttgccgaagttctctttgattcaccattagataaggtgtagaatttagtctaaatttgtcttttcctttgttactcatggttctttttcttcttattcttgtgactgcagctaataggaattcgaacgcaactaccggaaagctagcaatctgtggatatgttgagactgattatcagacctgatgttgcatgagtcttacgagacagagatggtcatgcatacaatgaagagggccagcaaattgatgaacagggaaacctgctacctgaaatcgccaagtctatcaatcgacacaacttgggtgtcgctcgacaccaagaaaatatcagagcagatggtcgtcggatgactcttggtgactccaacagaccggatcttttctattccaatcggtctacaatccgaccacctacgtttgacagaagcgttttcgagataaaccctgctttctatactcttgtgagtatgcacccttttcatggtgaaccacaagaacacccggtggatcacattgagcggtttgaagacttggtttcaagcattaaggcaaaaagtgtttcttatgactaccttccctgcaaggtcttcccatattctcttactggggaagcatctttttggcctaagtagttgaagcatggatgtttgacaacttggaaagaaataaaggtttcttttctaaacaacttctataatgatgcaaggtccgaggagctgagaatgaagatctctaccttctctcaagaagcagctgaagcatttaaagccgcttggatcagattcagaagatatcagagggactgcccacatcatggttttagtgacgttaagttgttaggtgtcttcttcagaggagttgattggcattatcagatggctttggatgcagctagtaacgggaattttatgtcaagatatccagaggatgcgacaatgtttattgaaagcttagcttcaagcagtagcaccaaaagcgctgacaatgaaaggaaaactcaagctgaaacatttgataaccaacagattcagtatgctgcacaggttgactgtttagtcactttagagaagatggatcaacagggatacatgagatacaatcataaatctacatatcagaagccggtttagcaatctacaagctttactccgacttatgcttcttcaacccaagcccactaagacgattgaatcgatgctcgaacagattctcagaggtcaagagaagcaaacgaaagagtttgatcacaaattgatgctttatccaaagatgtgaattggaagattcaagtattgaacaatcggatcaagcaattgactataaacatagcagatgttagtgttattaagttaaggagtggaaaacagctaaatccggttcttcaaaggaagctttctgctatcaaactcgtcaatttggaagagaatgatgttgcagtttttgcagacaagacaccagtgtcgaccgacactactgggtgtcgatcgacaccaggctacgcagacactacagaactcgacagtgttgacaaacaccaacagggtgtcgatcgacaccaacccagtctagacctgcgaatcctccaaaacccgatttcagctgcaaaaaaggcaaccaaacccaagattcctttccccatgagtcctaggaagtccaaacaagagctagatgatgctagatgcaaagctatgatggataagctgattgttgagatgccacttatagatgttgtgaagtctttccctatgatcaagcattatgttaagagaatggttactaaggatttgaatagtgagcatggtgtgatgatgatctctgcacatgtaaccgactttattcagaacaagactccatagaaacaagaggataaaacgaagacaatggttatctcggaacagattgtagatctgaattgtagacagactatagatggtcgagttggaaaatgagtgtcgatcgacaccccttctagtatcgatcgacacccacaacatactgctccagaattgtttctcaagactgaaatcgatgttgtaagtccaggacgaattgtcaagtcaagcactacacctttactactcattcaacctcctaaacggctaaggtacttatcacctctatctaaacttccagatttcatcaatacgactttgaaattttccaagactgtttcacagttagtttctcgttgactgcttgtttcttcttttgatgattttgcaggaaagaggagtataccacccatacttgagtcccaccctgcagatcttcctcacttcaatggtcgatctcacgcgctaactgctcatacaccaccatggatgatgcgatattcttctaagaagcatttactgccaccttctgatccacctgattcctgaactccagcaaagtcaagctattgactataaacaagcgcttcgtgggaggcaacccactggtatgattttctttttcctttatatatatttttcttttatttattttttcgctaacttcggatttgaatgccactggggacagtgacgtttaagtctaggggaagtagttactaactacaattttctttttgagtcttattcttactcttatttttctaatttttgagtagttttattgagtcaagattttgtttggaattatgatatgtatgtctttagattattgtctgattgattattgcagcaggttcgacttaatccgactactggaaaatacagatggcaaaccgatatacttgaggatatcctggtttccaacacaatacactaaggctggagttaatctcattgctcttcctttaacctcatccaaactattagttttcatagaacttgattccttgttcatacctgatattgagacctatgtggaaaaaaagtattcctctccccttataaaaaaaataaaataagagattgatatgatttttggtagtgtataggggtaggaatgttttccatgacctcattactgtatattattaggaatgatcaattacaaaggttggaaatatgccgagggtatcaattcattatgcgagttcccctttgtttactcttcaaaaagaataagtctcgggaaagaaagaataccaaaagaaaaaaaaataaagaatggtcaatttatcatggtatagtacaagaatgaatctagcaggttcttgaatattaccttgcttgatgagacccagcgatgaaagccttgtggatatagttgtggaacttaagtatggaatctagaatgttgtgtaagcttgcagagacatacatgttggttaggatttgattagagctgctaggcatatggatttgggtagaatgattcagggtataaactagagaatgttgggagctcctttgtttttaaaacctcttctactggttccggttttgagtatggggaagttgatataaccctattttgactgttcttagctatgttttaggtatagctttttgagtctttttgttatttctagagtccttttatagtcttttcaggtattctatgattgggacaagaatggatgataagaagacattttggagcaaaagctgaagaaaataagtcaaaggacgaatttggtttcagatcaagtcgagagtgtcgatcgacacactcttggtgtagggaggaggcaacggaagcagaagggacacaaggaagatctcataacggaatcaagctatgctcgtgagacttattacggaacttagaagtgagcggaggctcgggattggatgagaaagaagcaatttcttccgtcaattgaaaaaacagtaaaccctaatttcccaaatcactgtctaatagcaacagcaccagccacgagtacttcaacaccgctttcatctaatacggcaccgtatcagattccacgaagggccacgctagtccatcttggccagagtctccttgacgaacctatcaaaatctcttttactttgttttctttgatgacacgaagggatcagctacaagaaaatagacgatttgcgaggcaaatttgcgatggcaaatagtcctcgctaattgcttcagacttgcgagaactttgcgaggtagaaggaccacctcgctactcctcgcaaatttgcgagaagattgcgaggaaattgcgtggagagcaggattcctcgcaaaagagtcacaatttgcgagggaattgcgtgtattggtgacgactcggaaattgcgacgaacttgcgatgcgtaataattctctagcaatatttgcgatggattttcgagtctttggcgggttaggtgagcacgttttaaatttttttaccaatctggtttgtaggtgggcttccctcgcaaattcctcgcactaaagatcttttcctagcaaatccatcgcaatcggccttgcaattccctcgcaatatttttttaggcagctacaaataaccaacgtaacatgtaagaaatcataacttaaaacatatcatttacttgcaaacaaaaaaaaattctaaaaaaaaaatttcgtatgaaaataataatgtcttgggggtagagagcatgagatttacatattacaaagttggatgtacaatcatagagatcaagcgaccagtgaggtgacgagagagtattatgacggactgcgccgtttcatgtatcaagcgacaaacgaaccatttgctcgtgagaacggtacaatattctgtccatgtcgtaagtgtctcaatgagaaatatttggaatttaatgtagtgaaaaagcatctttataatagaggatttatgccaaaattgaagaaaaaactcaatgtcgactagatgtctcaggacagaaccctaagacatctatttatacaaaacgaaataaaatgatagtaaacgggccagggggtcgagtagatgggaagaatggctccagagtcactcgacctgggggtcgagtatggtgctggatgcacacgacctggtggtcgagtatgtcttctggttctggctcgtttcttccaatttgctcgcaaacagctccaaatcacctgaaaataactgagaaatgcaatatgtatgcaaagctatcctaatcatgcaaagtatgcaagaatgatgagaaatgatataaaatagtgatgaatgatacgaaactggactcaaaacgatgatgaatggacactggaaacatgcaaattatagacatatcaactcccccaaacttagtctttgcttgccctcaagcaaataagaagacatagttgaaggagaggtttgaaggcggggactcagaaccaaagcatatgatagagcaaataaaatcaatgtccaagttggtagttctaagatgagatatgattgaattttactcaaaaacgttagccatgccttgttatcaatcaatccgtctcttatacttgacctacacatgctttcaaatctaccaatccctttaacattcattagttctggaacgtgaatcaagcaatgcatcatcaatgaactcatttggctaaggtgaaggtcaagagacaaagatggtcccttacagaataggcttaagtaacaggggatccctcaagaatgattgagctttagtagaatgctaaaggtaagtcccaagttatgcatacagagataagatcccatctacccagagtataacaatgaagttctaatggtaatcccaactccagtcccaacttaactctaccctttgcactcatgaatctttcaaactctttttcatatcattcttttcttttctcttaactctaggagaagctttctcaacactctgatacatctagcggatttggatttctttaacaactaaagttcctgtttttaatctttaaaaccaaaggcttttaacccttcttctttagctaacaagaacctcattcttttctttaacattcccaaaacctttactagattttttttctaacttctttagcttacttcccctagaattctttccctttccttatcaacaatgaattcacccttttcttttaaacacatcccaacccatgatataagcgcccacctaatcctatccagtccgaagaacgcgaactagaactacatgagacactatctttgtcgttacgaacctaacactttctaccaagctcaatcgaaataagacctcacaaacactcacaagtgatatagggcttgaaagaaagttcaggtttgggttcgggttaactgctctaataaggagagtcagctacttggattaacaagagtggttaaaatgagtaagaaaatccaagtattttagggtatccatgtgttcaaattcgatgccaagacatgataattctaaatcagattcaagttcaaattgatagggaatgatatcagatcctaatagtgtggtcgagtagagcaatctaggcatggtgcagttttacttcaatttcaatgactacgcatcagacaactaacaacgagggcaatgagcttatctggtgaaccaaaatgcttacaaagctatctcatcattatcccctatgcatatgcaacaatcctaaacgaaacactctacactcgatcctaaatgcaatgcaactacatgagcactctatttttgtgaaatcattttctaaaatttttcaatttttttggttttttctatgccttagatgaatgcagactcaaaattatatacaatgcaacaaacacttcctgagccctgccccaaacttatatcacacaatccactgtttgaccaaatttggaagagagtactcaggacaaaacacatcacaaaaacaaaataagaacaagagatggtatattgcaatggtggagtgaggtgcatacctcagtggaagaaggagcggagttggtcgtcaatagctgcctgtgattgctcccaggccatcgaagaatctccctgttgtgtctcagcttccccctgggggtactcgacctctgctccttcgtcgcggccagcaccgctctgatgatactcgacctctcttcttctgctgcggccagcaccgcggtcgagtgaattactgacatggagaagttgtgactgcatcatttgctatactcgaccacatcgtcattcggtccctgtagggtgtggtcgagtgatttcctagggtgaaagccagaacaatgtcgattttgattgctctgtggtcgagtatattgttgctccttcaaagccagaatctttttccctcagctcttcatacttatctcctgaaaacactaacaagatgcatcaaaaacaataaggaaaattaaagatatgtacaaagataggcttgagacttcctcccaagtgagcttgttttaaagtctctagcttgactcctcacactcattaagaagaaaatgggtgatagagaggatctgcatagccctctctgatctcatcatcatattcaacatcctctcttgagagatgagtagcagaatactcaattcttctctcctcgaaataggcctctttctcttctggtggataatctatctcctcagaccatcttgaagtaaactttttcctcgggatagaatcaatcccgcattttgattgagctttctcttgcatctgatccagtttactcttaagttcctcaactgtctaagctagcttctctatggtttcttcttgctcatcagatttctttttgagatctcgcaagtcaggtgtagaggttgtgcttggcctggtgattgaatccgaaggttgaggttgagccctgatcttttcttctacaaccgtcctttgcgaagtttcgttgatgtcaaactgcagcttgatgtgcttcccaaggttgagacttattctcccgtctttgacatctatcatcgctcccacgtaggctaaaaaaggtcttcctaggattaaaggatccttaggttctgcttccatctcaagcacaacgaaatctgtaggtacttccactccattaatcattactgcagatcttgtagcaggccaaagggtttccttgaagacctatcagcaaggatcaaggtcaggtcgcaaggcctatactgagtgaattccagcttccttgccacggagagtggcattaagcttactgaagctcccaaatcacatagacaattgttgaaaaccaattgaccaatggaacacggtagagtgaaagttccaggatcttccagtttttcttgaacactcctcttaacagtggtcctagacggattagcatcacattcgtcttctgattcttgataaatcttgataaatcttgatcctttccagaattgactttctcacatctttgtgaggattcgaaatcaggttgagaagttctattagaggcatcactgcttccatctcatcaagctgcttctctgcaagagaattgtatctttctatccatgctttcctgaatttccatggaagagcacgtgaaggtgatggtgccggcttgaatcgttttaccatcctctctatgatggctgctttctcgtctaggttagactgagtttgaaatttcaatctgagtagaaacctccccgtcctgaacatcactgtcctcggtgattgatgtggagacatgtcgagtaggcagctctcgatcatgacaaatggtgatagcgtgagcggtggcgtattccttcgtgttctgtatggactttcctggaagtcttgttacttttggagcagaagttgtcgctgtttgtccttccatgtatctaaccttagaggtaagtgcctcaagtttgatattcagatcgttaaaagtgcaatcaaccttgttgtggatttctgccatctttttggcgagatccattgcacctgcagcttatccctggagaatctgctgtaacatgttcttcaagtctgaatctggagttgttgaagctggttgttgttgctgctgtgtgaacccaggtggtggaagttgctgcggatagtttccctgatactgctgattaggaacataaccctaaccttggttgtatggaacaaagggcttgggttgattctgctacgttgaaaggtagacttggtcctgcgggtttgcaacgttagaagcggtatcaagaagcatcctgatcttgggaacgacacctctgtagagggtgctgagaagtgaagctttggagaaaccatgatgaggacattgtgtctggtaacctttgaatcgctctcatgcttcgcagaaagtctcattatttgtctgtatgaaaccggagatatcattccttagtctcgcagtcctggagtttgagaaaaacttagccaagaaggctttcttgcagtaattccaggaggtgatagagccttgaggaagcgacttttcccactgatgggctttgtctccaagagagaatggaaacaatctgagcttgaagccatgctcactaactccattgatctttgttaggctgcagagcctatcaaactcgtccaggtgatcgagtggatcctccatagggaggccgtggaacttgttgctctgaaccatggcaataagaccgctcttgatctcaaagttgttgttctgcacaggtggaggcacgatgccattacactgattgtggttgtgtggtgcatcgcctgcacctatgttgtttggttgcacttgctcatctacaacagcagccattgtgtctgtttctgtttgtgttctgagttggtgtgcaatacggtcgatgttatcgttgaacaagagattctgatttcctcgtgaccgtgtttgcatacaaagttagtaactttcagaaaaattgaaaaagaacttgatcttaagtattctgaaatctcaaatatagcaaacaaacacccaattggcaacggcgccaaattgataataggtttttgctcaattaatcctatagcactatcatgtcgttgtagtattttagttgccagacactgggtgtggtcgagtaagttggtcgagtaattgtaaaaactaagaaacagacaatgagaacgattaagcgataacgataaaacagagaaataatatagacgagaaattcctaaggatggggtaatcgagtagagtggtatcctagcctattcgaatggttaacaaacgcaatcaagctatccctagacaacaggttcagcagcagatcaattcactttcgtgatagaattcctcaagcaaagctagcccagactagttcccattaatggaatctaactatgcaggcaataagaacagactgataaagtcaataaacgctctaaacggccaatcccttgggatagagacgcatatctcaggaactagtggatcaagcattcaatcgaacaccttctgggtgcgggaatgcttgggatcgaattccagttgatcagaaagaaataagcagtaaacgcaactagtcctaaagggattcaatcaattctaaaacttcaccattctacagagtacggattccacaactattctaacccatccctaggaattctaagtcactactcagacaacatgcttaaagacataaacgcaaataaatgataatattgcataagtaaagagataaagagtagagaaacaagatgacagatgaaatcaaatgcggaatctaaataacttggaaaaatctagaattacaggttggagaagcaaaagcggcgcagcagagtaaaacagaaaataaaactgaagcaaaaactcaatgtcgactagaagtctcaggacagaaccctaagacatctatttatacaaaacgaaataaaatgatcgtaaacgggccaataacctaatcgctcggcccatagaaaatgggccgagatgggcttcgtgatccgatggaggtccaggccgcttccaaacactttgtcttctcttcttctcttccttgtgctcagcttgtctggttgagtgcggatttgagtagactgtgaagacgtgatcgagtgtccggtcgagtgatggtgttggtggtgagtgatgatactcgaccacagggtcgagtaacgtggtagagtgaacggtcgagtgttgtcaggtggtgttgcgaagtgatactcgaccaggtggtcgagtggtgtcatagagtggcctgagctgaggttactcgacctgggggtcgagtagatgggaagaatgtgaaacgtcccatcccgggctgtccgcccggtgaggttgttcccatccgaggataactcaagtgtccttaggtcctatccgaattcgctctaagtgtaattctcaccggaaattctgagattcataagtaaaaaagagacaaattcacacaaagaaacaagccaactttattcatataaggtttcgaacgacatgagtgtttgcactataggctattacaatcattcgatccaatactttaacttaaacaccacccacttgcccggacaaccatccttgccgctaagccatatccttcccacgaacttggtcacattctgaaattaacgaatcatgagtatgatgtggtttacacttagcgatcatgcatatgctatgatgctccccatgtttcaccccccacacataactcaatcgttaggacagaataatagaaggatagatcgcatcaaccgaattcccgagccctttaagaccgttcggcctaaggtcggtacggttacgcctcaccttggtcgttcgaccattcgcttcctcggcctccgtcggcctagtggtgccgggagtgcccatgatctcaatctcggccatcttgttccgttcgctcgcacccttagaaagatcacgtttcttttctgagttttggtgagagtttcggtatatggacttctgttacttccttggctgaagggcgagttatttataaggaaggggcgagtaaccgcccttgcgaacgggcgcctctaggtccttccagatccttcagggcgcttccttcctaaccacacacgtggcgcgtccttatggcccggtaaccgccgggtaaccgctcaaggtaactgtcggggaaaccgtccgacaaccgtccgagtaaccgcctcatccccttccagctaagtcgagctagtggagctagctagcagtctcccgagctggtccagcttccctttgagctgtccgagctaccccgagcttcccttgagctgctccagcttcccacttagctttccgagctatttattcccacttctttccctcgggctcttggccattcatgttcacacgatttggccgcccttctctgggccttgggacgagttttctcgcccgactctctataagtctcgtcccagcccttcccctcgattcaagttcggatcggggatgttacaagtctcccccacctgagaaggattcgtccccgaatccggcccaagtcgttcctcgaccgttagacttttgtaccacttaggatagtcggcgaccattcgattctccgtttcccaagtgaactcatctcggccgataattgaccataggactttaaccattcggatgggtttcctccttgtgccttacagattctcgttagtaagtcggccttgtccgccgcacttaatcctaacggttccgtattcgcctccaaggtgttgagactcattgccctgatcgttccaatcagttcctccttattcctttccgtgtctacctctgcccttcttcggcttagagcatcggccacggtgttagcctttcctagatgataaacaatgtcgagatcttaatctgcgactagttccatccatctcctttgtcggaggttcaactccggctgcgtgaatatgtacttacgactcttgtggtcggtgaatatctgcaccttagagtcatagagataggatctccatattttaagtgcgaatatcaccgccgccatctccaagtcatgggttgggtaattgccctcgtgcttccgcaactgccgagaggcataggcaatcaccttttccctttgcatgagtacacaccccagcccggttattgaagcatctgtgtatactacatagggctcgtcggcttccggcagaaccagaaccggagcgctcgtaagcatattcttcaacttggcgaagctcttttcgcattccttggaccaagtgaattttgcttctttccgagtcaacttggtcatggcttgggctatcgtaaataactcgacttatacttgtttttcaccgtaacccgattgattcccctatagtcgatacatagacggaaactcccgtccttctttttgacgaataacaccggtgctccccacggcgaactgctcggttgtatgaaccctttctccaataggtcgtccagttgtttctttagctcggccatttctggcggagccatccgatatggagccttgaacggatccgaccggtctgggggtacccaagacaaggactggaacacgtccgcgaagtcttttgccaccggtatgtcctctaattccgaactcgttccaccatccgtggtagttattgtggccaagtaggcctcgcgtccgttccggagcattctctcggcttggactgcggacactactagctttcccgaggcgggtcggattccttggaattccaacttccctccttctcgttcgaaccgcacctttcctcggtgacagttcaacgttgctttatacttgcccaaccaatccatacccaagattacttcatgtttttcaagcggtatgatgatcaagtcaaccggcatttctatgcctttgatactcaccggtatcccacagacttgtccctcagggatcatagcctgtccgcccgccgcattcactacggtcgggtccattcttggttccttctggaacttcccttttccgatcatccgcgggctcacgaaactatgcgtagccccggagtcgaataggaccatggtctcaataccaccaatttgtagggtccctatacatcgccttcaatgctgagtaccctaccccaaacatgccatgcaatgtttatatttgactaggatggcttagtgacttaccggagatcgcattgaagttactggcctcgctagttttcttcgttagttcatacacacggggcaccacggcggctctcttggcctgtccggatggctcaccacctccgcggttgactttctcaccaactggcccttccgtctgtagttgcgggcactcccttatgtaatgccctgtcttaccacagcggtagcacagcttttggtcatcacgcgtccctctcgtctacctttgtcctgtctccgagcaatgctgggtgccgtgactcatacagccacacctctcacatgtcccctttgctttccagcattcgcccaagtgcctctttccccaatgagagcattcgtcccgacttcccgacgatttcttcatatcgtcgagttggtcgaacttccttttcttttcattcttcggattaccacccttcgggcggatcctttcctcctcatcgagattcgcctcgatcaatgccgccctttcaaccagttccgagaccgtgttgaaggtacggatcgagcaaagagtcctcaactcaacccgaaggcctctgaggaatcgacggacttgcaccgcttcgtcctcgagttctctccccacgtagcgcctgagtttgttgaactcctcctcgtactcacggacggtacgacgaccctggacaagatccaggaagttactctcaagtcggtcccatgcctcggacggaaagtacatcctgttgaactcgtcctcaaagtccttgaaggtctcgacacgctcacccttgcgtttatcaaccgcaagccaccagttatgcgcatcgccctccaagaggtggatcgctatgtccttcttgtagtcctccgggaaacttgacgtcacatcaactcacacaactcttaaggtaacttctctcctcctttattatttactgcgctttgttttgtagaagtagaaaaatcacgtttttgttttttttgctatctccttcgtttctctgttattccctctttctcgatctgccttcattgctcttttctttcatctctctcgtccttctccttcgaaacccaaagatgagcgacttcgaagattctcagaacaagagcaaccacagttacggcgatgattcgagttcatccgagacaaggtcggcggcgtcaccgccgcgagtacagagacacgccataaccctaggcggaatgggtccaattcatccgccgtcaaccagagctgacaagccaaagaagaaaaaggctgccaagcaaggggaggcacgccgatgacgaacgacgacctggtcgacctccggaggagatgccaggttccggcggaggtacatatgatcctcccaaggccaccgctgcatcctgagaacgtgccggtcgggtggtgctgcgcttatgccaatttcttcgagaaatgcggcctatttttcccaattccggcgtgaattctcgagatgctctactgtctcggcctcgccttttccgagatgtgtccgaacttcgtccgccatgtgttggcgttattcacccgggctcgggaagtaaacagagaattcagctgtcatgacctgcttcagctctgccaggtcaagaccaatgctaggagtgaccaaggcacgtactacatcagtgcacgtcccggatctctggtcctcggcggtttgaaagcctgtcgagacaccaattgccgatccaagtatttctttttcagagtagatcgtcattcaggtggcaattttgatcccgcgaggataataaggacctggtctaccaacctgggtcagatggagacctgagcgtcttgatttttttttgttgtttgggtcgaatccttgactgcttttgctaatcgttagtactgaaactaattgcttctttttgatgatttgcagcaaggaccaaggaagttactctgtcggagatgaaacttgagctgttaacccttctccgacgtggtcagactgattggtccactttcagcagaaatcccatcgtagctgctcttgccgtagctccagcagttcccgtagctccagcagttcccgcaatcgttcctccagcagcaccgctagatccgatcaaagaggtcccgcggattgaaccagttctcgaggctgatctgcctataggtacgagttccgttatattttctttggtttttaaaaatgtacgagttatcaagacagctgcgcaatttgaattgctaactaacaaatgtcgtgctctatttattcagttcctcctgattccagctccactttggaactcccgctcatcagaagaatgaggcgcccaagccttcgtattcaacgagccaacgccggggctcctgctcgtgctggtgatctgtcggccgcggtgaccgcggcttgaaacactctacctgtttccagcgcatctgcctcagcatctcatccctcgcttcctgaggtcaacgtcgggacctcagctacagcatgtcaaccggataacaatcaggtcgctcaggtatctggactatctgcagttcttcgttctgatggaacctgcggctgctactccggaggcagctgcgtctgcggataggtgatcctcgggcaggtcgcatggcggaggacgaggctccagaggtgggggccagtctttaaactggtctcaggaagtgaggcagacgtccaactccggtggaggatccgcgggaagcaggcctttccactggtcttacactcacgaccgtgatcacacgatcgttgaggaagaggctgggttagcgaacctgcttcgccacatcaaagggaggaactgccagattcctggagtgaagaacatggccgaggcggcggcctatgctgacatgatgacgaaggagggccaggtaattatcgataactgtctccttctaatttatatctttatgctagttgtgactttctgttttgctttcggtaggcgatagctgccacaaacaagctggatgctctctatgagcagcgtctgagctaggtcccctcggtgaatgagcttgaagaaggaaaggccctcatccgggagctgacgtcgagtgtgaaggctggtcaagatcgcgaagtctcgttccaggtatacctcggttttgacttgtttataaataattcgtcgatgatttgatgattctaacctgattgttatttcaggcggagatcgagaggctgaaaatggagctgtccacttcaaaagacctcgagaaaggttttgctgagaagatcgggttcatggagatggagatctgggggttacaagctgacaagcagacgtcgaggagcctaatccattgcttggagcagaagagggaagagctctccaaaaaggtggtggacctgacttcgattgcacaaggggcgaagagggcggttcacgatgctaaggttgagctggctgctgcgtattcgaagctactggctgggatcaaggagaagtgggtcgccaaaaaggagtacacggtactggaggggcaagcggctgaggtggaatcgaacctggctttgatcgaccagatcaccaaggctgctatcgatctgactgtggagaaacctcggctgcgagcagagctggatgacttagaggcgtagtgcaagtcaaaggaggtatcagactttactctaagcaagttggatctcccgcaggttttaaagatttcggtggtacgtccgatggacgtcgacgaacaagggacgccaattggcttggatgagttcgggagcaacaaagacgtgtttccgagaggtctcgcggatggttctggtgttgtcttcgctacgccagccggagaatcgagggagtgatcactttcgctccttgtttgttttaggatttcgtgttttgtttcagacttaatgcctgggaaggcttttatcctttcgtttattgccttttgaacttggtgcctggaaggcttttatcctttgttcgtttaagtactcgaatgcctgggaaggcttttatcttttttagctagtattttttgtctttcgttcgagtgttgacacttcgttggttttggtgcgagaccacctcgctttgtccatgttccggataataatcgaacttgtttcgcgtccaaattatttcggatgtgatatggtatgttcttcgaaggttaaaacttcgaatgagtttgagttgttttgtcttgggaaccgattgaagtgaggtcacacaagggacctgccagattttgggagctgggcttgtggtatcgccaggtcgcgaatgaaacctttgtttcttccttgtttactatgttatgtgttgatagcgaaagagttagatttggttgtagtaggtgagctccgatgaagccgaagtgatgtgttcttataagtttagttcactattgactttttggaagcgagatcacaaaatggatcctccaacgttcaggcgttgggctttgggtatcgtaagattacgaatgagtttaaatcatactgtaaatgattgtctttgcgaaatatgataataagtatcaaaattttcttttattcttatctccaaattgttaagtacaaaaggaggtaaagcaagcgacgatctggcgtttggtcattgagcagggacctgctcgataccgaagaaaggttaaactgtcaggtgagcagctgatcttcgttgatgggggatgcgatatctatttcccttattgaagtttcgcctttcagatggaagggttgaggtggtaattgcgtttgcggaggtgactgcctgcatacctggttaagggattaagcccttttgtgatttgattgaattggtggttctgctcttgggggagctgcctacgtatcctgccaagggatcaagctttatcgtagtttgattgtttttgagtacctattcgtggtatttcttgagatgcatggcattccaaggccgtaactcacgtactccgttgataacttttacgagcttatagacgccgcaacgtaccacctcggtgattcgatagggaccttcctagttagttcccagttttccagcgtttagctctctcgtgttgctgaacacttttcgcaaaacgagctctcccacttcgaatctccggattttgatattggagttatagtagcgggtgacagcttgttgataattttgaactcggatcattgcctgatctctgcgttcatcgatgaagtccatgttgtcgcgtaacatttgcgtgttcatgtccgagttagcatgactggcggtccttctcacgcttggtattatggttacgatagggattactgcttctaaaccataggcgagagagaacggtgtttcttgcgttgatttgcgaggtgtagttcggtaggcccagagaactccgtgaagtacgtcggaccacattgattttttggaatcaagtattttcttgatgttgctaagtatagctttgttggcggcttctgcctgtccgttaccttgtgggtaatggggggtggatgtggtaagacggatcttccatttgtcgcaaaatgctttgatttttctcgaggtgaggttagtcccgttatcggtgataatctcataaggtatgccatgttgacatacgatattttcccataggaagtcctcgacttgtttctcggttacctgttggaaggctttagcctcaatccatttggtagagtagtcggtgaggactagcaggttttttagtttcttcttcccaccggaggcttccatgggacctacgacgtccatggaccacttcataaataggtaaggagaagatatcgaggacatttcctcgggaggttgatgaagagtaggtgcatgagttatcacagaaaacctgatatactcagaagccctcagtgtaaatgatcagcgagctaaagacttgtgggtgctagattctggatgcacttctcacatgacttcaaggcgagattggttctgtagtttccaagagaaggacactacaaagattttacttggtgatgaccattctgttgagtcacagggacaaggctctatcagattagacactcatgggggaaccattacaatccttgagaatgtcaagtatgtaccaaatcttagaagaaacctaatctctacaggtaccttagacagacttgggtacaaacatgaaggtggagacggtcaagtgagatactacaagaacaacaagacagctctacgtggatctctctcaggtggtttatatgttttggatggtaatacagtgatcgctgaaagctgcattgctgaaaggtccaaggagttgacaacactctggcatagtcgtctgggacacatgggtggtaacaacatgaagatcctagcaggaaaaggattgatcaagcctagtgaagctacaagcttggagttctacgaacactgtgtcatgggaaaggcaaagaaagtcagtttcaatattggaaaacataattctgaagaaattctaagctatgttcacgcagatctctggggttcacagaatgtaactccatccatgtcaggtaacaaatacttcctctccattattgatgataaatccagaaaagtttggttgtattttctcaggtctaaggatgagacgtttgacaaattctgtgagtggaaggagcttgtagagaaccagacagacaagagagtcaaatgtctaagaacagacaatggattggaattctgtaacatcaagtttgattcatactgcaagaagtatggcattgagaggcacaaaacgtgtacttacactccacaacagaatggagtagcagaaaggatgaatagaactgtgatggaaaaggttcgatgtttgctaaatgaatcaggattagaagaagagttctgggcagaggtagcaactacagcggtgtacatcataaacagatcaccgtctgcagctattgaccacaatgttcctgaggagctttggcttaatcgaaaacctggatacaaacatctgagaaggttgagagcagtagcttatgttcatgtggatcaaggcaagttgaaaccgagagctattaaaggaattttcatcgggtatccatcgggtacaaaaggatacaaggtatggctcttggaagaacaaaaatgtgtcataagcaggaatgtaatattccaggaagaagtggtctacaaggacctgaatgacaaagaaacagttgttaagaaggaagatatcagaactcaaactgataatcatcttgtcatttccaagactaaagaagtttcagaccaaggtggagtaactcacatagaagagtgtgaggagtctgatgaaaatgatgaacaagagccggagacagtgaatgagactgatcccacagtggagagtgaaggttctttggccaactatcaactggctaaagatagagtaagaagacagatcaatccaccagctagatttacagaagaaagtggagttgcttttgcgttagtggtggttgaaagtctcagtctggaggaaccagaaagctatcaggaagccacacaagacaaagagtggttgaagtggaagaatgccacacatgaagaaatggattcactgattaagaatggcacttgggatctagttgataaaccgactaacagaaagataattggttgcagatggctattcaagttgaagagtggtatacctggggtagaaccagtaagattcaaagcccgccttgtggcaaagggctacactcaaagagaaggagtggattaccaagaaatatttgcgccagttgtgaagcacacatctatccgagtactcatgtcagttgtggttgatcaggatatggaactagaacaaatggatgttaagacagcgtttctccatggcgacttagaagaggagctgtacatggagcaaccagaagggttcataacagataaaacaaaagataaagtgtgcttactgaagaaatccttgtatggtttaaagcaatcaccaaggcagtggaacaagcgttttggcaggttcatgatggagcagaaattcattagaagtgctcatgatgcttgtgtatatgtgaaacaggttgaacaaggttttgtgtacctgttactgtacgttgatgacatgttaattgctgggaaaagcaaggctgaagtcaacatgatcaaagaacagctgagtgtagaatttgaaatgaaagatatgggacctgcaagcagaatactgggtaaagacattactcgagatcgaaagaaaggcattctgcgcttgtctcaggcaccttacatcagaaagattgttcagaggtttaatctggatgaagctagagtggtgcggactcctattggcgcccatttcaaacttccagctgttagagaggacgatgagtgcattgatacagaacaagttccctactcaagtgcagtaggcagcatcatgtacgccatgataggtactcgtcctgatttggcctatgccatttgtcttgttagtagatacatgagtaggcctggtagtttgcactgggatgcagtgaaatagatattgagatatttgaaagggtctcaggatttaagtttggtgttcaacaatgaaaaagaatttagagttgcaggttattgtgactcagatcatgctgctgatttggacaagagaaggtccattagtggttatgtgtttactgtaggaggaaatatagttagctggaaagcaaatctgcagcctgtagttgcagtgtcttctacagaagcagaatatatagcattagcagaagctgcaaaagaagctatatggataaaaggactgttaaaagacatgggatgtgagcaggagaaagcttgcatttggtgtgactcacagtcagctatatgcttgtccaagaactcgtgtatcacgagaggactaagcatatagacgtcaggttccatttcataagagaggtggtgcgtgcaggagtagttgatgtgttgaagattcacacctcaaggaatcctgcagatgcattaacaaaatgcattccaataaacaagtttgagtcagctttggatgctctgaagctgatcaagtgggaatgattaagttcagcccctgctggaggttatgaccaagtatagtgattcactggtatgaagaagaggaatgaggatcaaggtggagattgttaagaagtgatcctaattctggtttagttgcagaaacctgaagtcgacctggttaaaagactgaattggatttggattggtattggagccggttaagctctaatgttcggttattggaagaagactggtttgactctggtttataaggagaaacagaagactcttgatggcctagagggtttactaatgagacttctatatataaggtctctgtagtcgtcttccacaattattcagttagaaaaacagactctgtaatcttcttcttcctcttgaagctccattgttgtgagctgagagaaacacttctttgatagtgaattgttggtcagaatccagccgagacgtaggcttgctcacaccgagtaagctgaactcgtaaaactcgccgtgttgttctttgcttgtttctcatcttctttctttgttctttaatcaaatcgaagagcgtaagagagagagcttgagagatcgattggggtctttgatcggatcgatttcgaggttggttttagtacaattggcctcgatgcctctttcggttactaggtatatgaggaattctcctgagggaactccgaaagagcatttcttggggtttaacttcatttcgaatttgtttaggattttgaagcattctcttaattgcgggacgtggtcttttcacgagctgacttgaccagcatatcgtcgatatagacctccatcgttttacctagctggtcggcgaacattctattcaccaatctttggtaagtagctccagcgttttttaaaccaaagggcattactttataacagtaggtgcctcggtcagttataaaagctgttttttcttggtcatctgggcgcataagtatttggttgtacccgaagaatgcatccatgaaagacaatagttcgtgtcccgcagtggcagtgggaaactgtctttaggacatgccttatttaggtccgtaaagtcgatgcatactctccacttcccgtttttctttttaacgacgaccgggttggcgagccagtcagggtattttacttctcttatcgatccgatcttgagcaatcgatcgacctcatcgtgcacaactttagccctctcgggacctagcttgcgacgtttctgctttataggttggtaggtcggatcaacgttgagttcgtgtgaggttacctcgaggcttattcctcggaggttcgcacttgaccaggcaaagctgtctttgttttctttgagaaaggttatgagatcctctcgtatcgctgggtcgaggtcttgacctatcccaacgcatcgtttgggatctgattcgtctatgcagacctgtgttatcaatgactttcgaggtccgcattgagaaggatcagaggatctgactgttttcatttccgcgagtttgtcttctatcattagtactacggggtcagcctttttgataaggtcgtagctgcccatatagcattttcgggagctgcgttggctgccgtgcacgactgctattcccttgtccgaggggaatttaatgcattggtggtaggttgatgggacggctttcatggtgtgtagccatggtcttcccagtattgcgttgaaaggagctttcttgtcgactacgaggaaacttgtgagtcgcctcactcctcgtgcgacggtcgggagctggatggttcctagagaaaaggtcgtatctccagcgaacccggtaagtgacgttttcctgccctgcagctcagaatcgaggtgccccattcttttgaaggcgtcgtaaaagagtacgtcaactgagcttcccgtgtcgatcattatacgggagcgtcatcgtgaggtttatcgaggtcggtggtttcgctttcccagaatgtgatctggtggtcaggtcccatcatcgggctcttgccttttgtgtaaaaatctgccttcctctgatgagttttgatcgaattgattgagtcgttgcagagctgagaccctcccatgatgaaatcgatgcgtttaggggagaggtgctcggttgcgcttctgcagaatttcgagaggcgtaatggaaacctcatgtttttcttatgcggggcggtgggaggtgtggtgacgtaccttcctgtcccgccacctaaatcgagtgctgcaaagactaggtctatgcgttctctcatagcaggtgggggagaatcacttccatccggtgttcgttcccgtttcttttgcttgggagtttgctcctcctcctgttcgtcgggaggaggggtttcaactttggggtttgaaccttttttagtctttcccctagctgcgattaactttttaaaggcgcgacactcctcggtggaatgtccccttttcatgtgaaactacttcaatgatggaagccgctactttcgttagcaagggtggtgaaaactttaaagaaaacccaagtatgtatttggtaccatgagttcaaattcgatgctaagacatgataattgcaagttagattcaggttcaaattgatagggaatgatatcagataatgacagtgtgatcgagtagagcattcaagacatggtgcagttttacttcaatcattgactatgcatcaaacaactagcaacgatgaaccaaaatgcttacaaggctatctcatcataatcccctatgcatatgcgacaatcctatatgaaacatcgtagactcaatcctaaatgtgatgcaactatatgaacctaaatgtgatgcaactatacgaacactgcaactatacgaacactctgtttttcttcttcttcttcttcttcttcttcttcttcttcttcatctgaagtttgaacaatccatgcactagattttagaagctctttttttcggtcctccaattttttgagtaacttaatagattctttatttggacacaacgtcaattctatatgatcagcagcaacagatgcaatatctcaattctatatgatcagcagcaacagatgcaatatcacggaaagtacgacatagatgtctatatcgctttccaatcgattctttgactgtttcattacgtggctctgaatgataataagatatttttcgtgcttttgcctctttactccatcgatttagaatgtagttagatgggattcttctaacattcttcttgtccaacattttcaatgcatgaagacataaaatcccggcaaaactaaacttcatgcaactgcaacatatcgtctcgtttgcaacatcataattaaccaaatgctcttgtgctacaccacgataagatactttatgttcatataccatctcagacttactaaccttgttggcaacataatcaccaataactatgtattgtttttggaacaagctaaaaatttcgggtgtatacacttcctctgcatgttgcaacatctctacagtagcacataataccggcaaggtatgcatcatattgaaatcagcaactaattccttatatcgtcgatcctccaacactctctcgtagtgttcaaagaagcgcaacaagttataactatgcttcaagtattttttcaaaatattattcatactttcactacgttgtgtgctcaccatatatgctgtaaaagtatgacgtccatataccattgcccatttttctctcagctcaaacaaattcttcaaccatttatcctctgtcaagttatgcttctggagcatattactccatgccaataaccaatattcttcttcctcatggtcatatacacacttactaaaatccatgacaaattattctgctcaatgaaatacatgactcaatttctttgcagcattttggtaaatatgccaaacacataatctatgttttgtatcagggaatacctttactattgcattcgccattgctgcacattggtctgtaagaattgtttttggttgttttccagacattgctccaagaaaagtctcgaaaagccacttatatgactcactggtttcctcatataagagagcagcaccaaacacaactgtttgcttgtgatgattgaccacgacaaatggagcaaatggtctatcatattcattggtcttataagttgtgtcaaagcaaatgacatctccaaaaagattgtaatcacttattgaccgatcatctgcccagaatatattagtgatcatatcatcctcatcaagttgcattgaataaaaaaaagacgaattaccctccttttttctgaaagtattccaaaacagctccagcatctcccttttccatttttgccattctctttctcggtatatgtaattttgataatctttcttcaaaaaacccagattttcttgccccccaacttctctactcatcatttcaacagttgcttttgctgaaatccctgacatatcatctgcatgttgtttttgagagatagataattcccgattttctttcaacaaatgcttcataggtgtttcactaaatcagggttgtggttcggctcgaatgatacaacctaatattttccggtctactgaaggtagcaagtcatatgagcattacaaacatcgagtgattgcttgtgaatatgattttatgaccttgggttctttcctatacccttgttttgagcaaacataaagaagccttactaccttccctttttttttcatcctccgttgttttcttatattgaaaccacgatttcctccatactttgtataagttatatatgcaatctcatcagaactgaactctattccaatatatatattttatctttcttctcattatcattatttgcttcaaaagtagcaacctgttcagttacaacatcatcctcgtcgttagctatttcatcttcttcttcaaattcattggccgaagctttgttttcacttattgagtcatctttttcttcgactaaaaattcttcacttatatgattactgtccattgcaactgttcttaacgtttcctgatcaacaagttcaataacaaaaaaagaagttggtctaaaaaacataaaccataaaaaaaattaacataaaaactcacacatgtatcaattatatttagttgtctctattcattcacaaccagccttgagaaatatttctgtaatgaagataagagaatatgaaactttacttggagttgatgatttaaatcaaatcaaagccgacttgctctgacttagtttctgtatgattcgagacgtgattcaagaacagaacaacttaaagaacaacttatctttattatgatttaaaaactcacccaaaactaaatctctctaggtctttagaaaaactctctaaagcctcttaatctctttcttgtgtcttatggaacatctctccataagcccttatttatagatattagactactcataatcctataatgaataggaaaacttacaaacttatccaacttgacttttatttgtatttcttatttcttattatctcttctagaaagattacttgctcctcaagtaattggaattatccaacattaaaaacaaagtattgttcttttttcaaaaaatctatcgtgctttgaagttttagaacttttaaagataagttgagttaaaagaaataaaagagatagcatctactcctaatctatctttgattaaaataaatatttactcatatataaaaagagaagaaaacgttagattttgttttttttttataaattttgttgtctttttttttcaaaattgctaaatttaattacaaacaaaactaaaagaaaaagaaaaaaaatgaggagaagacggcgtcaacgttaatctatggaagtgaataacaagatttttgtttccttaattttattttaatttattatttagtttaaatatgatatgacatagcaaatttttattggatattacaaagagaggtgaataaaagggttcactcctatgagtgaactcaaattttattctattaaataattcgtagttttatgtagctaatagccaatacttaataaaaaatttaattcataactaaaatatagccacaaaattgttacatatagaatccgtggttaattaaaagccacgaaatatccacgttttatttttgtcactacttcgtggttaatgtgaaattagccacaaatgttcatagctagaacatagctataagaatttttttttaccattatttttaaggtgaccacgttcaccatgtttctaaattttaatattcacaattttattttttaaaatatttttaaggtagtttaatttttgctcaacgacaaatatatttatttaactcttatgtttaccaaaaaaagtttatttattttacaataattaaaacaaaacaaaatgaacacaacgtgggaattgtttttggcatgtggcaatttatcataatgtaaaacttatccgatattcctgtaaaacttatcttctatgtgcccacattctccacttttaacgaatcaaaatcgtaacttcctcaaaatctattttaaaaaatgttttttgatcgtgaatttacttctttgagacaagacaaggtcatctgtcaatatatttttcatgttcgtcaacatatattgtaagaattatgtttgtgtgattgtgtctatctctcaattcttcattattccacgctagagttaagaaatgcggttctatttcatgatattggcataaatcagtacctttgaccaaaactttctgagattcgagttactgtacgtggctactttttatttgcttcatctttcataatcatgttttattactaatttgtatgttgtcatctcaagatttttgacatttttggctttatttacttaaattctctctctataaaggctgcaatccacttccagaagcactgagtaagcaagccactccagcgtttaagaatataagccaaagttcaataattctggttgttacaagttagctctttctttgtttttaagtactttaggctcgattcatgttctaaacttctattatctttcttattttctatcaatagtttttttgttaaagaattttctatcaatagcttggattttaaaaaagggaattgaaacgtaataaaggaagccacataaagaagaaagaaaatcttaaaagtttaagacaagttagtggaggaagtaaaaggaaaataagaccatattagaaaaagaacaaaaacatagagaaaaaattctaaattattattttttgggttcaaaacctgcttaatatcttccacaatatattgtaaatttttggttttagttttcgtataaattttaccggtgtatagcaccgggtataaattgggtgagttacaaagttttatggctgagttacgaagacatacattcctgagattacaaaaagtgattttttgagaaaacgccaacaataattagattacatattcacatgcacacaccaataattaatattcaaaataattcaagtaaaacaaaattttcaaaataattaaaatttttatgttttgctgtagaataataacacgacacggctagtcacttagtggtttacccgagtgatgacagcgacatggcttagttatgactgagcccagaaaccttcaaatcctccaccgagaacttcgtatctagatttactttagagtcatatcttgttggccgtttcatccttctttgcgatccttcgttgtttccgcatctacctgcacaactctacaccctctttcgtcggtgttaaatacgtatttgtgtttctttacgcaaataccaaaaacaacaattatcggaacaagatcaacgatatctcgagaatgatgaaagaaattgaagaagaataaggatgacgatgagaaattggaagttccagtgatgtcaaaaactcacgtgaaaaactcaggtgaagaagacgagttgaaaaaaaagacatctcgtatttcttttgatgatgatgacatggaatgttgcatcagacgtcattttttttaattgatgaagtgacaagtacgccaacaaaggaacatgtaaatttgcctaaataaattagccatcaagcaacgctataactcagccacaacatatatactatcacaattattaaaaaataaaaaaaaggtcagttaattcagccatttaatgttgtaactcaaccgacaatctttaactcagccatatcgtttaataagtcggacgtaattgcatgctattatagtaattaatctttcgctactaagtcagctataacaaggccgagttatcagttaatcaagctctttactgctgatttataactgtcaaacataaatcagcggtaacaacatcccataactaacagacagccagaaattgttaactcagccgtgtcgaggaaataactcagctgtcgggtaaaaactcagccgtaactttggctgggttacgctcgagattcttataacttagacaaatttcattaactcagccgttacgtaggctgggttgtctcatcactcagacaattttcataaatctgtcgtaactataggctgagttatacttataagtcagccattttctcttaccttagctattttttcttaaactgcaatataccgtaactcagccgtaactgccactgtatcgctttacggctgagttcattaatacacgtcaacgatttctaacgtggcgacgcgggtttgcagacgtggcagtgaattctctgtcattacgttttttcttgtaacgtttaataggggcacgatgcgtatacaaaataggaccaaaatatgatagtagtaaaataatattttgtatggttctggtaaatacacctaatttctatgacatttgagtaaatctcccaactaatatagcccatatatcttaacataaatgctttttttttttgaattgaatgtaaaattttattgaaccaaaatcttttgtacaataaaattttagatagtgtgaaacgaaaaacagagtactcgcggttatgttgaccgagtggagaactagagccttaggccttcctcatagtgaaggttctttgaagttttgagtgagctgattctatgccgcactgttttgtcgatgagtttgattagccgagcttttggagatggatgctccccgtgacgtaccctcgccagatgtgatagagggtacattgaaagctgtaccgaagtagcaagaggatgagtgtagggatgcttgtactgtgtaacagtgcaatgagctggttccaatctgtcaaatagttgatcgtgataagacgttgtgctaagttcttccaaatggctgaggagtatgggcagttgaaaaatacatagtccctagtttcctccgtgttattgcgcaagaagcaatcgacctgcagccatgtgttccacttcttgattcggtttcctgtcgctaatctgttatggattccaagcaacaacaaaaaaaagaatatttacgggtcgagtaggaaaaccacactcctttgaaccatataacattagggtaagatactctcatgttattccaagtgtgcttagtggagaatttagccttgaatttatctccctcagctcgccacatagagatatcttgctcatttgcttggatccgttggcgagtactctgtatcacggcttctatcttgtttagaaattctactcggtgtctacggcgtcgttgagaggttagagccgtttccaccattgcgtctagtggtaggcccatatcaatggctatacgaggacctatttcatcaatcaacctgcccaaaggtgactggttatcataccagaacgatgttgaggagccacttttcatttccactttttgcatagcttttgcactttctctgtagttgagtatttttttccacatccatgaacctaagctagaactttctttaactggtcaaagtgacccttttcttattagatacttccacacccatgtaacccgcaaagattcttgtttggatgttatctgccatatcaacttcaaggaacttactttatttgcttcactcagtgacttaattcccagtcctccctcgctttgcggcttacaaatctctgtccaagctatctttgcttatctggaattgaggtcagaactagccgcacatagcttctcaatttcctttatgcaactgtttggtaattaataggcagaaatccagaagtttgtgatacttacaagaactaacttaatgagagtgagacgacctgcataggagagtgctcttgcagtccatgaccttatttttcaactaatcttttccaataggggtgcgtaatcagttgtcgtcattcgcttagttagcagaggcagtcctaagtatcgaactgggagttgtcctgtttcaaaaagaaaatttgaagtaatatgatctcctatctgatctaagatgccagcaaagtaaaccgttggtttctccaaatttttcttcagcccaaacttacttgcaaattcctgaaacttttgtataataccctcaaccaatcgcgcatggccatcaacaaacaccatgaggtcatcagcaaagcataactgtgttaaacaaatgctttttcactttggatggtaggcaatggttctatttaccgcagcctggttgattaagtgtgacataacattcatgtagctgacaaacaagtaaggggagagagcacatcattatcgtagtgtctagaactgttgaaaaacctatctaactcaccattcacttgtacagagaaagtggttgtggtgatatataatttgatcgaatgaataaatttactcaaaatatttagtgccgcaagagtgttcagcaagaaatcccattgcactgaatcaacatccttatatatgtttatcttcatagcacaacggagacaaaccgatactttatgataatctttgacgatttctgttgccaacggtacattttctgtcaacaacatttccttaacaaaagcttattggttttgcaaaataaatctcggctgtaaacactttagtctatttgcaaggatttttgaaatgaccttataaatcacattgcaacacgagatcagacgatagtctttcatctcagcagctacttctttcttcggtattaatggtaagattgtcgtcttcaatcctttcgggagaaaaccagtggtgaagaatgattgaactacagctacaaaatcattgccaacgatagatcaagtagcttgaaaaattttcttgtgtaaccgttaggtactggatctttgttgtttggcattgcaaacaaaacgtttggtatttcttcccctgatactgtctgtgtaagcattgcttggtctgtttctaggcagcaaaatggcatgagatttctcaaagcttctagtgtcatacctacaaaatcactcagttgagtattgagaaacgccttaaagaatctctcatcctcttcttcgattcattcactcgtctgcaaaattttgccatttagtcctcttagttgccgaatagaattttgcattttctgaatgtgtgcagctttgtggaagaatgggttgttctgatcacctacattcatccaatgaagcgtagatttctgctttatatagccttcctccaaatcagcgagatactaccaatttgtgtgagctatagattcttcttggatcgtttgtagcgttggatgcgctaatgtgttagcttgtttggcacatagattatcataagcctcacgagtcctctttagaaggtctcccagtttctccttacctagagatcgcaagcttggtttcagagtctttaacttcttcggaaatcgatgtagtgctgaagtagaagggaaaaggggatgtgtggttgtccattggtcttctactacagactgaaattcggcaatcttcattagtacattgacaaatttaaagggctttcggccccctcgtgctataggttcaaggtttatccaaccccgagcatggtctgagcagccacccgactcaaatacactataaaaatgtggaaaaacatcacaccatacttcattaaccaaaacacggtctaatttttttccaaataagaccctcctccctcttgttacaccacgtaaataagggaccatgatatccaagattagttatggaacaatgtcgtataatttcctggaaatctctcatccccgcataattgatttgtgtactgtcaaaatttgagtgctcacttccatcaaggatctcattgaaatctctccaaatcatccatggtttatttctaaacaatggtgaatcatgatgataacatatatcctcccaaagtgtttttctttcctctgcaaaattgatgcataaacgaaagtacagaaaaattcattttctcctccttccaacaaaacagaacaagtgatcatttgactgctctttctctccaaactaccgaaatgcggcctaaccggtgtgattcataatttttcatagattaccaaccctaaaaagttaatgacataataccagatgcctgaacttccttgaccctcgtctctaaaagacaatcaaactacaggggagcttgtatttagaccgcgaatattccaaaacaaactcgacgtctaatgtttttgttctgaccccttttactcgaaacactaggcatgcactacaagaaaacaagcatttgcgattccaaaaacagtcaccagatggtcgcaaacacctttgtaaaggctactttgggtctactttgggaaaaacggtcgcaaaatgtatcagaactaatatagtcgcctatttgtgacgatctcctgaccataaataaaagttgttaatacgcgactaatatgtgacaccgttataagttactaaattactcttttctgactaaaatgcaactagttttgtgcgtcggcggaaaaaagaaccgtggtcccaaagtactcgcaaatgactattggttttcttgcgactaattgtagactctttttgctgtcgcatttaagtcttgtatttgtaactatttaacctcgaatttagtcacactgttgtaattggtttggtcacaatttggtgacatcttttggctaatcataaacctaattaattaccaaatttgaaactctagtaatcactatccaaatcagtatccaatcacaaagattaaaaaggcatcatacgaaaataacttagcaatattgtaacgaccgcgtcccgcgttcataaagaggccaggttgttttaggagaaaactagaccatggtcaagaaacggactaaaatacttagtcggaaagttcaagctgaaccagctaggcgagctggacaagctaggatgaactagctagctaagctaggtgagctaaaccagctggaagactagctagctcagctaggtgagctgagcgacagctcgattgagctcagtgagctgatcgtgtactgacccagctgggtggtccggtcagctaacactcgagctggtggactgtggtagctcacgggtgaagaggtgtctcggccaaaaggtgtaaggtcgagcgggtaccaacgaacggttgcatcgcccaaaggatgcaaggaacagatgtgacctttcgaaaggatgcagaaaggatgcaaggaacggatgtgacctttcagaagggtgcaaggaacggatgtaatgcttcgggaagcatccattcgccccctatataagggaggacgcccaaggcatctcacaataatctcacatcatctcacaacatccaaaacaccataaatcattcttaaaggagtcccaacacatcctagagttgttggtcggaaagcgggtgcggctcggcgagtataactcgaccgaactgatgcgcatgctacctcccggtccaacggttcgatggagtgtagaggatggagagggtagacagttcgtcttaaagacgaatcggatctggtagaccgatcgttggaacggatcggccagagcgatcgtcagacggatcggattggccagacggatcggacagaccgatcgtcggacgggtcggatgggacaggccgatcgtctgacggaaccggtcggacagaccgatcgtcggatgggatggatcgagaaaagtgttcgaggaagcacaaggataagtgcatctgaacacacccaagggtcgcccatggatgcaatcttaccgataaagggagaaagcaccaagaatgggtaaggaacgtgattcaccatataggatcaacatcgcggtcgccttcatgtatctatctcctcagccatggtgaaaccgatcagagatcggtaagaccaaagggtgactcgacggataaccaacgggaaagtccacggtgggaaccgatggacaaaacggatgttggacccgcgagcaaacctaaggccgacggaagaaagatttcatgggctagcctacgatgatccagtggatgcggacccttgggtgtgataaggatatcgttcggaccgcatggatggatcattaagctgaaagctttatcgaccaccatggaccggacgggtaaacggttagtaaaccgtgggcggtcgtaatgttaaacgaccggaacggaaacatggatggttcgataagccgagggctcaatcgtccaccatgtagccggaggggcgtacgttttggagaacgaatggaccaataagccaagagcttgattcggccatcgtgaaccaagggaatcgtacgatccccgatctctattgttgtacttagaccagtggggttggttggttgtatggctaagtaacgatagggattggttcatcaattcacgaccgatgacgagtcgttgaacgaatggagtaaggcgataaacgggctaaggaatcaaatccgcatattggccaaagtatgtaacgatctagcttatttgttaagatagacgtttggtaattgaccgtgaaagtaggataaaggaatatgcgattgtttggcttagaatggttagcgaacatatgcatgtcttgaccgagtaaaggatcgatctaagtctaagggacaaagacgatgaaaccggtacaagagttggttagaattaaaccaaggttagaaagacttccgctgtgtaataagagagcgataatagaatttagcctcgtaaaggcaattctatgttgaatcgcgaaaaattaagaggttcggccgggaagaggcgtgaacttgagtacaacgtcgccggacgccgagacgtccgggacggggtctcacaaatatcatcctaaacagacaaaagattatcatcctacaatataagtttacaacataacaatatatgaaaagaagttcatgagtttaaggttgcgttagacaaaggggatgagattggtttggtcccttctggtatggtggctgcaagtatggtgcatgctggtgtggtgcctattggtatggtgttggtggctgctggtgtggtgcatgttggtatggtattggtggctacaggtatggtcgcaggtggtgtagaagaggccagaaaagctgctaattatggttatttatctttcatgtacaaaacaagcattgccaatcctgagatccgcatatgcgattgttgtgctcttcgtcccgtcttgtattctcagtgtcgtgctcagctatcttgcggcgtagttgttcttgaagttccacaactattgatgaaaaagacctcgcataacattctttccttttcccgttgccatgtgtacgcagaagtgatccaagccaaaatgattgcccttttgatctttttgaatacactaaaacaaagagaaacaaaagcaaagataatcaacatcaggaggcagactaacaacaaagtactaaaaacagataatgctatgatgcgatataaagtgaatgattcacaaacaaatataataatatgctaagcaaaataaatacattaagggtgtcatagacactatacctggagaaagatctcatttttatcatcaatgttgaggtcacgatgagttgacagttcagaggaattcattgaagtttttggaccatcatcgtctatttctgttagtttctcttcacatgccttcttataaacctcagctactttttcagcttttgcatcaacaaatgacccgtccgctcgagtatgtgttttcataaacacttccccaagtgatacatggcgcccatatagttcctcctataatgaaattgaaacacattaaaaacatgtaactaatatatgaaaatagtgtattgtttggatgaaaattagaggaatgttaccaattcttcgtgaacttgcacaaacgatttctgactggatatatttctgtggggaccaagaccgccacgatcggagtttctgaactgtgaagcactttcactcctcaccgttgcacgactagtgttccaatgaacccacatctgatcctaaagtttaccacgaatccaaagagattgtacaccactccgcttagcttgactaacaatgcccttcatccatttctgggatatcacttcgaacccctctctaacagcctcagtaagctcatgatcccaatagaacatcagctacatagtacaaattaaagagataagttagcacggatacttagtaaatgagtaacaataaaaatttgaaagataaattgaaaatattactgcaaaactccttaaatatctctctcggatgttaacatgagtaactttccaactgaagtatgaaccatcaaattttctcctaaatactctagcaatcgctgagatagtttacctttatgcatgttaaacctgtaaaaaaaacagagaactagtctctataaagagtcaaactatagcaatgcacaatcacaaatacaagaaaaatatgcatctctagcagtgctcaatcacaaatacaagaactatagtaactagagagtgctctaaactctacctcaatcacaatcacaaatcacagatcaatctctagcagtgctctaaacacatcaccaataagaagaaaaggagagagagagattgagaaagagaaaaattatcagagagtttcaacgcctgggataggaaccttggacaaaacatgtaccagttgtcggcctgaaagattaagcaaaccatctaacagctcttggtagtcttggtctggatttttttcttcatcatcttcttggattggtatgtcgttgtcgtcgtcatctgtttctttcgtcattttgaggagcaagaggcggttgttgaataaaaggagacgatggttgaggagcaggaagaggttgtgacctcgtcgggtagtgggatggaagacttctatgagattgggtctcatactgtgtctctgatggattagaggagtgagaagacactccgacaccactccttccccctctgctcccacctccgcgactattattcaaagtttgactcacacttggatttgatggaggctgaacaaagccaccgcttggatccagatgatcgggacttaagcctctgcttggattcagaggttttgccattttacacctaccagtggttggattcggaggattccgacgattcaccctctgactcctactacatattgccttcgtcggatccggaccagtgaagaccctcaacctgattgagatttgccacaacgaccccttgtagacttttggcgtcattagatcgaggagacattgagaagagatcgaggagagattgagaagagattgagaagagaaatcgatttgagaagagaagagagttgagagctttttagagtgaaaccctaaatcaagaaagagaagcgctgcgttatgaaaaattgattaagtgttttgtacatagtaattaacaaagaggaatccctcaatcggtcgcaaacgagtcacaacaaaaacaaaattggaggcaaattttacggcccaaaccaaagcccaaatccattaatatatatatatatagggtcaaaactcaccgcctaaaataaaagcccaaaattcaccactaaaaatcgcgagtatcaaatgagtccgaatatagtcgcaaattgttactctcttgtgactctaatgtttaagtcacaaattatttttttggattctaggcattacagatcaatactattgataccaatcactaaaaaataatcataattgtattgtagagtatccctattagtataagagtttaaaacatttatttgataactttgttttgaattttgttttaaaattcaatccttcttctaaaccaacatgtttaacttaagactggtttagaattaataatattattgtgttcaaacgatatgatttaaaacttttagaaacttataatgattgtgttttattcaatcaatgtacatatttatatatatatatatatacatatataacattctctaaggtgatttattgaattcaaaaaatcatgagtatcaaatgagtccgaatatagtcgcaaattgttactgtcttgtgactttaatgtttaagtaacagatttgtttttggatttttggcattactgatcaaaattattgataccaatcactaaaaaacaaacataagtgtattctagggtatccctagtagtataatagtttaaaacattgatttgatgactttgttttgcaatttacaaaacatccaatccttcttctaaaacaacatgttaaacttaagaatgatttagaattagtgatactattgtgttcaaacaatgtgatttaaagcttttagaaacttacaatgattgagttttattcaaaactaaacttagactttagtataaaattatattaagatgattaatgttgtgacttaatatttagttgcaattaagtgtttaattgtgactctggttgctaaaacgtctccaagtgagatcgttttgcgacttttgttttatagacggaaatgagtcgtattcaagtcgtgaaatagagactatattgtgactattttttggcatcctaaaattgcgacgtatttgcttcggtctttcatatagtcgctaactaatcttaaatgaatgacaaagtcgtcgctacgttctgtgaccaaatataacgtcgccttggcacgttgagcgtttgagtctggtatcactttatgcatagactttgaaattcttggaaaagaagggcgtgctgcttgattatccacaagctgcacactgtccaaattttcctccgttttcgcttttgatgtaatatctccttcttcggtttcattttttttattttcctcttcaatagccaatattaaaaagcgagatggagagataagagatccttgtttttcctaaggtgaacaaattcttgagcgtcctgattttgttggcgatactttttcccaagtttcagttggaactatagcatcgtcaatagctgcctgaacaataacctcttcataaacttcttgttgtagagcatgtgatacttaaaccagtggcaaagcagtgggtttcttctcactctgatcaaccttctctagattactttcacccttttcggcacttcagcattcagttgttcctttctccttatcatttacctcaacatttgcatcaataaccttctctagaatcttattgggagttgcttgtacttctttgagatgatcccattttgaacatatggtacatcttggcggaagctagaggtatttgtaagcaatcattgcatcaatagcatttgcagatttgaagcgatatttttttggcagttccttcgatagatcaacttctacagatactttagcttcttcaaaaattttacagagctcagtatcttggtgcagcttttttggttctcacactgggcttgcgagttagcttaaccccttccaggtatacatggtgtgcagaacatttcgaagcgttatccacataggcatcgatttaatctctggctgagcttcctctatcaccgaagaccatttagaaacaatcatatgcatatcagcattgttccacataccccgatgaagaaccatagctcttactaaactgtctttgattcaaaatttgattgttttagcatcaactaaataagcatctatcttcactgttttatctatgagagaccagatcttgttcacaattacgtggacctttgtaacatgcagagcaatttgtgggaatatgccaataagtaaatcttcccatagaggatttgaatcttcaaatatttcatctaaaacctggactgtcaaattaccatcctccatggttacactaaattcatgtttagaaagagttggacaattttgaatgactagaaattcatccgcggtacactgcggggctataattctttttaaaaaaatttaaagattatccatagatataacttattgtgtataaaaaaaaagagaaatttgcacacaaaaaaattatacttaagaaagtagcatcaaaacaaaaaaaagatgatattctttatattttgtgtattaatcacaattttgccctcttcctctttctttctttttccctctctctctcttccccctctctctctttctctctctctctcccttcctttctctctttctctctccctccctctctccctctctctctctttctctctctctccctttctctctctcttaatctctctcttttaatgtctcttacttctattttctatatgtactttctattctattctaacaaaaaaaaatattacaaataataaaattcataatacaattatcacctatattattacaccattacctctactaccaagtcaccattatccttatcagtggctcactgctataaccgtattgtcgtcactacaatcatattgccgtcactaaaacagttaacttgcttgcttgggttcccaatattgtatctcttagggtataattttttaatggggatcatatccctttaactcggtaatttaaatcgtctatgttttatcttttacgattatcgtaactaatattgcaacctaaactattatcccaccaccactaccaccactattactttatttaatttaaaatattttgttttatactaaaattaaaactgaattacaaatgatttatgaaaatagtatagtacaacattctatttttatacaacataaatagtataatatatatttacttacaaacattttttactattttataaatacaaatccgatttgaaaaatttaaactatgttgtatgtagaaaaaaacagaaatttttatctaataaatttcataattagaatctattttttggaaaagatatataacaaaaacatacaaataggtgaaaactaaatgaagtgttactaaatcatctctcattaactattccacatcaaaattgtcttttcccaacccttatatgttattttcttaatttatatgtatataatgctatattcttaattaagttatcaaatatggctagttttgcaattgacgcttaaaaaaaatcaaccaacatgaaacaatattcttgagaactttttgttgttgattatatagtgatgtctcatgtttgcgtcctttttttacacatttatttgttactaataaatcgatattaattttagtgggttgccaaatattgagtttttataatcattttaaataacatgcattaaaagcgataatgaaggaattttgttataattaatggaaacatcagaaaatcttagaatatctttccattactcgattatgtttttgatttttttcattaacctcttttcattgatatttttgttttacatattaaccaattaaaaacgggtcattgttataaagttgttaacgcaagaaattcaaaactgttgagattctcttgaaagtaataaaaaaaatggcaatattatctcatctttatttatctaaaaaatcacaagtagatttacaagaaaccgacaccttctccatttgacacctgtattaattcccaaaattttcatctatcaggtttttaaataaactaggatttaacccgtagtacaccacggggcaaatattttatttatatatatatatataataatattaaattttattgttcttaatttagtattaaagttatataattttatatttatattgtgactaaaaaaattggtgatgatagaataagaaaataaatatttaacatgtgttatatcaatctaaacccgtctcgctatatttcatatcaatccaaacccgtctcgctaaatttttcatctcatgatattttaatttttaataagtttaaatattaataatgttttataaagttaaaatatatcaataatatttaaaaataagaattttttttgactttaatgtgatgacattttttgtaaattcttactttataacacaaaagtactttaaaaaggtacttcaattttttaatatgtatataatgctattttttgatagttattatatataaatatttagtttaatcataatttgagattgatatacttgtgtttttgactaacttttttattattttaatagcctaaatttgggcattttgttaacattatttgagtcagcaatatcagcttaatacatgtccaatttatttttaccaaaaaaagaacaaaatttaataaaaataacaaaagaaaattttaggtagtgataattattttgtacaattgcaaatttaaaacgaaacatgtggatttggaaataattattgtttcaaaattttaaaatgttacgtaattaatttttcaaaagaaaatattgacgcatatattgtaatataaggtttgatttattttattaactgaaaataaatgatttaaaaggaaaaattttcgtgattattgctaattgatcccttaaaaggaatgttagtgtgtagtatattgtagtttagatttggaaagatttaattatttttgtgattttttcttttagtttcctaaattttagtaacataatcgattttatatttagatttaaaaataagtttgttaaaacattaaatgtcagtggcatgacattgtaaataagttccaacttgaggaattatttgctaaaatggctgcaaaaatgtatatgtagatgtattttaattttaatctttaaatagaaccaaaatgtattattacgagaaaagggttttcttcttttacacagaaactgcaatattcccacgatctcaaattcaacctccacttctcaacaatggaacaaaaagctttcatatttctggaaatcaattctattccgatcacttctcacttttcttccatgatttttgagatcaaaaaccagaaaaattttttattggatttttttttattacagatttcttcttcactgagatttcttaaatctctattgcttctctctttctccctatccctattgagcttcagtcctttgttttgaatcaaaggtaaattttccaactatttttgatttgatctcttggaataaatattgatctcttcacgataggttttaatgaatttttttgtttgtgctactacagatctcttcttcgccgtcctttgatttgaattgaaggtaagctttcaactatttagattagatgaatgatttaatcacgattgaattctaaaatcttatgaaccaaaaaccaaaaccattgctctaatgttctcaatttctcaatgatctgaacggtttgattcattatatcggtgtgtttcttaatttcttcctatatctaatgagcctctgtcctttaattaatcaaaggaaagcttttcaaatattttagattggaatcccttttcaatcatgatgaatctgcaagtcacttattaatcaaaaaccatcattctaatctttttccacctcatttcaattaaagtatcttatttctttttgtgtgttcgatttgcagattagtatctttatatcaactttaactgcaactcttttgaaaagtatatgcaacttacgattttgtatcttatttttttttgtgtatactctgctatggcccctgtcaaataaatagagtgcagatatgccactcgaaattaggatcacgacacaactctttttgtgtatacacgacacaacttttttgaaaagttaactttaacgttttaactacgagacaactcttttaacgtatatttctttttatgtgtttgatttgcggatatgccactcgaaattacacctatttctcaattaacttctggcactaatccatgtaatatcaatgtttgaattgtccgtctttggggttttccaaaaacggataaaccagaagaatttacaggaattgatcttctccttgtggatgaaaaggtatgctaaattaaatttatttccatgttgtcatcacaaacaatcacgtgctgttttgttctcaattgttatacaactctatgtgataactttaacgttttattttgaaacagggaactaggatccaagcttctgtaaaaggaaaattactctcagaattccagaaggacttaaaagaaggaaaatgttgtgttcttatgaactttgaattatgcccaaatcttggaaagtttcagagttgtgaccatccttacaagatcaattttatattctacacatgttaaaccaagcgaagagattcctaatctagaagcgtgtttcaacttatgtccttttcatgagatattagcaagaagaaatgatgatactatattcattggtacgttatctccaccacttatatttctcttatttctctataagttatttctcaatgtaattttccaaatttgtagacattattggtgagattgttgggatgaatgaagttaagagtctcactactgctgaaggtccaacaaagttgcttaatcttcagcttaaagatcttgggtaatttttaaattcatcctttattaatgtttgaaattttcagaagagactcgcttattgatgtttcttaaacaattctttttctttctcagggattcacttattgatgttgccttatggggtaaacttgcagaagatgtctactctaatattaaatctcaaccatcaggtcccgttttttcttcttggaagtttgatgaagactttgctatatcaaggtatatgtattcttaaacgtttcattgagaaacagggtgtattaagatgtataaaatattttacttttgaatttttcttttccaggtaaaggcacagttcaaagctcaaaatttacaacaaaagcttatatccattctccactaccagagattcttcggtttcaagaagcgtaagtaaatatacataatacatgtttcgtcttgttttattatcttatattctcagtttttaaacgcaaatatttttatattataggttgtgcaacgaagaaccaagattagctattactgaaataaaatcttcaaagtcggctcatatttccaaacagtcatttcacttatctgaaagaaaaacaatcattgaactcatggaaactaaccaagtaagaatttaatacataactatgaatccaccactatttttagctatcgactgaacatatttattcttaaaacctaggtgatgacttgcaatatacttgcatcaatttctctggagccaaaagcttcttggttttacatcggttgcacgctttgctttacaaaagcaaaacaatattttaaccctaaaactgaagaaatataattagataagtattcttgtgagaaatgcgataaacagataaccacgacacaacccaggtttttttcgatttttatattcatacacatgttaatctattttcataataaatttgggcattgatgaagcatatctattcttctaggtttaaattgtttgtcaaagcaacacataacacatgcagcgcttcgttgattttgttcgacgacgtggttattccactcataaaaaaatcagcatatgaattgcttgagcaacaagttctggtactttcattttctctttttctaattaccggtcttcattatcattgatttactttgtacgtaatataaggataggctttaatcctctctaataatatagtttaattgtttcggcgaaacacctcaagaactgcttgatctaggtggtcgtaattatgttttcaagatcatggttaaacatgaggcaaagcataaccaatcttctacatacaaaatgataagtcttactgatgttctcaatgttattcaaagtttctttgaaagtgcttctactttggtaagtatgcaaaacaagtgaaatttaaatatgatccattcatatattcaattcttattatttgcttttgtttgttgcttttagaatgatattgaacaagaaataatcactgtctctggaaattcagtggggacttcaatcgggaccacaactcaggttgtaaactcaatttatcactaattcacatccctttactattacttatttttatcttttcttgcaggctgaaattaactttgttgatgtggataacttagacaacaatgaagacaacgcttattacatttccacgccaaagcctataactaaaagatttttggcaacatctaaacatgttcaacaatcatcaacgaagccttaactaatgtccaaggctcagattaagaaggaaaaaaaaagattatacttaaagctatcgtctctcttattttactatgttaggagttaggatttaggattatcactttttcttaggacttaggatttcagatgttaggagttagtattatcacctttttcatcacatttaggtttatcacttttcaatttgcgtttttcttttttgtcttaaaccatgttaaatttcagatatttatttcattgtttagaatgtcactccatgatagtcatgatctaacaaacatactcttcaatgtttcgtgttaaaagctttggtgaaacataccaataattaatctatttagttgcagaagcagtccaagaatgtggtatcaaaaatacaaaagtgtgaaaagtagtgggcatcgatcaaacctacttatttctttcttaatttgtcgactgaaattatttgtctgggtctgaataaattatgattgaataactatatttccactattttaaaagctccaaagtggtttttttacgtttttcatattcatgtgtatacacatgttattctattttcatatatatataattatttgtcaatggttttcttatttgagaatcttcttactaagatctaaatctggaaacgcaaatataactaaactatttgtcaatggttttcttattatataacagtctaagacgtatcttcaatgaaccattttctcaaacaatatatgttccactctcaaacatatattatttttgatcatggctaacaagacaatataataagaaaactattttatatacatgttgataatatggtccatgatgtaagaaactctatgtcgtccgtataaagatacgtgttaaaatagaaatgaaaaaaaaaatacaaccactatacatctcagaccccacgatctcaatatctatttttcattgttccaatatctcaatatctcaataacttttacaatagactgttatcatcttctaccgacggatcatgccaagtgtttctccaccatttcctccttcataggttttaacttctgtcaaaattccatatttattgatcctctactcttgccatcatcctgaaattgatttgtattaaacaaaactctttatcatcgaaggcaagaaaaaatgcaatcatcaatagtaaagaaaagaagggtggagaggatggctattcgttccaagaagaaaaacaatcaaacagaaaatcagggtaatactaaataaaaaaaactattaatctatctcatttctgaaaaccaatggttgctttaacgttttttctatcttatagataaagaaaacgttcctcctagttctgaagctaactccatatcaccaatgcaaccaaagagagtttcacctaatagcttgagtgatattacaaatggtatccacaattactaagagtatatttaatgtcttggctaatattgtaatttcacagctatttatttaaaatgttttcggtagaatgtgaatctccaaggataaaacggatgtgtgttataaaggagactaaagagaaaagaaagaaaggagaatcatgtaagaatgttgttcaaaactagaatcatgtcaaaacttagtttacaacaagaatcatggaaatcataccttattttcagcttcagctccaagtactaacttggaccaaaagttggacgagacgacacagaacggcaagggcaagggcaacagatttccatgtactgcaacaagtagaaggaaaacaaacgtgcataaggaaccatatatgcaagaatcaagacaagataattacaaagaagctccatctaaaggtacatacttttcagcatcatctgatcctaactaataaatttttcagagtttaactataatgttatttgttcttttcagaccatgcatcatcgtcacgttcacataattcactatataacactgacgagtatgatgacaatggggatgcatctacaactgtgaacattgtggagctttaatgtggtataacgaacgcatagaagagtggcgcgtgaaatcttatccaaatttgcagatggagtgctttaaagctttagttgcaattctcgctatctacaatctcaattactattaagaagtgttttgttgtttagtcaatcaaacaagcttaaaatcttatgtaattattgtttttcttttaacagacagcttattacgatggcacgtattttattcaatatgtttttctaaaaaacatattatccatggtaagattttatcaacacatattttacataaccttataaaaagaaaccataccttccactcataattgcaacatagtcgtcttcttcatggtgaaagttgttaacctcggtttgaaaatcgatggtttgacttataagattcgttcctccctatcctgttatttagaaattaaaaaaaattgtaaattctctatatttacaaactgtaaactccctattagcaaatcattaagtagttgtttggtttaccaaggatattgtcaaaaaagaatttataataaaagtccaatatgattggaaataagagctacacaatactaagtccatcttttgagagcaacacatggtttcaaagcagtcgcttgccaatgtaataaacaatatcaatttgccatttgagcgatcaaaagggtattgactcgaaatagacaatagcctattgtctctacgaccaatgagttaattcatttggaacctaaattgaagaagcatataaaagctaatcacttggtaaaacccaaattttcaaaatttccttgaccattacccgacatttccatcatcagaaaaagacaaacatcttgaaaagaataaatttccgaaaacttaactctatttttgcgatcggagatggagacggaggagacggagatcggagacggagacaccgaaattgaagagacaggaatcatatgagaagattaacacgatttggtgaggatattaacgcaaattataggatgaacaatcagaaaaaagagaactcgaagacattattttttgtgaatgagctgaaaaaagagtcggctattattctgatatctctaagaaatttgttggctgtttctggtactttttaatttttctttttaataaactgatataatagcccaacaaaaattggaaattaaaataaaatagatccaaactgttaaaataaggccgtgcaacgcaccggccgaagacactagtttctcataagagaaaagttcactaaacgatcttggtaacaaaatttggaagataatgtaagaaaaatttgttagtggaaatttaatctaattagatctttaggaattgaaatatctggatttttctgatgtattttctcactattttaagaccagctgaaagtttttgttttcttctccatatgaaagatttgtctagtctacaaaaatgaaaaaaatgttataagaaaagaaaaaacattatggattataatgaggattaagatatacggatgttaatttagataggtgattataaaaacacagaatctcaaacataaaaattaaaattaaaatgaagaacaaagattatcttcccgtcctgccccacccacgacgtcttcccttctccgttgttcgctttcctacttgacagaattaaatagatatagattggtgaataaaccacaaaagactaaaactttacggatagaaaatcaagcaaacacgaacttgtggcatgctcatgatcgtgatgatgatgatcatggtcgtgtttgtgtcattgctagaggcgagcaaagtttggaatgaaataagaaaaatatttgtttgatgaatctagtagttgagtaaagtaaagattggtatttatagagaaggtagacgtcttggattatggtttagatgatatgagaatatcttggtaagcacgtagaaaatcaaagatactaataaggaaaatggttatcataatgaatgatagtaataactaagcaaaaattaggaaattgagagataacaaacttgatctctagaagattgatagtgattatgtttaagcaacgttagtttctagaatatgtcatagaatatataaagaaaatgccattaatttgtttcttatttcagttaattaaacgactcaatatggaggcaaatatccgaaattaaaggcaaatatccgattcaatatttttggggcaaatgaattaaattgacccgacccaactaatggcattctttgtaaatacttactctaggatttatttgctaaaataactgcaaaaatgtatttgtaaattgatacatacgatggtttttgcaacacgccaggtgaaggatcattgttagacggagtgttttctgccatcaccgtttgcgacataatgtgagaaaacggcggtggatctgtcgtagctgcatgattgagaaccacgatatcgaaaccctcgattgccttcagaatagcctcctgccacgtcagcatttttttctttttttaatcagccctgtattaagcacaacaaacctaacatgcatgcgttacttcataaatatggctgatttatgtagtcggatgcaatttttccacaaatcaacatatatatatatatattataaattttaatttacaagaaaaaatgtgttctaaatgatcctatctagctaataagcttaatgaatcacaatgttaaaatttcacgatcgtatagtagtagtaccttaataatgatttgctgttactaaactgtttgaaaatgttcgcccgagttccttctctgagaatattaattattatttcaagttaattatttcaagttttataaatgattattacaggatcatcaaaacttcaaaatcatgtttgggagtgatgggttcgaagcacgttgagagggatcttttctccaaaaaagatgattttaatctggtgtgggttccgcctttgggatatattgggcttttgggattaaacttcaagatattcaaaaagaaaaaaaaacttcaacatcatgataatgtatcaggtatatttatatatggtcattaattgataatggctgaaaattttatttgttgttgtagtttagctgctctaacctctaattaattaagtaattttatcttgagtcttctcttattattacgtttcgtaatccatgtactacttctcatatgccctactctatttttaaggggcatgaacaatgaaattaatttatttttatcggacaaataagaatcaaaatttggttgtcttttcaaaccgtcgtttttaaaaaaattggtaaaattgtacctctggattaaagactgttaactttgttaatagagatctaactgcggttaaaatttaacccatggtatttacgtgtatatatacaatcttgtttcacaattttacgaatcttagtcttagtcaggtggttttatgaagtttgagaacccaagattcgtaaaaccacctgactaagaccaagattcataaatttaacccatggtatttaccacaacattttatattaaaaaatcatccacttgtttatcatctcaaatttgtactatcaactaatatttttcatattattctctattgttgtacttatgttttgcttatctcttctatatttgttagatattttttttcttagttcatttgtcaaaaaaacagattctaataaattgctaccatattgtgactttcatatttagaagcagaacaattaaagaaataaatgtgttaggacattaaaatgagtagatatttgttaatgatttggtgtaaaaatatttattctaaaaatggagtttagaatagaattaaatgatattagtttcgttatctaaatggtcaatataagcaacataatttagggtaccaaaaactttagaaataaataaaaccaaactatgaattatgttagtttcacaatcctatcgaaagataaccatgtcagttattttatatatcccatgcaagaatcaaattctgacgaggggagcgcttgagttataagcacgtctctctcatctctcctcttttcttattctgattacataaaagatctaaatgaaatccaaaaaaagagacaagatgttgtaaaatataacgtataacaaataatattattatattttatatgtatatgagggcgagacgtaagagaaatggagaatgaagtaagatttttattatattatttttcacttcttctacatttcacaatgaaacaaagtagatatatatatatagttggggaaaatttggggagtaagtgtcttaatgagaaagtgacttggtgagcaagacttacaaggataagatgaggtcatatgagccaatctaaagatggataatcatccacgttttcttacactccctcttgagtatccatcacttttgatgagttacgtactacctcgttaaaaactttatcatggaaaaacctattagaataaaaaccatgacaagagaaaaagaggaaagtgacgctaacttctcctcaaaaagacttcacaggtctcgtagatgacgcattccaatactttaaacatactttttaatgtggaagttggaagtgcctttgtggataaatctgttgcattgtcacttgatcgaagatattgaacatcgacttctttgttcttctcgagttctagagtgtaggagaaaatttttggagggatatgtttcgttcgatcactcttgatataaccttatttgatttgaaaaacgcatgcatcattatcttcatacaatctatttgactctcttttgatgactaatccattttttttttaatatggttagtcatggatctaagccaaacacattctttatacacttaatgaagaacagtggtttgtgtgatttgatgaagtgacgactatagtctgcttttgagaacgcaacgagattgtagttccgatatccgattggtgatctagacttatgaggttccgatagatatcctgcatctgcaaaatcaactatatcaaactcggggtttctaggataatataatcctaaatcaagagtaccttgaagataatggaagatgtgttttgtctcattataatgcctttgtgtaggggatgaattgtaccttgcaagcaaattagtagcaaaagcaatatctgtctagtataatttgcaagatatataagtccaccgatagcactcatataaggtacttcgggaccaagaaattctttggtatcctcctcacaaggtctaaatggataatttcaacatttaaagatctattgatcattggtgtacttaaaggattcgttttatccatattaaagcgctttaaaatcttctttgtataatttgattgatgcacgaatataccatcttggaaatgctcaatttggagtccgagacaaaattttgtctttccatgatctttcatttcgacctcttctttcagatgagttcgtgcatcatcaatctcctttagaattccaattatatttaggtcatcaacataaacatcaatgatcacaaatcccgaaagggatttcttaatgaagatgcaaggacaaatttcattattcacatatcctttcttaagtaaaaatcgcttaaacgattatatattacatgcttccggattgtttcaattcgtaaagtgatcactataatttaaccacatatatatatctttagactttgatgagtctaatgcctcgagaacttttaatccttccaagattttcatatatatatcattatcaagagaccaatataaataaattgtcactacatccataggataaatatctaaattattagatcctgaatggctcattaagtactgatgaatcccctaatgattttggtaaaaatcattaagttaaggtggatacacatcttgtcatatgatcaaatggtttcgcgaaaaatcaataatcagacaacaagatgtgcgaactcgatattttacacgactctctttaccaattctgccccgaattacacttaaaacgactcaacagcttaacgttggcttgccacgcattacttgactgtaaaactctcactcttaccgaacttggccgtaacctgccaaccaaagcgagaacaaaacataacatcaaacgaatcgaccgattgttaggtaatcgtcacctccacaaagagcgactcgctgtataccgttggcatgctagctttatctgttcgggcaatacgatgcccattgtacttgttgactggtctgatattcgtgagcaaaaacgacttatggtattgcgagcttcagtcgcactacacggtcgttctgttactctttatgagaaagcgttcccgctttcagagcaatgttcaaagaaagctcatgaccaatttctagccgaccttgcgagcattctaccgagtaacaccacaccgctcattgtcagtgatgctggctttaaagtgccatggtataaatccgttgagaagctgggttggtactggttaagtcgagtaagaggaaaagtacaatatgcagacctaggagcggaaaactggaaacctatcagcaacttacatgatatgtcatctagtcactcaaagactttaggctataagaggctgactaaaagcaatccaatctcatgccaaattctattgtataaatctcgctctaaaggccgaaaaaatcagcgctcgacacggactcattgtcaccacccgtcacctaaaatctactcagcgtcggcaaaggagccatgggttctagcaactaacttacctgttgaaattcgaacacccaaacaacttgttaatatctattcgaagcgaatgcagattgaagaaaccttccgagacttgaaaagtcctgcctacggactaggcctacgccatagccgaacgagcagctcagagcgttttgatatcatgctgctaatcgccctgatgcttcaactaacatgttggcttgcgggcgttcatgctcagaaacaaggttgggacaagcacttccaggctaacacagtcagaaatcgaaacgtactctcaacagttcgcttaggcatggaagttttgcggcattctggctacacaataacaagggaagacttactcgtggctgcaaccctactagctcaaaatttattcacacatggttacgctttggggaaattatgaggggatctctcagcattaagtacctgaatgtaattgtatccatgatcggagaatatgtttcttcataatcaactccttatctttaagagaaactttgtgcaacaagtcgggctttatatcgtgttatctcatatttctcatttctttttcgcatgaatacccacttgtatccaactggttttacacttttagatgcagtgacaataggtccaaagacaattcttttattaagggagtgcaatttaacttgcatggcatttctccatttctctcaatcaaaccttttcttgcactcgaataatgtctttggatctggatcatcattctcatgatcgatctctttagataaagaaaaggagaatattctattttcatcattagtatcatctctatctcatatgataccatcatgggcatagttaatggaaatctaataattttctatcgttcctaggacttggttctttttgaagaaccttttcattttcttctcccattttcattttctttcgagaatttttatcttttgacccaataggcctccaacactttaattaaacctaaggttcattaactttgctcccatctaattctagctctctaggaatttcaactcttgatgttttgcagcggagatatatgactttgtcaccattcttgtatcagtgaacgaatctggtaattaatttttcatattatgtaaatgtataatcttttgtactttcagctcacgttgcttcgtgggggagaggggggggggatcaagatattttaaagatggtgcccccattctatatctttaatcatatgcatttgatgaattcttccccctaaacggtctaacaatgagttacaaccatttaattaaagacttggccatgtcattttgtgtatgaacatgagggacctgatgctctacattgattcccatcgatacacaatagtcattaaaggcttgtgaaataaattttctagtattatcaaacgttaatttctttatggcataatcaggaaattgtgccttgaactgattatttgggcaatgaatcttacaaaagccgtgtttcatgttgtcaaaagacatacatgtgactatctagtagatgcgtcaattaataccataaaatatcgaaacggtctgtatagtgggtggattagcctacatatatagccatgaattctcaacaagaattgaggcctttctttcccaattttggttgacgatggccttagtatgagttttccttgagaacgtactttacaggaacactcaccagatttaaatattttttgatttttcaaatggattgccattagaattttgcacaaattttgcatcataactgaaccaggatgtccatgtcttttatgtcatgttttaaatgtactagtaaactcactcaagtttattgtaacatttgatgcgattatatttattttggtgcaatataatctggaggataacattggtaatttttctaatatatattgtctctcagattttatgcaaggatattcaatgccatctttattcatagtctctatatgatatccattacttcggatacctttgaaacttatcaagttttttttagacttaggcgaatataatgcatcatttactttaaaatgagattaccttgacattgtaaaattagctttgccaaaaccaataataatatttgcatggccatatatagtactcacacttctagctaagcattttattttgagagagaagaagtactttttatttttaaagattgttgatgcgtgttttttttgctttacgcttttacctgaaagaccacacgactactgcaagtgcacaacaaatctgttgtagtatttaacgatcaaatccataggaagtgtagctacaaggtaggactcaagttagttaaccatgccaagacaaccgaaagagaagggttttgtgtatataatgaaactaagtaaagagtgcaataaaaggaaacaatagaaaggcaataaaagtaaacgacaatgaaaagagcgggtgtaaagcaagatggtgaaggcgttaggttttcggggttttctccgcgcaacatggttcaaataaagatttagattccaattcaagtgataacatggttagctttgtttacttccaagttcttagacatacgaagctcattcaagttcagctagacctaggttataggtggaagccggctaatctccctatactccgctactcagttaaccctaggctctaagtgctaacatggcaacgacgcatagatcaaagcattaagttcaagtttgattctagtccatagtgccctataactcagcaatcacatggttctaacacaatattcatttgtgagttaggttcaagcaattatacgagattctgccaagtataaaatatctaagatcatgtactaggtaacgtgctggacatacatgcattaagatcaaactcaactagaaagaaaagtgtaaaggatcaaacaaaaccatagaaaccgccaacctaaattgtatctaaggtccccatgaatacccttcgaaatccccttaaacctaactagatatctactcaaagaacacaacatcatatgaataagaaattgcataaaaagagtatgggtataggaaagggtttagagatcttctctgggaatccaaagttgatgagtcttcttccttttacaagtagagaatagagaagagaagagaaaaaaagagaaaacaatgaagaaccagaggagcgacggctcgaaagcaagggaggtagcctaatttcatgggttgtgattagggtttcccctaatcttagtatttatcggccttcattaggttaaagggtagaagcgtctttctattgattagtaagtgatgggccaaaaacctgggcttcgtaggaggacttgaattcagtggcaagaggaagggaaggagtggttgtgcgccttagtggtcagtggaaaaatcgaggggacgcccgggttcaagtctccaaggccggtggttttagattgatcatttccaaacagcgattctaggacatgtcttcactcttcgggccataacgtctaaacggcttcttggattgctttgattcgacttcgacgttaatcttgactcctctaggtttccaatgacacccagataccctgatttcgtgatcaggaagatcttcgccggatgccaaacatctaaagcacataaactgtactaaagcggaatttgatcaacttctacttttttgctcgaaaactcatcattcttccttgatgcttaaatacttgaaatatgccttgaagtgtctatttaatcttgatttctccatggaaaaactaataaaacatatgttatcaattaattgtgtgcgtagaagcattgtgcgccagacatatatcttcatcctcaatctcgtattttgatattttctggataaaatatgtattcattaaattttgacataggctatccatatgtcataatatattacaataaaagtgttatcccataattaaagcatgtataattcttgtcatacatatggctataatacattacactgatttctcggtgtcatgatcaatcaagaaaatctaccatatcaagataattatcatcatcttgacctttaaaggaagatcccagctcatcacagatgagattaatttcaacatccctttcttcgctttttgtgaagcatgatacatatcgactaaatactttggtatacgacacgtcctttcatgccgcatctgtggcaagtgcttttcaacatgccttttattaacattaccaacatcattcacttgaaggtttttgttcgatttttccgtgttgaaatcactgggatggaaacttcttccttttcctcagtcatgaccattcccacgaccaagaccacagccaggccaaggtccgggtcctcaccaattatcatcatcgaatgtagcaacattcacttctaaaagtggagttaatccaagtgggcgagataaatgattcatcatgacgagctcattattttgctcagcaacgcaaaggacttgcatcaactcagaataacgagtgtatcttttgggccggtattgatgttgaagggattgcatttacagaatgaaaggtggagagcgtttttttaacaatattataatcactcacttttcaccacataatatcatcctggaggtgatttcgaacatggcggaattataatcaccaacacttttgcaatccaagaaccggagatttagccattcatgtctgccttttggcaaaatcacatatgttatgatcgaaacaatctttaagtgattgccatagatccacatgatattctcttatgatgtattcattttttaaattgtcatcgagatgattgcgtacgaatatcatggctttagctttggtctcatcttatgtcgttttagatgcatctgtggtgctcagaaacctatttgatcttagatgcatcttaacatcatatgcccatgtcatataatttttgccagatatatttagggcaacgacatcgaatttagccagatttgacatgattatctatataaaaataatcattcaattattaagctatttatggtattttaaagaagtaaagtctatcatttgattaaggaggagacatagtctcatactccaaaaataacatgtatgttattttatataaataaattaaaatcaatataacataatttaaatgttacttcaaaaaatatttgaacaaataaatgatcgatctgttataccatcactcaaagtgttgtaaaatagaacgcataaacaaaatatattattatatttgatatatatatatatgaagggaagacgtaagagaaatggagagtgaagtaagattcttcactttttctacattttataataaaacaacatagatatatttaggagagaaaaacttggaggataagtgcctcaaagaaaaaataagggaaatttgactctataaccaaattttttttataaattaagaaactaacacatcaaaaaaaggaagaagatattatctatattttgtgtaataaagacaggtttggccttggtgtgaagtacacgtttttcttcctcatattgcttaagtcatcttcttctcttggtaactataaaaatatgaattggagtttttgtccagaaaagttgatgtcacgaaatcttaagcttttgatttttttggggggcaggccgtgtaaagtctcgaggagagatagtcgagtaaattgctgacacgtcgtgtaggactcactctgattccgctggggttttaatttacagagacatgatcatatttttttactccgattttgttggggttttaatttacagagacatgatcatatttttttactccggttttgttggggtttttgtttggtgtttttattgggttccttatttaacaactacagatgttacttcttctccaatttggatttggatagatgaagtgtggcgacgaaatgccaatccataaatgttggagtgagatatcagaactatattgggaaccaataaatcgattttgattttgagaaatttttgagagatactattttattttgtgaatatactatttacgtataccttgtactatatacgttttaaaataaattgtttgttttgattaaggatgttaagtgatttgattagtgttttatattaaaagccttgggttccctatatattatcttagggtttagtatccttccatcaaaaagtatttaattgattatttggattcatgggaacaaacgtttctatttgaacaaatatatactattctatctttctacgacgatgtgtatagaacttgataccactattcattttttaagaaattcgtttccgatttttaaaattcaaaaatctgctttttcaatagtattattaactttaaccaaataatctgtttaaactaatgtagtaaacaagattaagaggatgaatatattttaatcatatataattctctttcctcttgtctgagacttctctttctctacaaacgtatatgtggaaaggagtttaatgtattttcccaactgacatgtgctatcaaatgaattacgcacattatagtgctatatatttaataacttttttcaaaaccgtcatttttgcaattcacccaaaaaataacttcgcttttttttttttagtgtattacctcgaaagagaatctttggaaaaaaattcaaaggccgtggttcaagcccaaacccaagcccaaatcgaagagaaagtttagaaacagttttcaaccagcaagtaatagacgtgcctcagttaaaatatcactatttgcatcagtgccccaagcgccgattaacttaactttaccaagttcattataatatcttcctatgatctgtctttgctaactttacataattacatcccagtttctttcgtattgggcccaacagctcgtgcattgttttttgttttagttggttcaccatcaacatagtcttcatagaataatattgaatagtttaataggcgcacgtagggggtcatagaacagtgttgacagctaatttgatttgttagtattcagttcccaatagtggattcagcattcaggattagaatcatataatattgaaagttgagaacagcaaagctgtgatgggtcttttgcttcggtgacaagtcatacgtagactccttacaagacctaagacttattatccaaacagtaagtggtctttgtttgttggacacttgttgttgtcctttctaagctcgttaagttcttctcttccattatctcaaaatgtccattagtcccaatcgtgtgtattatggactatggaggaaactacgataaagtgaaaaaatcacgagtaacgtacttttcacgtgccaagcacatgcattttggtcgggtgagttgtgtacatctcccaatttttattattattagttatcttcattatgtaatcgtatttgttttgtttcactaactttcttcactttgtttttttcctactttattgatctgtcatttgattcactttgtttctcatgtgggtctctctttaccaaacatggatgagaaatctaaatttaattaataagatgaaagaacatttttttgttttgttatggtactaaaacattaatctcctcctatatataatcgttgtatattattacatggatggtggtacaagggacttggtccttctattttttttttgtgtcactaaaactaaaactgaaatttgattgataaatttggtgtggaaccaagaaattacatagagcccaaataagagaagcaaaaaccgacggaagaagttaaagttttcggaaacaaagccggacgaaaacgaagatatccctgaaaacacagccctatataagagaaacaaaaaaaacactaaaaacacaaagcagcaaaaattgaaccctagatgtaagagaacaaatccaaatacatatacaaaagcaacaaaggtaaaaaccaaaaaaatgataggcacaagcggcagagaagacttggtccttcaatcttctgaatttttattttttttagtaaaaattatttttaaaattagaatataaagttgaacatttgacaaaagaaagttatgggtcaaatatctgaaacattcacggtttatcgggaaaaaaatcggtgtagttcattgttgcaaatcattggttcggtgtaagattcttttttgttgagtacgtcagattagtggtgttttattttaaataatttgtaaagtagtcgagagtccttttaattactaggcaacagagatcccgcgagcattatagtttgcttataagttataagtgatgaccacatgcttccttttattttctgttggaaattatattattatactacaatatgaacgtctcttaaacactgatcatgaggacgacaaattagaaaaagcactgatgacatgttagatttaacatattcggattaacgtaaggaacaaaatctcataattatgcttcttttttcaacttcataattatgcattttgaaacaaattatgaagtggtgttccaaaaggattagacaagttctattttagacatatcgttaaatttctgtaaataaaaagatgacatagttaatttttggtagcgtttaaaaaataaataaactgtataaatatatatataagatatcattaaagagaaaatccaaaaaaaacgtaagaaagcttataagatattttttaaatatatataatgtatcgttttaaatccaaacgctacaaaaaaaataaatccgtcagttaacaaaaatttaacggtatatacctaaaacaattcagtcaacaaaatttaaccattttattataaagtcaaactaaactttgagacttaaataacatttcaaaagttaatgatttcttcatttcaaatttgaaagttctcaattttctcaacatttttccctttttattttatatataataagcttgtatttaactaagtcgtttttcctgttatggtcagtcaaaatcttttctagaaaatggctgagactatctgtatacatgaggtctgacaactctgaatcttagattttggaagaaaaaaaaaaacgtaaaagtttgagaaaattacgcaattacatatgaaaatctgtaaattgtaaagtacaaatctatccacactcaacagtgatgttcgttgttaaggtactcttcacgaaatgataaatccaacaaaccatgaaattgttagttttatgacttttaataagcgttgaatttataagcttgagaaacactaaattgaactaaagataaagctaccatctcagttgtaattttttatagtaaatttcaaaatatgtcatttgttatatagaaaataatttatagatcaccattaaacatgatatttattattataaaatgtcactaagtggctatgagaaataattattttggagagatccgaataatgcaacagtgattataaaatgaaaaagtagactgaagtgtataggaagaaggggacaaagacagtagacattagtacataattcattaactttttaccatcaaatttgtacctttcttgggaaaagatagaatagaactacatgtcttggagccattatggttaggccttctttctacaattaaaattaactaaatcttaatgatactataaccatttaatatgttttttgcaggctcaataaatgtaggcatcaaaatgaataaatgatgggtttctattcacgcgagtggttaagtgagactcaaaagaaccaattacaactagggcacaactagccttcattatttatttttttgaacattcgtacttcatgctcatgctcctttttagtaatgactggtctcattataagaaaaaaaaatcttacatgtagcgtggtctttttttttggtcatctcatgttacataaggttgtttaagaaaaaaattcatgtcgtctagttaaatatatgctttaaatagagacgtgcggatcaacttcgtatcaagtacggtgcggttctaatagtaacagaaaaaaaaaaaatatatatatatatatatatatatataatattttgttattattggaaccgcaccgtatttgcaccatatttgatccgcagttggggatcgaacccaacttccttcacattatatgggcaactccaccaaattagctaatagatattttaaacaactagatgataaagtaaaaattataggatgtgtatggggcacatgccatactttcttccaacgtaaatccgtcaccgcatagcggtgaagttaccatttaaaaccatagtaaaaataaaacttactagtagtgtattcctctaaattactgttattattgactgcatacttcaaaatccgatttcaaatcggcataatatattttatggataaaaaaccacaaaaaatgtttttatttgttgaattttcaaaattagaatttattattttgatcttaggactagttggctcgtagattttttctacgatactgatttttgttgtgtttttcggatctaactgtatgaaaataataatagtatgtcttaatatatatctatgtccacatgctaacaccaaattttaataacttcgttggtcagatttataatttaaaatcttttataatgaaaaaaactgtagaagtgtattggtgtgattaataacagtgtcaatgtgaactggctgatgtaatgttaaattagcggtccatttaagcattgtcccatttcctcgtgcaaagtttgaagctgatgcttacatttggtggtacacttttgtcagcaatggttacatggtaaattgtacactgcgtacttatatgttataataataaatacaaaactaatataattactattctttttaatcaactataatatctaaatgaaatagatcggttataatatactaaaccttttaacacagcatataagaaatttgttaatgcaactttgagtagaatgatatttgagtaagaatatgtgtttgacgtgaatattttcttataactttcaaaaatggcaatattctcaattatttcatttcctacctacaagccaataggaaatctcaattattaaaaaagcagatattcctgaagagataatattttatataaaaaaaaatagagaagccatataatttaccagattgggaagaagccaatattctggaaagaaatctgaaagtgattgtgagtgtgaaacccaaaaataatgacatgtctgctctaatgataaagccactttgaccaaagcctctctatatctccttattttaagtaaccatcaaagttttctaactctccaactaccacaaacccaaactctcctatttctctttctctccctcacacaaataagaaactaagtccttttgtgaaatcaagaagtttcatctctcttgtgtcttaagagtaatcaagaagaagatcaagatgatggagacgagacaaaacagtgttcagttccaaagaccaactttcttaccaatgttatgttcaagaccttccatcaagaacgtgaccctcccggctaaatcacatcaagatgactcataccaacaagccgatcctttatctcccaaaatcagctgcattggtcaagtcaaacgtagcaacaagatcaccggcttccccaccaccaccaccacctccacctccatcacccccgtcgctcagcaccgttacttcaagcttaaacgtcttttctccggcaagaatctctctttctccgctcccactaccaccactaccaggactagtcgtggaagaataagaaaggaggagtttggtaacaaaaagattgatgttatcgacgttgctgaattggacccacctttgccggtggttaaaaagacacacgacggtggcgccggagataaagcggcggagaatctttggaagaggagatctggtggttgtcaactacggagtttgcagattcaaaccaatggagttcatcagctgaaagttacaactgtttgagtttggatcaatcaaagcaaaaaaagctttaattagcaaaaaaaggcttcttatttgttgttataaatttagttattaatatagtttgtacaaatagaaaattcatactttatgctcttctctcttcttcttctctcttcttcttcgttaaatcataatttttggttgtctttcaatattaccaatcatatattttagagatatttatctagaatgcctaaaaaacttaaaaacttacaagattaggtactttcatgatgacttacaaattcaggtactttttcttatatgaaatgacgcttgtacccttgcttcatcaactcattcattcgacattgaaacatcttatcatatggtcaatacaaatttcatgtttgctctgttattgttggcacctccctgtcgtcagattcagtttctccttcctctcttcaaactcaattcatggttaatacaccaactttcaaaattgcagaaaaaaagaagaagagattttaagcttctcaattggaaactgataagccattagaaagttagcgaaaaggatttcaagcatttgttttgggtttgggtttgtgtaaattagcatatattatatcattttttcgattagatagacaagtttggtttatctacttcacaatttgacagaaaaaaagagaggaagaagatgaatactctcaattcgtttgattttctccttgggttccctatgtgcactatcctttagggtttagttttgtgaacgtagtcgaaacaaaagaatccggtggcgaatataacagaaacaaatctgaaaaatttggcggaggaaacgtggtggtggtcggaaaaagagaacaaagaagaagatacagttgataggggtaaaatagtctttctcgctagcctaaagtactctttttcaaagcccaacccaaaagatctcaaaatcaaagattttaataaaaaatgacctgttttgacaataagccctatattttatcgtcctttttcatatatgatttgttcaagacgttattgcatgattttcaccaaatttgatgtttgttttttgttaaaggtagatttaatcatcatatttgtgtcaaaggaaaatgaagaatgaaaaaaaataaaaaatggatttgagacagtctgaattgattatatcacactttgtaatccgtagttaataaaagcaatcaagaattacttcgtaatgttcagaattctgcattattgcacagctcaacctaaaccgacccgacacatgcatttttttataaaatttttagtaagacattctaaatccaattaaagaaaatcacatttactgtagctacctatggtttggctgaactaaacgtgaacagctgtggtataagtgcatgagtatgtcaaaacggactattacggttttaaatgttatccagcaatttatccagctaggatagtaactaaaaatgggtatatttatcttttcgacaataaaaaggcgactttttcggcattaagtcaccaaaccctaatttgtcgccgtcggctggcctcacaatgacaaacgaaaaagccacaatggctaagaagaagaaaaagctcctttcctttgctcttcctccttgtccgtctaagttcctctgctgctccaccatgttctagcccttgttcggtcgtcgttccttccgtggtcagtcttgctcgttcagtccatttctttgcttcagttgagatggtggaaataatttcctcttctcctggacacttagtcgattcagatagcagcagataagagaaaaattcactcatttccaccgttttggttgaggctaagggttccttcccatagtccccaagataggagtcttgtcctcgttacattcctcctcaaggatttcgatcccctcttctatcgaaatattgcttttggtagatagctccccagggttgaagctaaccttaagcagatttcctcaaagagtttatcaattgaccccattaatattgctctgaaacagttaactgtagagttttctcaggatgtttgatcgaaaagataagtgaacttatatgatataggtggccaaatcaattctttcaaatctatctacatgcattattatattcctaaaaccggaatgttacacatacaaatctccaaatctccatgcttgtaaattagcggttgtagctagtggtgattccacgacgc

SEQ ID NO: 1178 - DNA, 103931 bp, Arabidopsis thaliana
aagcttgggagaggtttaaaagctacaccactcagtgcccccatcacggtttcaagaaagcttcattattgagtacactctatagaggagctttaccaaagatcagaatgctactcgacaccgcctccaatggaaacttcctgaacaaggatgtagcagaaggatggaagttggtcgaaaatctagcacaatctgatgggtgctacaatgaatactatgatcgcttagtgagaggaactggaggtagtgaggataaaaagagcaaagatatcaaggctctgaatgaaaagctagacaagttgttgctggctcagcagaagcagatacactacatcactgatgaagagcacttccaaatgcaagaaggggggaatgatcaaactgtagagttgtgctacattcagaacaaaggaggtttcaacaaggggaacaacaactacgatcccaacccaaacctctcataaagaagcactaatgtagctaacccccaagatcaagtgtatccacctcaacagaatcagtccaagccttttgttcagtacaaccaaggttatgtccctaaacaacagtttaatggaggctaccaacagcagaatccaccaccagggttcactcaacaaccagaaccagccccaacagctcaggatcctgaaattaagcaactcattcaatagatcatccaaggacaagctactggagccatggcttttgacatgaagatagctgaattacataacaagatcggttgttcttacaacgatctgaatgtcaagtttgaagctttgaattcaaaaatcaagtatgtggagagtcaatttgcatcaacctctgctctggagcatcctcaacaacttccagggaaagcagtccaaaatcctaaggactatgctactggtaatgctatcaccatccaccaagaagatgagtctccaccaagtcgtcagactccccatactgaggaaaatatgattcaagaaggggggggggattcaactcaaattgctgcacctgccacccagcaattcatctggactataaagcacacacctttgctgaatactcaccatcctggaaaaaagttcaaaattgaaaaactcaagaaggatcagaatcaagagatgatcagcagtgcctctacccaagaaacatacaagaagaaaatcatccaagaaaagcttgatgatcccggttcattcactctgccatgctctctaggaccattgacattcaataggtgcctttgtgatttgggagcatctgttagtcttatgcctctctctacagctaaaaggctagggattatggaatacaagttctgcaacttagctttactcttagctgacggttctgtagcacatcctcatggtttaatagaaaatctgcctgtcaagattgaaaatgttgagatacctacagattttgtggtattggacgtagatgaaaaaggcaaggatcccctgatcctaggcagaccattcttagcttcagctggagcagtcatagatgtcaggaacggaaaaattaatctgaaccttgaaggcatcaagatgaagtttgacatcagagaatcttcatggaaatcaacaacaggagttcagaattttggggttcagaacatggatgttgatgaagaaacagaagctggaaccccaccaagagttaactatacttctcaagttagcaagctgaagagaacttttgaccacatgaagagaacaacagaaaggctagctcagactgaagatcctacagaagatgactggtatgagatgagaaaaataaataaatggcaaagtagagtcatagaaggattgtcttcaagggtgatgaagctgaaagatcaactttggatgtttgaaaaaagagttaaaaatttttcaaatggtattgatctagagaagatggaaactgcactagctatcaaggaggacgaaaatttcacaacagaatggtttgcaccagaagatcagaaagtagttcacttagaggaaagaagcctagagagcaagttgttgagtgaggaggaaactcctattctgatttattctccaggagtgcctaaacagcccaccaacacctctgctgaagaagaatacttgattcatgattctgttgctgaagaacttctgaaactctaagttggatacaaagctcaagaggataccattggggagctaacttacaagatggaaggactgaaccatgcaatcttggaacttcaagaaatggttaaaggctaccccagtttcgaattttaggattggtcaaaacagcctggttcagaagaagaagactactctgctgatcagaaagaagcttattttgaagaaaaatcaaataagtactcatcctaccatatctcaagagacgatgcagagtatgattcaagcactgaaaattcgaccactgaagatgaggacttctctgttcctctcttccatctcttttctgactaagctctgtaagagtcaagcttagtgacttaaaaaagctcacttgggaggaagtcccatgtctatccatgtatataactttctatttttcttgttattttgatgtttttgtttaagtgtttcaggtttatttcattattcattatggagtcaacggtcgagtaaattcaaaccaagtcaagaaaaatatcaaccgttgattgagtagaatgaggaggagtattttgagccattgatttgaatgactaaatgtgggaaatcaccctcaccgtttgatcgagtgaccaagggagaagtattctccaccgtttgatgaagtatttcacacttcaagaagatactcgattctttactcgagctctcatatttcgaagaccaaggcataacttcgtgatccaacttgctccccaaacactcctttactcaacggacaaagagattacccatgcccctcaccatttacaatcaacttttctatcctttcccaaagaaaccaaacaccattctcctccacccattgaattcgacaaacccacttttgaaactctctctttcatcatctcattttcgcaaaatctccatctctcacaaagcttcaaagtttcactccaaactcttcacgaattcgttctcacttcatcataattcaccaaagtcactcgatcacttccaagttcatcctcaagcattcaatcagtttcaagctcaaaatttcatcaccaaagaaagcgattcccttcccctttgatagctcttagagaagtgttcttgtttgtcctgtcaaagctcaccaccaatctccatggattcaagaaggaggagttcaccacgggcaagaagatcctctattgataatgaggaagttgaggcgtttgacatgagtggcatgactgaacgccaaattcgccaagctcgccgtgctcaaagatcaagcttgattcaaggtggaagctcaagccgctcaaccatgcaaagagaagaagtagctcgaggaaagagggtcgttgaagctgaagaagaacaccatgaagaagcaccttttgaagaagcggtttctgaggaagaggttgagatcatcggggatgatacaccaacccctgttgggagaagaaaccggcctaggaggaagagagagccaaccgagcgagtactatcaatatttgaaggagttgaagtttgagggaactagataccctcataaggaaacgatgcaagagcttggtatttgtggtgatgtggaatacttgatggaattggccaatcttgcaacattcatgagctgccaatgtgggggatacaaagaggagagctgccaactctttgcaaccctcaaggttcatttttgtttgggggaggattcaagacatgtttaacattgtgttctcttttcttatttcaaattttgcatcatctaaggcatagaaaaacaaaaaaaaattgaaaaaatttcataaaatgaattcatcaaaaacagagtgtcatgtagattgcatatcattttaggattgtatatagagtacttgcatttaggatttgctcatttgcataggggataatgattatttcaaagcgataagcatgttttgattcaatgaagtaagttcaatgcccaggttgttagttctcggttgcataaccgactgtatctatgaagtaagactacaccctgctttgaatttgtaacttgactatactgctttgattcgaaactcgcttatctgatgccattccatatctattagaacctgaactgaatttgcaattatcatgtctatgcattgtttgtgaactcatggctaccatatacatacttggattatcttattcacttcaccaccctctgttaatccaagtagctgtctctcatttttagagcagcttctcatacctttagcctagctttatttcaagccaaagatcatttgtgtgtgattgtgaggtctttttcgattgagcttggtataacgtgttacgtatgagccgacaagagcagtctttcatgtagacctagcccacgcttattgggttagctaggactaggtggacacttgtatttgggaatgagattgtgtatggaatgaatgggaatgataatgagaatgaaaaaaaaaaaaaaaaagagagtaagagtttagagttctaaaggggatacaaaagtgttaagtttagtaaagggtttggaattcaaagaagttagggattgtgattcaaagaaaagggtaaaacgccctatgtgctaagattagaagaacagccttaagtttgtcaaaatataaaaccaaacccgctagactcttaaatcgtttcaaagaaaaccccttagaacttgaaccaaaaagagagaaagaatgagaaaaagggtagagtaaggaaatctatgggactgggatcatcttctgagctatcatactatatcattgggtagatgggagtctgttcttgtattggtccattggcttttacctttagcattctgctgaagctcaatcttttctctgagagtcccctgttactcgaccaaacctctagagggaccatttttgtctcttagcctaagcccgaaacaaagtgagttcataaccattgcattgcttgatccactattcgtgcttaatgaatgttaaagggaactggttgatgtgaatgtttgaatagattaaggcaagttgttaggttgcattgtgacgagtatggctaaagtttttaagtaagagtctatcaccttgcaacctagaattagctacctggacatagagcttacccgttttatatgcatgctttggtttttgaatccccaccttcaaacctctccttcaacttaagattttttgtttgcttgagggcaagcaagatataagtttgggagagttgttaacactgtattttactcattttaggtgtatgtttatcatcatttaactgtgcatttgctcattgtatcatatcattttgcatcattttagcttattatgcatacttaggcatctaggatcatctcgcatacgcattgcatgttttggtgtgttttcaggtgcagaaggggctaaaaaggactctactcgatccattcactcgatccaggcagctagagaagaggcatcagtttactcgacctctctactcgatcgaggcagctaaagaggaggatgcagtttacttgaccctcttactcgatcaaggcagccttagatgaagcagcagattgatatactcgcccctcctactcgatcctctactcgacccgtttactcgaccaagggtgaccaaactacaagacttgttgagctatcaaagcgtcttcggatcctcctcattccccactaaactagacatttgagcatacaaataggagaggaagaagcatctactcgaccaattgatcactcggagcatagacacaaaggcgcagactttgcagcaccctctttactcgatccccaagatcgagtattcgcccaaaccgcctcaagtctcttgcctactagtgaatctagggtttcaacattttactataaatagatcactttggggtttgtccaaaggatctagcttttatctttaggttttctttgtgttcttgaatcttcaaaacttaattactcttaatctatttcgtttttgcatttagttgtttaagtaaagttgtttagcttgtttagatctacattttggtatgatttcagtaatttctgggtttgtgttcttgagaatgttgcttgagtagtgattaggattcttgaggatggattagattagggtaatctctaggttagttaggtggttaagattagtttagaacccttgtggatttgcttcgcccctatgcagttttcgctggctgatgtggagattcgatcatagacgtccagcgtccaaaagacgttcaaatggatgtctgatcatcaaattccagagatttgtagactcgaccaagagattggcttgtctgcttattggctttggtagattgtttcttaaacccttctctactatgtttcatcaacgacagttaagattaggaagtggtagagttatggggatctctgtcccaagtgtggattgacccggtttttgaatctatcgtcaagggtatctacctttcacctattagccatctgatgaaccctagagttgcccttatcaatgaacccatccttagaacttttattagatttatttgtatcccctgttgattgcacttttatttacctgttatttgtatcccctgttgattgcattttagttctgcctattggttatactcgacccaatgatcgagtagggctcttaagttctcatttttacttgttcgaatcctaacctaagattgttactagaaatccaccatcattataatctggcttgacttagttgtttctgtacacatcttgattgctagcaataacagtggactggattgacaccccctatagctgcatcgacatgtttgtgttttaggggaattgaactgaaccacgcattcagcatataagtaggcataaaaaacctgcttatcacttttctagtattttcaggtctttacaagtttgagattcatttggagataatagagcattctggaggaaaacaaagggtttatgctgctgaatcgcgtaggtgtctagcgacaccattacctgacgacaactcgaagacgcaacttattgaagttttgaaaatttctaaattcggctcataactttcccttatttctaaagaaggcctatcacgtttttaagtcatatgtaaagtttttaggtcattgtttagatctaagttggagaggctattctccttatctctttggtcttgggagcaaaaccctgtggagacttcctttagataagatctttcttactctttctcttgatatattgactatttatttccaattcagactatgatttgtgtttctttgatcatgtatgagcaatccacttgttaggtttagggtttctcattagggattcatatggtttagtagatcgcccccctgctaggttatctgtagaattcttcatatttaattgttcttaatgctagttctagagtaataaactagaacttgaatccaaacaatagatataaccgccataggtatttatagttggatctattatttgatgagcctggtttatagctgtgtaataagaatcagcctatctactaaggtgaacaattaaactcgtttagaatgcatgtctaggtataagatctctcggcttctcgagttactctttttgttttttgaaataaagttaaattagtttcaaaaaagaaaagtatatgtgtttacaacttgtgcaacgtttttgaagaacataaaaaccaagaagaagcaactttttaccccaactctcttgtttgaaaccaaaaatggagagctcgatcatatcttttgtctccactaatattaatagctgatatatgattccgaatgtgcttatcaatccacttaactagtcgggctacaggatttgggagactgccgtgtttacgctcatttcgttcccgccatatggtgtgtaccgttgcctgcaaaacacaacgagctaagaatccttcgacacgattctcgaccaatagttagcgatgttgtgtataatctcctgccaatccgtggaatttctctatacttgagaattgttttccacatccatgaaccaaggcaagtgatatctattactgcccaaagagacccttgtttgaggagggaagttctgacccatttcacccacagcgaatccttgtgggataagataagccaaatcaatttcaagaaatagacatcattcgcttctttaagagaccgaaacccaagtcccccctcttgtttcggtttacacacagcttcccatgcgatctttgcttttgttgtttgtaaatcaccaccggaccacaagtacgcttaacacaactgatctatttctcttatgcatgctcgaggaagacgaaatgctcccaaccagaagttacatatgctccaaagacaaatatcgtgccgaccaagaacgaatcttcttctttatttgttccatgagagggcgataatctgtagaagagagaccttttatgaccaaaggaagtcccaaatatctcaccgggagtgtaccaactgcaaaaggaaatcgatctgctatatcttgttgagaaatgtctgtcactcctacaagataaactgttgatttttccatacttatttcttagtcccaaacttttagcaaaagcatcaaacacttccacaatgccttctatagatcgcattttaatatgggcttatatcgagtccgttaaaaaaaatataagccctaaccctgataaaattaaataaaagattttgggctaagatagggctatactcaaattgttatgggctaaaatagggttggccctattacactcttttattattccctgtcctttttttcttcttctctttctcccaattcccaaacgcgtcttcttcgactcttcttcttcaatctcttcttctttgatttcttcttctttgatttcttctctgaaaccataagagtgaaagatttcatctgaatatatagagaaacagaagcttggtgaagtagcaacaaccctaattgcagatacttaggtttataacaaagtggatcccgtcacggccgacggaaaggttgatattgtgaggaataatttgatctcgctttatgaagaataccagactaaatctgcaagttcttcgaactcttcaaccacacttactccacacgagcttctcaatgaattgccacttgaagcagatgtgaatgatgtaagtataataatatatttgaatatctttcactagttctggtttttgtttaactaattgtgtgtctatttgtgtatttacaatatctttttgagcttgaaagtagtctcatatctgcttcaaaaagtaccaagtcaactttggaaatctatttggatgatgaaccaagattagagatgaagactttctctgacatggaaattttaagcttttggaaagagaatcaacatagatatactgatttagcttcaatggcatctgatttgtttagtatcccaatcacaacagtagcatcagagtctgctttcagcgttggaggacgggtgttaaatccttttaggaatcgtcttcttccccaaaatgtgcaagcattaatttgcacccgcaattggcttcgtggatatgcagatcttgaaggtaaaattgtaatttgaagttataaaacttacataaatcattgtcttattttaacttgtatcattaaaatgcaggagaaatcgaagaactttttgctgaagaagataatgatgctacaaagatgacaagtagttcaggagttggagattctaacatatgatgagaagttttttttgctcagtttttttttggacaaatatcggtaacaatgttttacatttcagcaaaatgacaagaaacaatgttttatatgttgtggtgttatagtgtttccatttgataataaacaatagtattattatcttataattgtttttgtttgaaaaacccttctctttaaataaaaaaaaaaaacttaagggctacaaaaggccaaaaaggtgctcaaccctgttttaaatttttttagggattaaaaagggttagggctcacttagggctgggcttaaaataaatagggctgggttgggctggaaaaccctttttaacatccctacattttaccatccgaaagaaccttaagattatctgcaaaactaaggtgagttaaaccaatgttcttacatcttggatggtaaccaaacttcctcaaacctactgccttatccaatagtttggagagaacatccatactaacgacaaacagatacagagatagagatagagaacatctctgtctcaaaccccgcacactgttgaaatatcccaccagttccccattgacttgaaccgaaaaagaggttgtggtgacacaaagcataatccaatgaataaaaaacaatggaaatttcatggcttcgagtaccttacggagaacagaccattgaaccgagtcgaaagctttagagatatctattttaattgcgcagccagtcgataccgattctttgtgataatcttttactaactccgtcgcgagcagcacattctctatgagcagcctatcttgaacaaaagccgattggtttcctacaacaaaatttggtagcactcgcttcaggggattagctattatttttaatatgactttaaatatgacattgcaacacgatattggcctataatctttcatctcattagtcgttgccttctttggtatgagagcaagaatggtggaattaattgcctttggtaagaatcctttcacaaagaaggatttaatcgcaagaataaactccttcccaatgatatcccaagtcgatttataaaactccattgtataactatctggtcctagcgacttatcttttggcattgcaaagagtactcgtttaatctcctcctctgttactgacctagtcatctctgttttctcctcctctgagcatcgataaggcagcaagtcttgaagttcactaatggatatttcctcatagtcatgtgaaatcagctgaagaaattctctaaaaaagtgttctgcttcctcttttatttctactactttttttgtaactgagccatctggtctttgtatttccctaatcgagttgtgcgctttccttaaagtgaccgctctatgaaatgtcttgtttttttgtcacccacatcaagtcaatgcaacttagatttctgttttagaaacttctgttcaagacaagtcaccctttcccacctatcataagcctttgtttcctcctccattgccctaactgaaggattttgtagattcagttgctgctttatgcaaagatcctcatgtgcttcctttgccttcttgaccaaattttccaaactatctttggtcaagtttctaatcaccggttttagtgcctttagttttctaataaacgtcgatgtggacatatgaattggttccgcgtccccccccccccagtaattcgccactaaaggtctaaattcctccatcattgtaatagctgataataggtttttatggtcaattaatcctaaaataccaatcatgtcgttgtagtattttaggtgtcaatccaaatgagtgtgatgcaaacagatgaaatgtgatcagaagtcactaagtcaagccaagcaataacagttttggggtttctaacagtcctaagcgaacatgcagaaaacagaagtaataacagaattactaaaatcactcgaccacaacaggctgatgccagaagtaggatgtggtcgagtaacaggtcgagtaacagacaggaaacaagacaatcttactcgactgcacagtctgttgccagacactgggtgtggtcgagtaagttggtcgagtcattgtaaaaactaagaaacaggcaatgagaacgatcaagcgataacgataaaacagagaaataagatagacgagaaattcctaaggatggggtaatcgagtagagtggtatcctagcctattcgaatggttaacaagcgcaatcaagttatccctagacaacaggttcaacaacagatcaattcactcccgtgacagaaatcctcaagcaaagctagcccagacaaattcgcattaacggaatctaactatgcaagcaataaaaacagactgataaagtcaataaatgctctaaacggccaatcccttgggatagagacgcatatctcaggaactagtggatcaagcattccatcgaacaccttctgggtgcgcgaatgcttgagatcgaattccagttgatcagaaagaaacaagcagtaaacgcaactagtcctaaagggatttaatcaattctaaaacttaaccattctacagactacggattccacaactactctatcccatccctaagaattcaaagtcactactcagacaacatgctcaaagacataaacgcagataaacgataatattgcataagtaaagagataaagagtagagaaacaagatgacagatgaaatcaaatgcggaatctgaataacttggaaaaatctcgaattacaggttgcagaagcaaaaccggcgcagtagagtaaaacagaaaataaaactgaagcaaaaaaactcaatgtcgaccggatatctgaggacagaaccctaagacatctatttatacaaaacgaaataaaatgatagtagacgggccaataacctaatcgctcggcccatagagagataatgggccgagatgggcttcgtgatccgatggaggtccaggccgcttccaaacactttgtcttctcctcttctcttccttgtgctcagcttgtctggttgagtgcgaatttgagtagactgtgaagacgtgatcgagtgtccggtcgagtgatgcttatggtggtgagtgttgatactcgaccagggggtcgagtaacttggtagagcgaatggtcgagtgatggtgatggtgtggcgaagtgatactcgaccagggggtcgagtattgtcatcgagtggcctgagctgaggttactcgacctggtggtcgagtggatgggaagaatggctccaaagtcactcgacctgggggtcgagtatgtgggaagaatggctccaaagtcactcgacctgggggtcgagtatgtcttctggttctggctcgtttcttccaatttgcttgcaaacagctccaaatcacctgaaaacaactcagaaatgtaatatgtatgcaaaactatcctaatcatgcaaagtatgcaagaatgatgagaaatgatataaaacagtgatgaatgatacgaaactggactcaaaaccatgatgaatggacactgaaaacatgcaaattatagacatatcaactcccccaaacttagtctttgcttggcctcaagcaaataagaagacatagttgaaggagaggagtgaaggcggggactcagaaccaaagcatatgatagagcaaataaaatcattgtccaagttggtagttctaagatgcgatatgattgaattctactcaaaaacgttaaccatgccttgttatcaatcaatccgtctcttatactcgacctacacatgctttcaaatctaccaatccctttaacattcattagttctggaacgtgaatcaagcagtgcatcatcaatgaactcatttggctaaggtgaaggtcaagagacaaagatggtcccttacagaataggcttaagtaacaggggatccctcaagaatgattgagctttagtagaatactaaaggtaagtcccaagttatgcatacagagataagatcccatctacccagagtataacaatgaagttctaatggtgatcccaactcctgtcccaacttaactctgccctttgcactcatgaatctttcaaactctttttcatatcattcttttcttttctcttaactctaggagaagctttctcaacgctctgatacatctagcgggtttggatttctttaacaactaaggttcctgtttttttttttttttcctttaaaaccaaaggcttttaacccttcttctttagctaacaagaacctcattcttttctttaacattctcaaaacctttactagattttttttctaacttctttagcttacttcccctagaattctttccctttcctcatcaacaatgaattccctcttttcttttaaacacatcccaacccatgatataagcgcccacctagtcctatccagtccgaagaacgcgaactagaactacatgagacactatctctgtcgttacgtattaacactttctaccaagctcaatcgaaataagacctcacaaacactcacaagtgatatagggcttgaaagaaagttcaggtttgggtatgggttaactgctctaataaagagtggttaaaatgagtaagaaaatccaagtattttagggtatccatgagttcaaattcgatgccaagacatgataattctaaatcagattcaagttcaaattgatagggaatgatatcagtttgaacttgaatctaggcatggtgcagtttttacttcaatttcaatgacaacgcatcaaacaactaacaacgagggcactgagctttatctggtgaaccaaaatgcttacaaggctatctcatcattatcccctatgcatatgcaacaatcctaaacgaaacactctagactcgatcctaaatgaaatgcaactacatgaacactctatttttgtgaaatcattttctgaaatttttcaattttttttttttttggtttttctatgccttagatgaatgcacactcaagattatatacaatgcaacacacacttcctgagccctcccccaaacttaaatcacacagtccactgtgtgaccaaatttggaagagagtactcaggacaaaacacatctcaaagacaaaataaaaacaagagatggtatattacaatggtggagtgaggtgcatacctcagtggaagaaggagcggagttggtcgtcaatagctgcctgtgattgctctcaggccatcgaagaatctccctgttgtgtctcagcttccccctgggggtactcgacctctgctccttcgtcgcagccagcaccgctctgatgatactcgacctctcttcttctgctgcggccagcaccgcggtcgcgtaagctacgggactggagaagtcgtgactgcatcattcgctatactcgaccacatcgtcattcgatctctatagggtgtggtcgagtgatttcctggtgtgaagaagccagaacaatgtcgagtttgattgctctgtggtcgagtgtattgctgttccttcaaagccagaatctatttccatcaactcttcatacttatctcctgaaaacactaacaagatgcatcaaaaacaaccaggaaaatgaaagatatgtacaaaggaaggcttgggacttcctcccaagtgagcttgttttaggtctctagcttgactcctcatactcattaggcgtttaaaggctcctccaaaggaacagaggttccttctggaataaactgatctatcatgtatttcttgagccgctggccattgactgtgaagtctccattctttccagctagcgtgatagcaccataaggtcggactgcagtaacagagaaaggaccagaccatctagacttgagcttgcctggaaaaagcctcaggcgagagttgaacagcaacacttgatcaccaaccttaaaatctcttgagactatcttcttatcatggaaagacttggttcgctccttgtagattttggaactctcataggcttctaagcgaatcttgttgagatcgttcagttggattaaccgcttctcctcggcggttttaatgtcgaagttcaggagcttaactgcccacatggctttatactcgagttcaacaggcaaatgacaggattttccatagaggaggttgaaaggagtcgtgccaataggggtcttgaaggctgttctgtaagcccatagtgtgtcattgagcttagcagaccaatctttccttgtacttcccacagttttctctaaaattgcttttatctccctattggagatttccacctgcccgctcgtctattgatgataaggagtggctaccttgtgctttactccatgcttcttcaaaaggttctcaaaacccttgttgataaaatgtttccctccgtcactaatcacaattctcgggactccaaatctagggaagataattgtcttgaacagctttagcacaactctagcatcattggtgtggctggctatggcttccacccattttgatacatagtctattgcgaccagtatgtacttgtttccgtaagaggaaggaaacggacccataaaatcaattccccaaacgtcaaagttttcaacttctaagatcggattctaaggcatctcattccttctgctgatgttccctcttctctgacatgaatcacatttcgagataaattcctgagcatccttaaacattgatggccaccaaaaaccagcttgcaggattttcgacattgtcttgaacgttgcgaagtggccaccataggcaaacccatggcaatgcaataggatgccttcaatttcgtcttctgagacgcatgtcctgtagatcttatctttgcagagtgtgtagagataaggttcgtcccagtagaaatggttaatgtccttgaagaacttcttcttctcatagctcgacagattcggaggctcttcaccactaaccaagtagttgacgtgatcagcataccacggaagcttttcttcaattgcacatacttgatcgagtgatttctaaatttgagcactctcgttaagttgctgaattgccattagctgttcttctggcatggagtcgtcaataaggacctcgtcttcaatcctcatcctagacagatgatcagctacaccgttttcgattcccttcttatcaactatctccatatcaaactcttggagcaataagatccatctcaacagcctaggtttggtatccttcttcgcgtatatatgcctcagagcagcatgatcagtgtagattgtcactttagaacccactaggtagcttctaaatttttcaaatgcaaataccacagctagcaattccttctctgtagtggcataccttacttgtgcatcatccatcgttctgctcgcgtagtagatcacatgcagctttttatcaatccgctggcccaagactgctcctactgcgtactgaagcatcgcacatgatctcgaatgggaagtcccagtttggagcttggactattggtgcagtgatcaaagcttccttgattaacttaaaggctgtcaaacattcgtcatcaaatgcaaactcggtttccttgcacagcagtctggtgagcggtcttgccaacttggagaaatccttgatgaatattctgtaaaatcctgcatgtccaagaaaactcctgatgtctttgacagtttttggtggctgtaactgcatcatcacgtcaatcttagccttatcaacctctattccctcctcagaaattttgcggcccaaaacgatgccttctctaaccatgaaatggcatttctcccagttcagcaccaggtttgtctcttcacatcttttaagtaccctgcacaggttcaacaaacacgaggagaaggaagagccatacacagaaaaatcatccatgaatacctctaccatctcctctatcaaatccgagaaaatagaagtcatacaccgctgaaaagtagctggtgcattacagagaccgaaaggcatacgcttgtaagcaaaggtcccataaggacaagtgaaagtggtttttccttggtcatttgggtgaatagggatttgaaaaaatccgctataactatccaaaaagcaatagtaaggatggtttgctaatctttctagcatatgatcaatgaagggcaatgggaaatgttcttttctagaggcaacatttaacttcctatactcaatacacatcctatgtccagttatagtcctagtgggtatcagttcatctttagaatttttaacaactgtcatacctccttttttaggaacgcagtgaactggagatacccaagtgctatcagagatagggtagataaccccagcatctaatagtttaagtatctcctttttcacaacctctttcaagttagggtttaatctcctttgaggttcaatgctagagtaggattcattttcaagatggattctatgggtgcataaggtgggtgaaatccccttaatatcatctaacgaatatcctatagctttcctatacttcatgagctcagttatcagcaggtttacttgatcagcagttagctcatcattcactatgacaggataagtagagtttagtccaagaaaaacgtaccttagcccttttggtagcggtttcaaatctaccttgggtgccttgatttcagaccagtcatcggatactaagttggcttcagatgaggagttgtgatcgagtgacgtggtcgagtagactgaatgggctgttggtcgagtgatgtggtcgagtatatattccccccttgctctttcacccaaatcttcatattctcctggattctcaactgctttgttcatctaacagcttctggtaccccaaagtctccaaatgtaaatctccttctttgctatcctttgttagagcactctgtagatgatctgtttctcccagctcttctagcattttgtcagctaacatatccatctcttcaatccagaaaatatttccttctatcgtaggcttcttcatggtgttggtgatatcgaaggtcatcttgagatctcttccgaggttaagatcaatttttcccttcttaacatcaatgatagctctagctctagctaaaaatggtcttcccagtatcaaagggtctttgggttcttcatccatttctaaaaccacaaagtctgtaggtacctcgaccacgcctatcatgactggtaagtcttccagcagaccatgggagattctaacagatctgtcagctaggatcaaggatatattgcagggcttgtacttgttgaagcccagtttcttagccacagggagaggcatgagactcacagatgcacctagatcacagaggcacttgctgaaggctaaagggccaagagcgcaaggtaaggtgaaggaaccaggatctcctagcttttttggaatgatcttctgctgaatgatcgcactgcattcgtgacttagcaccaccattccttggacttctttgatcctctctgtaatcatgtctttcacatatttgttagagtctggtataagtgcaagacagtcgacaagaggcatcgtgacttcaagatttttcaattgtttctccaggagagctttgtacttctgtatcatgaccttcttgaatcgaccaggaaatgggagtgggggcttgtaaggtgggggaatgaagacgttttctttggttttggcggcagctggtttttcaacaagaggagatgctgcaggagctagtggtcgagtaggttggtggagtataggctcttctattgctttttcagcggaatttccattttgacagaaatcctccccatcttgatccagactgtcctcagtgttctggttcggactctcttttgtgggtaattctttaccgcttctaagtgtgatagcatgagcgtactcctttgaatttgacattgattttccggaaggtcctgtaaatttgggtgctgcggtcgacccagtttggccttctatgtatctgatcttagatgttagtgcttcaaccttgatattgatatcattgtaactgcagtcaaccttgttgtgaatttctgccatccttttggacaaatccattgctcctgttgcttgcccttggagaatctgttgtaacatgttcttcaagtccgaatctggagttgttaaagctggttgttgttgctgctgtgtgaacccaggtggtggaagttgctgctgatagttgccctgatactgctgcttaggaacatacccttgaccttggttgtatggaacaaagggcttgggttgattctgctgctgtgaagggtaaacttggtcctgccggtttgcaacgtttgtacttctgtaagacagattgggatggttctgcttgaagttgttgaaacctttgttgtaacctccttggttctgcacatagctgacctcttctaactgcagagtctccccatcctgaacttgtaacgtctcatcatcacccagaaaatgaatgtgcttctgttgcataaggagtagcttgtccagtttgtcattcatggctttcatttccctacggtgcttctcatcagaatcagagcttgtgcggatgcttctgtcataatcttcattatagttgccatccgactgagccaagttctctaccacctcccatccgtcttcaacatctttgttgaggaagttcccgttagaagcggtatctagaagcatctctgtagagagtgctaagaagcgaagctttggagaaaccatgatgaggacattgcgtctgataacccttgaagcgctcccatgcttcatagaaagtctcattattcgtctgagtgaaaccagatatgtcattccgtagtctcgcagtcctggagtttgagaaaaacttagccaagaaggctttcttgcagtcattccaggaggtgatagagccttgaggaagtgacttttcccactgatgtgctttgtctccaagagagaatggaaacaatctgagcttgaagccatcctcactgactctattgatctttgttaggctgcagagcctatcaaactcgtctaggtgatcgagtggatcctccatagggaggccgtggaacttgttgctctgaaccatggcaatgagaccgctcttgatctcaaagttgttgttctgcacaggtggaggcacgatgccattacgctgattgtggttgcgtggtgcatcgcctgcacctatgttgtttggttgcacctgctcatcaacaactgcagccattgtgtctgtttctgtctgtgttctgagttggcgtgcaatacggtcgatgttatcgttgaacaggagattctgatttcctcgtgatcgtgtttgcatacaacgagtaccaactggtgaagctggtgattcgtagtacctgaatcaaaacagacaaacaaaaaaaacacaaagtgagtaactttcagaaaaaatgaaaaagaacttgatcttaaatattctgaaatctcaaatatagcaaacaaacacccaattggcaacggcgctaaattgataataggtttttatggtcaattaatcctaaaacactaatcatgtcgttgtagtattttaggtgtcaatccaaatgagtgtgatgcaaacaaatgaaatgtgatcagaagtcactaagtcaagccaaacaataacagttttggggtttctaacagtcctaagcgaacatgcagaaaacagaagtaataacagaattactaaaatcactcgaccacaacaggctgatgccagaagtaggatgtggtcgagtaacaggtcgagtaacagacaggaaacaagacaatcttactcgactgcacagtctgttgccagacactgggtgtggtcgagtaagttggtcgagtgattgtaaaaactaagaaacaggcaatgagaacgatcaagcgataacgataaaacagagaaataagatagacgagaaatttctaaggatggggtaatcgagtagagtggtatcctagcctattcgaatggttaacaagcgcaatcaagctatccctagacaacaggttcaacaacagatcaattcactcctgacagaaatcctcaagcaaagctagcccagacaaattcgcattaacggaatctaactatgcaggcaataagaacagactgataaagtcaataaacgctctaaacggccaatcccttgggatagagacgcatatctcaggaactagtggatcaagcattccatcgaacaccttctgggtgcgggaatgcttgagatcgaattccagttgatcagaaagaaataagcagtaaacgcaactagtcctaaagggatttaatcaattctaaaacttaaccattctacagactacggattccacaactactctatcccatccctaagaattctaagtcactactcagacaacatgctcaaagacataaacgcagataaacgataatattgcataagtaaagagataaagagtagagaaacaagatgacagatgaaatcaaatgcggaatctgaataacttggaaaaatctcgaattacaggttgcagaagcaaaagcggcgcagcagagtaaaacataaaataaaactgaagcaaaaaaactcaatgtcgaccggatgtctcaggacagaaccctaagacatctatttatacaaaacgaaataaaattatagtagacgggccaataacctaactgctcggcccatagagagataatgggccgaaatgggcttcgtgatccgatggaggtccaggccgcttccaaacactttgtcttctcctcttctcttccttgtgctcagcttgtctagttgagtgcggatttcagtagactgtgaagacgtgatcgagtgtccggtcgagtgatgcttatggtggtgagtgatgatactcgaccagggggtcgagtaacttggtagagcgaatggtcgagtgatggtgatggtgtggcgaagtgatactcgaccagggggtcgagtagtgtcatcgagtggcctgagctgaggttactcgacctggtggtcgagtggatgggaagaatggctccaaagtcactcgacctgggggtcgagtatgtcttctggttctggctcgtttcttccaatttgcttgcaaacagctccaaataacctgaaaacaactcagaaatgaaatatgtatgcaaaactatcctaatcatgcaaagtatgcaagaatgatgagaaatgatataaaacagtgatgaatgatacgaaactggactcaaaacgatgatgaatggacactgaaaacatgcaaattatagacatatcaatagcgttgacaaaattaaaaggtcgccgctcacgacccctttcttcattcactgtagtcagatttatcttacatcttaagtggttgaaaaatcctcctgcttcaaaaacactatatgacataggataattctgcagccatacgtcattcatcaaaacacgatcaagtttcttcataatcaacccatgatccctcttattactccaagtaaatagcggaccgtgagaatccatgtccgaaagagtgcagtattgaattacgtcttggaaatccctcattctagaagttacaacaggctgattctccaattgtgaatgcttgtccatatttaggatttcattaaaatctccaaatataatccacgctttattactaataattggagagtcgatgtgatctcgcaactcactccataaattctttctctcttctgcaaaatttgaggcatacacaaaagaacaaaaaaactcattctcttgatcctctagttttactgaacacgtaattacttggccgcttttcaaaacggagttaatctgacatcgtttctccatagaacccaaatacgccctcttcggttggattcataatttgtaacaatagccctgtctttaaataacttacttcctaacctttcagctttactctccttcactcttgtctctattagacacccaaacttctgctccttaacccacttcttaataacggaatgcttatttgatttgtttaaaccgcggacattccagaagcacgacattatcaatttttttggtggcgcttcttactctgagggcgacctcttatttgagtataagcaacggaaactgtcttatgtgctgtttttgatcctctaggtagattctatctaggctcaacctgtgatttagagtgcatcgacttagataaaagaggtatctcatttgttatcgctgtatcagatgactcctcttctattgtttcaggcgtggcaatcagttcatcttccttatcaacgtgattttccccctctttcatagatatgtctgcatcttcttccctcttctccttaacctcttcaactaaaccgccaagagcagagtaggaattataaaggatggagacttctccaaactttggtatatctattgttttcccgggggtacgagtagactttgatggtgtggaccactcttcttctgttgcattatcttgattgtttcccccgataggtaaatttatccttgcttggacctcttccaaaattttttccaccataactttctcaatagcctgtttgctcttgatactcttctgttatttgttcgctatccacctcattcatatcggaaactttactgtgagacaagttcgagtccagtgctaagcacgtgttttgaaagtgtccccatttcttgcaacaattacatcttggtggcagccaaggatataaatacttgatcaccacatctaactctccttcttcctcaccactaaaagagtattcagtcagtaagtcttttgtaagatttgcctccactaaaatttgtgcttcatcgaaactcgaacatgtttctgtttttggatgaagtttgacaggtttgccaacgaaattctaaccctttatccgtaaacatagaaggctggacatccttcagtgttacccataagttgattgatttcattttaggttgcacttcttcctcataaggagaccatttcgaaaccacctttggaagagccataatattccacattcccctattcagaatccttcttctcattacttcatttctaactcacaattgaatcgttgttgcatttacttcataaacatcgatcattgttgatttatctcccaatctccaaattttattcataatcatgtgaattttcccaacatgaggagctttattgttgagaaatttccccaccacaaaatcttcccagagaggtttagctacaacaaaaacctctcttggaacaaccattctgccttggccatcaactacatccactacgaattattgttttgtaaatccatgcttatgagcaacacttgcgtaggatttcctaggcaatgaagcttggtccgatgctgaagaaacctcagggtttgagtcacccatcggctctgtttcctgctcaaaatcatcttctttctgtctaccatcaacctccatcttgctattaaaatagtcttccaactctttacctctcaactccgcatcatctttgcatcctccttgtaccagaacatcatcggcagggactggaggtgctgccggcggcaacagacgtgctcgagaatccaaaaaccctaaaatcgccgtttctgtcgccctagccacgtcagctttttactttttgaaaattctccagttactcttcgctataggtataggaagtttcgtgaaacaccactggttgttacaaaattagagttttagtttaagaatggttcgataacaacctagctattattaaatctactaaccaatagtaacctgagaataccttaagcctgacgtttttactttcttgtcttacaacctcacaatctgttattgctttcttctattcttttaattttcattactattttacttagcttaattcaataccttggtctattgtgtgatccgagagctttgtggaatttgacccttaagtgctataatcgatctcttatttgagagagtaggtttaaggcaatttgaaccttatcaaatttggcgctgttgtcgaagttctctacgattcaccattagattaggattagaattttgtctaagcttttatttttctttttttttattttatttacttagtctttctcctttatttttttctgtgtttcaggtatttgtctaatcacagaaccaggaacaagcgagaaacatgaacaagagtaagattgctgggatcatggctaagcttaacgcggtcgacaatcaacttgtggaggatgtcgcttatgttcgtagcagagattttccaaatcagagatttgatcaccaacaaggctacaaaggttcctatgggaatggtcaaactagctactctcagaattctcagttccagcaaccgcttcagaataacaatagttttagcttcacaaggaactttgatcttgcttcttaccaagtaccccctccacctgcacctagacgcatgatagaatcaatgcttgaatagattctggaaggtaactagaggatcttacagcacctatccctagatggaatgagagcagcctcactacttcttggcatgctgcttcgatggaaagtggatatgagttcatgaaggatgatgagagtgacgaatttgacgttgcaaaggtagtatcgaccgacacatcccttggtgtcgatcgacaccagtgcatatatatgagccattaggctgtgacgaagcaaaatcgagcaggctcgacactgatctctagagtcgctcgacacacattgatagtgttgaccgacaccacctgggtgtcgatccacaacaataccaacctgaggaagtgtcgacgtttgacggagcagaatcgaccgagattgacagagcaggattgataccagactcccgatttgaatgccactaaggacagtgacgtttaagtctgggagaggcagttactaactacgtttttctttttgagtcttattcttactcttatttttcttattttttagtcgttttattgagtcaacattttgttaggaattatgatctcttttctttagattattgccgggttgattaatgctgcaggttcgacacaatctgactattggaaaatctagatggcaaaccaagagacttgaggatatcctggtttccaacacaatcctttaaggttagagctaatcttactgctcttccttttacctcatcaaaacagttagtgttcatagaacttggcttcttgttcatacctgatattgagaccaatgtgaaaaagaaaagtattcctctccccttataataaaaaaaaacgaagtaagagagtgatatgatttgaggtagtgtataggggtaggaatgtttcccatgaccccattattatacattgttaggaatgatcaattacaaaggttggaaaaatgctgagtgtgtcgatctagtatgcgagttcccctttgtttactcttcaaaaagaataagtctgggggatagaaaaagtaacaaaagaaaaagaaaaaaaaagttatatatatatatatatatatatatatatacaaaggatggtcgatttatcatggtatattacatgaataagtctagaaggttcttgaatattagcttgcttgatgagaccatgcgatgaaagcctgatggatatagttgtggaacttaggtatggaatctagaatgttgtgtaagcttgcagagaagtacatgttggttaggatttgattagacttgctaggcatatggatttagttaaaatgatcatggcaataggctagagaatgttgggagttcttatgttttcaaaccttttccatggtttcgggggagttgatatatccctatttttactgtttttatctatgattttggtagtagttttagagtctattttttatttctagagtcttttctagtcttttgaggtctttacaagtttgagattcatttggagataatggagcattctggaggaaaacaaagagtttatgctgctgaaccgtgtaggtgtctagcaacaccaatacctgacgacaaatcgaagacgcaccttattgacgttttgaagatttccaaattcggcccataactttcccttatttctaaagaaggtccatcacgtttttagatcatatgtatagtttttaggtcattgtttagacctaagcttggagaggctattctccttatctcttttgttcttgggagcaaaaccctatggagactccctttagataagatctttcttactctttctcttgatatattgactatttatttcgtattcagactatgatttgtgtttctttgatcatgtctgagtaatccacctgttaggtttagggtttctcattagggattcatatggtttagtagatcgccccgtgctaggttatctgtagaattcttcatctttaattgttcttaatgctagttctagagtaattaactagaacttgaatccaaacaatagatatacccgccatagatattatagttggatctattatttgatgagcctggtttataggtgtgtaataagaatcagcttatctactaaggtgaacaattgaagtcatttagaatgcatgtctacgtataagatctctcggcttctccagttactcttagctataggcatagggagttttgcggaacaccaccaattgttccaaaattagagttttagtttaagaatggttcgataacaacctaactattattagatctactaaccaatagtaacctaaaaataccctaagcctgacgtttttactttcttgtgttacaacctcacaatctgctattgctttcttttgtttctttttattttcattactattttacttaggttaattcaaaaccttggtctattgggtgatccgagagctttatggaattcgacccttaagtggtacaattgatctcttatttaagagaataggtttaagggaatttgaaccatatcaacaagcagaggagaaaatataaaaacgaaaaaaatcagatcgactttctctctcttcctctaccttctttcatttttttcgactttcctcctctccaaagaaaatcgatacgatttctatgtaaaaaatccaatccactggaggatccactggaagataatgaatccggctgtttttggcctatatctcctcatatcactaactctgggtgtctctggcgaggtttagtcgtcgaatcggcgttatttaaagtcggagagtagggatgtcataatgggtaacccgacccgacccgatccaaacccacatgggttcgagtgcttaatggacgggtttgacccgacccatatatttatatggattgaacttacatacccaaatccattattatagaaacccattggtttaatggattatatgggtacccatatatatgtataataaaatatataaataataaaaatccaaaaaaataacatagttttgtaagccaacaaaagtttgtaaataataaattaaaacaatctagatattaaaatagaaaagcatactaaaatcttaaaactacaaatccaaagaaccataaaactaaaaaaaaaacaaaaaatagtcttaatttaaaaagctttaaatgcatccgattcttccgcatcgaattcttcggcctcattcttcattttggcttcattgtctacaaacgagatgaaaaaaatattagaaccttggctataataataacaataacaaaatattgaatatagatggtaatatacctttttcatcatccgcataaccaaataaccaagatctagtacaaagtaaagcttgaacatgtttaggaagaagtcgactccgatacttattaagaacacgagaaccaatactgaaagatgattctgaagctacagtagttatgggaatactgagcacatcatatgccatatatgataaagcaccaaagcgatgactgttatctttccagtactgcaaaacagacatgttaggaaagttccttcatctctaattttggttcattcaagtaaatatcgaagattgacgactttccctcatccataacatcaggagcatcgtccaaatcaaacaaatcctacgttatatgaacgtcaatcaagttattattatattatatgactaactaattatttaaaatactaattaattatttaaaatttaaaagctctaaattttgaaacttacgtcatcgaatttttctctaccacgtttagtggaatgatgagaagacgaagatgtagttgaagagttcatgggcattggaaacttacacttgtactcgttaaacaacatagtcattttatccttcaaaaaatccagttttgcttgagaattacttggatcgagctcatcgtaaagacgcttcaagagcttaaacttcattctaggatcaagaacagcactcattgcaagaacaatgctatattgttcccagtacttatcgaatttaatccgcattctacaagccctgtcattgataagctacaagaaaattgccatttaccgacttcagtattactcactctttagtcgctaaacacctctttacgacaaataaacgactattaaatttagtcgctaatcgagagtcggtaaatacgatagtcgtattttagtcgccaaagagcgactaagtttaagtaatcgcttttatagtgaccttttagtcgttaaatttagcgactattagacgacaaattaacgattaacttaagggttatgtagtcgttgtaggtaattagtcgttaaaatttacgactatgttgtcactatatttaagactgagttgcgactgaaatgtcatttagtcgaaaattttagtgactaaattgttatcaaaaaccgactgcttggatacatttttgatgactaaattgcgactattgttgttattagaacacctatatgattgttctagagatggaaaccttcctgagaaaacaaaacataaattacaagaagcataaagacaatacaagaagcatgaacacaaatatattgtcatttcagaaaagtacaaaacccaaattacaaaaacatgttcgattcactacaacttagaactttgttcagcataagtacaagcaacacaagtacacatatataaaaactttgagccgtgatattgagtcttgaggaaggagttaagattcagacctatgaagcagatgaagagggagaggcagctggagagggtgagataggatctatggttgtctccttagctgaatgagattcgaggaaattgaggaaccaaggatcattttcgcgcaaaaacttatccactaaggacaagtgctcaagcttcttcttctgctcatctgcagctcgggaattctcagcttcacgcaaagaaatcttagattcacgcctatgattgtaagagacctgctcttctatcttgcgttgagcttcctgtaattgttcttgcaaagctacaaaagaagttgagtcacctgcttgcttccgcttgccattgacaagagactctttgaggcttcctactccataaggaacgcctctcgaatccctctcagtggactgcaaagtatgataaaagctgagattagagaatgaaaaagacaactcgaaaacactaaattgggaaacataaaacgttacctgaagaaatatggttgtacaatcctcagctgtgagctcccgtgcccgcgaagtgccatctgaaacagctgaagcttcagcctcgaactcagactgcctcagttgcaaattcttcttatataactccgcaatcttctccgcctttcgatcaacatacgtcccatcaggttttgtatgtgttttgatgaaaacgtcaccaatattgacagttttgcccaattgctcttcctgtaatgaaaaaaaaaacaagtcatagaaaagtagagaaacatcagattaaagttgcaaaggagtaaacagagagaagacttaccaattcgtctcggatttgatgatatgacttcgaccgtgagaagggtatgtgaggacctagaccgttacggtcagacatacgagcatttgaacagatttgacttctttcttgagcttcttcagtgtcccagtacgcagtcattgttttccatagagtttttccgatccatttaggtttattttgactagttcttgcagtgctaaccatgcctttcattcgccttaaacaaatctcattgaagtaaaactgaacagtccatgtgatcaaaggatcccaatggtgtgttttctacaaatagaaaaggtaatgtcagtaaaaaaaagaagtgttagcgtatatataagaagggctgaaagaacacttaacagcaaactcgatgaagtatttctcttgtctctcttgaggtacacatgtccagctgtagaagggaccatcaaatttgtttgtaaacactctagtgatattcctaacaagtcgtgagtttgtgtcccgagtaaacctccatacacaagaaaaacaagcagttgttatatggtagaaaatatctaaatatcagtataagctggaatttgattgactgtttaacacattgcaataaactcatttcggcttcatttgtcaatgtataagctggaaatggagcttttcccttactatcaatatgtatgtcaggccgagaacagaatcgttctatatccattcttgacattatgttgtcctttgatttatccttcacgctcataagagtattcattatgttatccaaaaaattcttctctgtatgcatcacattgatacaatgtcggagatttagatctttccaatatggaagctcccataatatgctttccttgtgccagttatgttccttcccatagcctggcatcttcttttcgtgaccgttgccaccaacatctttggttcttggtggatttacaccagacaactgctcgtaataaatttgctcaccggttaaagactcaggtggatactcggtagaagcgtcttttccttttcggaagtcgtttttgttcttccgtaatggatgaccatgagaaagaaatcttcggtgacaatcaaaccagcacgtcttccttccattaggtagataaaaaaaagttagtactttccatgcaaattggacaagacagtttaccgtgggttgtcgatcctgataacatgttgtacgccagaaagtcgcttatcgtccacagcaacactgcttttagattaaaatttcgattcaaagacacatcatatgcatcgattccagtagaccataactcttttagctcctcaataagaggttggaggaagacatcaagactacctcgcgggtgatttggcccatgattcagaattgtaagaaacaagtactctgtattcatgcacatacccggtggtaaattatatggagtcacgatcacaagccacaaaaaatgatttcgcgacatgccaaatggattgaatccatcggtacataatccgagataaacattacggggttcttcggcaaacatgggatgtagctcttggaaatatctccactccgccgcatctgaaggatgattcatttcttcttcttttgattggtgctcggcatgccaacgcattacagctgctgtcttgtggctcaaatacattctcttcaatcggtcaccaataggtagataccacatacgactatatggcactttggttcttcgacggtagtcatccataggcttccatctttgagcactacaaaaccgacatttatcttccttttcgtcttctttccagaaaagcatacaattgttaatacaaacatcgaaattgtataataaggaaggcctaaattgcgcatcaatttttctgtcatgtaatgcgaatcagtagcttggtttccttctggtaaaaaatctgtcaacatttgacataccgaatccacacatctttcactcatattatgatccgccttgttctgcatgactcgagctgctaacgataattgagactggccttcacgacaaccatcgtacaatggattttgagcaccttctaacaagtcgtagaattttttagaatggttacgtaccggttcctccacattctgattagtaccgtcttgatgatagttatcatcaaaccccacgttataacgaaatgcatcgttcaccatatccacatattgatcttctacaacattacccacatccacatatggatcttctacaacattatccacactttcataattctctcttagatacgtactattaacataattactcgttcctacattcatgttgaaatcttccccatgcttataccaaacataataatcaagcataaatccttgactaaacaaatgactactaacttttctacccgagacaatatgttttttattcttgcacacagcacaaggatagtggaatttacctcgacaactttgtactataggctggctattagcaaatgtcaagaactcctccactcctgcaacgtattctgctgtcaaattccccgtcatttcatcgaacatcttgtacacccactctcgattaaaaccaccgctattcggataattataatttcccgccattataagaccaataataaaactaaatatattttttatcgttttttttcatcaaaaacgttttttttcttaaaggtattatttgtattgtgtttgtgttgtgaatgaattttgtgtacgtgaaattttcattatataggcaattttagagtgactaaaacacgacaaaatagtgtagtcgttttaaaccggtacaacaacttacaaaacaaaatacatgtgctttttcaatcgataattacgtctattttgcgactatatttaatgacaacccgaaatagtcatgcaatagttgctgttgaacgactattacggcgggtcgtatattagtcgctaaacggcgactaatttacgactaattttggcgacaaccaaaatcggtcatataatagtcaccctttagcgactaataaggcgtctcgcctgtatagtggttatttggcgactaactaacgactatagtactgttagttgtataatagtcgtaaaattgtagccaaatagtcactaaatatagcgactatttatgtagtcgccggttgtagtgggtagttagctgttttcttgtacgctcatcaccgtttgttgcattctctttcagcagacgttcaatcttccacacatgcccaaaatatagattacatgtagagtaacttgtacctgacataagtgtggtaatcttgtagaatgacctcaaaatgtcacatatttttgttcctctctcccattcttcattcaatggacaagtcttgtagcatttatcaacaactcgtaatcggttaaaaacacgtttatagtttaaagctttctcgagcataagaaacattgaattccatctagtttgaacatccagcgacaaaactaccccctgatcaccttctacgcattgctggaatgcaagccctctcgcttttgaagctttcacgcacttgacactatctctgatcttggttaaagcaccactaataatctttagtccatcttgcacaataagatttaggatgtgtgcacaacattgaacatgaaagagttcacctccacataacaagttgtcatctaaattaagccgctcttttagtatctcttgcatggtgtcattcgctaaagcgttatctagagtaagagtaaatatattctcttcaattccccattcttttagacattcatggattttagtcgccaaagcatcactggtgtgtggaggaggtatgtcacaaaatgacaagatcttgctattcaaagtccagctttcgtcgacgtagtgggcagtcagagttatataaccttcaccagcaattgctgtccaacaatcgaaagctaagcatatcctactctgaatctttgccaaatccatcttcagcttgttcttctcgctatcccaagttttaacaacatctgttgcttctgtgtttctagtgtagtagctataatctggattcagatattgaaaaaaccttcgcagctcttcatattcaacaacagaaaaaggaagatcatgccaaattataaccctactaaacttctctcaaacaacactctaatcaatcttcattcttcctagtctttccatctccatcaattatcatatcagcgacatgcctatattttgacttcttaatgcatctttgatgatgacgcttcataggagatgttcatgtggtaggttcatacacaagtttttcaccacaatagttacatttaactcgattcttgccatcgtcaccttttccagcttgagtaaaatgtttccacatttctgaagttttcttccttcgtttacgagaattttcttgagagttaccttctggtatctctgatgattgctcatgggttgaatcaatatcatcatcgtcatccatcatcatctcttcttcagcagctatttttgactcccagtccagatcttccatattatctatccataaatttaatataaattatagtcaaaaaacaatatatgtatagatcatcgttttagttctaaaataaataaataatatcaaacaacaccaaactgtagacgatatttagtataatctcaaacataactacaagaacgaacacatgaagccaatctattttgtttttactaacataatatttacttatttagcaaaacaaatcatatgatcatcataacatgcatgggcacaaatatcaatatgactataacgtaattacatagtacatactcctagacgaagatgctgtcatgctttcgaattcgataagacacgaacggagacaaaataaaaaccaaggcgatgagacacgagaactcaagaagtaatttaagaagcaaccatagaacgatgacgtctatttataataacaatacatgaagagaaaaagaaaaccctagtcttgggtttatatattttacataattagctgcaaggaaaaataaatattatgcatatattttaccttttacttttatatttaggtaaaatataaactttaatagttattttagatatttttacatatgtagttgtaaagaaaagaaaatattttacatatgtatatataaattttacataatatattaatataaatatatataaattttacttttttgttttgattgtgaaacccatgggtaacccatgatcctaatgggttttacccattaaacccatgactctaatagggtaacccactaaaacccatttatatatatggataaaaaaaatcatacccaaacccattaaaatcatgggcgggttcggataacgtatgggtattgacccattatgacacccctatcggagagcaacgacatcagatcttcgagttgtgttcaagaaataagtttgatccttcaccaagttgctttgtgatggtaagaatctctcttactctgtattaattgatgattattgattgttttgaaattagggtttttttctttcagtaataattaggataatttgatgatggattttgattaattgtatactgtatcttaatctgataattactagagtattcgtaatggaaattattttattgtggatgattgtttgaattactactcaaatggatcttcaatatattaattagttcgattagtttttggggttaaacgcatgaatgttacctatgaaatattgtgtcttaactgtgatattgtgttgtatcttaattgttaaatattttggtttttaccgattaaatttatcaaactttttttgttttcttttgaggtatctatggaggaaacattgatttggacattgatatggactctacagctgcaacatctcagatggtgagtaaggtaatgcattacattgacattagttgacttttgtatttaaattaggtaaaacttgacttgtattgattgtagtgtgtctgttttgtgataaatgtttgtgtgtgtattcaattgatagcttattgtctatttagaggttgattataataggtaagacttgacttacattgacatcattcttaatgtcaatgagttcaatgcttatatgtttttcattaggtaaaaaaataagttttaacattgaatgcttaaacctacaactagaacttaactcaactaaccacaactacaacttaaaatagtcaaagacttaaacctaaccttctatatatcccaagtaaaatcgctgcttaagccacacctttctcctctttattttctcacatcctcctttaaaagtcattgaaactctttcatcctcctttaaaagtcattgaaactctttcatcctccttaatgaatccttatgctaacacgtccggcttcttggatctggtaacaagtcaacaagaaacctccatcaatgttgctgatacaagactttgtgaatctgacgcccctgtcttcggtacatgatgatgtgaagcagcattgcatggtgaaaccacaaacacaaatcgcacaccaagaacaaggaccaagtagtcatctaaagacgatgttctactaatctttgtgtggctaaataaaaagcaaggatgttgttattggtaatgagcaacgagcaaatgtattcaggaaacacattgcgtagtacattgcagcaagtccctttgttggtactctcaacaatagaccagcaagtcattgtaagtaaaggtggtccaagatcaacaaatttacatgttgtgggatcccatgcaggtgaaacatctcggatggcgagtggaatgaatgagaatgatttgatgaggttagctcatgaaatttacgagagtgattacaatggagcattgttggagggagttaaggcatgatcagaagtaatgcgcctctcttccaaccaaagagacattacttagcaaaagaagaaaggttaatggtgctcctcgtgtagctgttccaaggattacacatgtagttgaagcttcctaagctcgtccaccgggtgtgaaggctgctaagggtaaagacaaaggagcatggctggagtttcagcaaatgtggaagaagaaggaaagaggctagaaaggatggagagtatgtgggaaattaaagcaacaagatttagcttttaaagaaacgttgagcgacaagaaactgctagacagtttagttgcaagattctacacgcttactaaagtggaaacagaactaaagaataaactaatcaaaaacatgtattttacttgacaatcttctcaattctttgcgtttcagtctttgtctttgatgctttgtgttttatgtctttgtgtttcagttatgtctatgttgtttttattatgtctttgttacttttgtatgtctttgttgcttttgtgttttttgtaacattatagacgactttaagtccttgttcatgtatttctattttagtttaatctaagtatttgttcatggtaagtttatttcgtctttcagtcatgtttattatattcagccatgtttatttcatcaagttatttgaatgagaatgatttgagtttggcccgtgtaacatgtttatttcatcaagttgtttgaatgagaatgatttgagtttagtgcgtgttcatgtttatttgtatgctttatttcatcaagttgtttggatgagaatgatatgagacatgacaaatactctttatgctttgtttattcgtgtaggatgatagttgatcgactattgaaggatcacaagcaatcgactactaaaggatgacaagtaagaagactatttaaggatgacaagtaagaagactattgaaggatgacaagtatttgcatacacaccacacaaaaatttaaagttcacaagtggaagaacaatgacaaggaatctacatcttttatatgctttgtatacacaccacacacatatttttatgctttgtcgacacacatattttaatgcttttttttactatatattttaccatgcatgacactctttatctcattctctcttattccacatactctttatctcatatttcttcatccacaaactctttatctcatatttcttattccacaaactcaattctcgcttcttctacaaactctttctctcatatttcttattccacaaactctctctctctgaaacaaaagctgtatacttaatacaaaattccatcttttctatcttaatccaaaaatccatattttctacttaattctaaaactcatcttttatcctaaaaaaatggcatcatcctcgcgtgataatatcgacgtagcgtttgaagaagcatttgtaaatatttttgaacaagtatttgaaaataattttactcttacggggaacttcaaagagcaaccaaacctacggaaaaagagtttatattgaaagagatcgtgaacaaggacacattcagtgtgtaacgattatttcaaagaaaatccaactttccctcctaatctattctaacgtcgttgtagaataaataagtatgtgttcatgcgtattgttgatcgactctcgaatgaaatttaaatctttcaagaaagaagagatgctagcggaaggctcggtttctcttggctccaaaagtgtacagctccaattcgtatcctcgcatatagttgtttggctgatgcggttgacgaatacctccagatgggtcaaagcacttcgatgaagtgcatggaacattttggtgaagcaataatgtttttgtttgaagatgagtacctaagaaaacccagtgcacaagatcgtcatcgcctactaattcttagagagattcaaggattttccgggatgatgggaagcaccgattgtatgcattgggagtggaagaattgtcccacctcttagaaagggcaatatacacgtggctctggcaaaccaacgatcgtttaagaggttgtagcttcccaagatctttggatatgacacgctttttttttacctccaagcactttaaacaatatcaacgttcttgatcacaatccagtttttgacgatatcttacaaggatgagcttcagttatttagtcaacgagaccgagtatcatttgggttactatctcactgatggaatttatcctaaatcaactacatttatccaatctatttcacttccacaaagtctcaaggcatctttatttgcaaccaaataagaaacttaccgtaaagatgtggagcgagcttttggagttttgcaagctcgatttgcaattgtcaaaaatccagctcttatttgggataaggtaaaaatagaaaatattatgcgagcttgtataacacttcacaataggatagtagaagatgaacgagatggatatactcattttgatatatctaaatttgtataagtggaatatgctagaagttctcaagtgcatttcacctattctacatatatatcttaaaatctcgagaataagatcgccactcgaactcgaatatgtgatcaagctatgcatcaacaattgaaacatgatttggttgaacatgtatggacaaaatttggaaacaatcaatattaaaactatttaagttttatgtcatgtatttttaaattgtgtgtcatgtatgtttctaattttattatttgcaataattactatgttttcttaatttataaatgtttttgaaaataaaatcttaagaaccccaagtaagaacctaccattggacacataaaacttttacattcattacaccatctcttaagtctaactttttcagttttaatattaaatcaatgcttaagaaccaaaattaagaacctaccattggtcatgctcttaggatagtgagttggttggtttgatccgaacttaagggaagctatgtacctcctaattggtctgtgtgtcactgtgatttcgcataatgtcatgcatcagttacactttttgagaacccaaaacacttgagccaccaaataatagcctttttacctagcccataaaatgttcaatatcctctttgtaagagtacatgccactgctattgaatgttaaaatattaagttatctgattatgaaagttcttttagatctcgagacttaattttgtcgctacgcttatggcgaagtgatgcgtgttttattttgcctcatgcttttacctgaaagaccacacgactactacaagtgcacaatatttcaaagtagtaatttaggatcaaatccacaaggagagaagtagttcagagaaatcctttagaagagagtgaagttaggaccaaataaaaagagagggggttgttgtatgcattgaataagaaaaataaaagacaagtaactaaaataaactgtaagcaataagagagaagcgctaggtctttgggggtttctccggatgtcatggttcaacataaaggtatagatcccaattcaggtgataacatggttaggtttatttacttccaaattctcagacattcgaaactcattcaagacaagctatccctaacggctagtaggtgaaagccggcaattctaactatacctcgccactcagttgccctaacggctagtaggtgctaacatggtttcgagatacagatcaaagcattaagttcaagttcaattctagtccataagtccctatcactcggcgggtgagcaacagttatagttatttatttagttgagttagttcaagcaattatacaagattctaccaagtataaaatacctaagatcatgtactaggtggagttccaaacatacatgcattaagattaaactcaactagaaagaatagtgtaaacgatcaaacaaaaccatagaaaccgccaacctaaacttgatctaaagtccccatgaattcccctttgaaaccccctaaaacctaactagagatctactcgctcatggcaaaggagctaattaaaagttgggttgagtaaaccaaaacaaaaagacaaataaaacttaaaaagggtttagagattacttctttaaatgaagaacacaagaggcaaagctccaccttaaagagtcttatacaaaacaaaagagaaagagagatagatggtgatcttcgagctcaagagttgcggcggcgagtcggcagctctcggcgacggctagggtttgcttttgatgaaggcacacctagggttagggcttataacaagtatttgtacttgagggccaagaattaggtttagaggtaaaaacgtcaatccgccggataagtaagtgatagggccagtcgtgggcatcagggaaggagccaaatgacggtggcacaatgaggaattgacttgggcttgacctaatggtcggtggaaagcttctcggagctgcccgggttcaagtctccttggccggatgctttttggatttattatttccaaacgaccggttcttgacatgtcctcactctttgggtcatatcttgcaaacggcttcatggattgcttcgatttgacttcgacgttaatcttgactcttctagctttccatgcatacctacatatctcgtttccgtgatggggaagaactcggccgtatgctaaacttctgaagtactggaactgatcgctttttgatagttttaggttcaaaactcataaaaccttcttggcacctagaatacgtgtttctcctcttcttggatcaagaaaggcaccaaattctctttgaaacataacaaaacaatagctaaaacgggctaaaaagctgtgttatcacgaagtacagtctagtacggtttgatgaattttgtgatggtggtttgcaggcaattgataaaagcatgatcccaaagaaaatgtgagttcttttgttttcaaatctctcctccagatcaagatttttgttttccttaagaataatcaaagagctaagtagggaggagttgatatgttgcgtttttaatgtcttaggtctcttcgttttgagtcatttaacatgtcgtagtccgtgttttgcgtcttttgggttgtgccttctgtattttgcctgttttaggtaattgtgacgggactggatggttttgagctttttggagtagagaaagggcgagaaaatctgaagcagggagaagactgtgtagaccaatcggtccagtagagggtgatgatccattttggctttcaacagacggtcaaaaatggttgaccgatcgattaaaatctggaccgatcggtctgatttcctaacgcaggatttcggttttccttaactggatttattttcttttttctgtaattgggtattaaaactccaaacacctaattttgtttttaccgttctttttctacaactttttgagagcttttctttgtaagcaactttgggagaaggatccatcctctttgacactttggaaaagatttctaatctttttttcttttatatttcattaatctattatatcttttcaactctttgtgttgtttattttgcttagagtgagtaatcacttaattgggttttgggttctaagtaggggattcaatgaattgatcgtttgattattgtttggagttctttatctttaagttctttgattcacatgttcttaatgtttgaataggttgtatcaccctgttttagagtctaggtttttctatgcatcaaaagtgtttgatagaatgcctaaaccaatgtgaattgaacatttaatttctagccaacaaatgttgacgttagaatgcattctgaacctaatgaacctaatcctaatgtaaatttgactaggaaattacaaatgaaagtttagtagtgaagcagtccaatttagtgattaataacttgattgagaattaggctaaacttgtgttcatgttcgagaatggttctttatgttgaatttcctgtctaatatttccattaatcatggatctctgaaataccctatggccgattgctttttatcatataagtttaatcgtttattttcttgcattttaatttataactctgaatactaaacaaacaatctctttagctttagctaagaacgagtcttgaaaatccttagagtatcttttgtccttgtggatcgacctcgaatatactatctaggggttaagtgtattcagtaattactcaagcaatcagttttaaagatggtcactctcgtttatcagttccaaagcattcttgttcatggacctgaatatcttaggcgatcacttgatgtattcttacaatcattgattcatgagttacaaacattgtggtccgagggagtagttgcatatgatgttcctctaaggaacatttttgtgatgcctgctgttctgatgtagacgattaataattttccagcatatggaatgttatatgggtggacaacgcatggaagactatcatgtccctactatcaggatactattaatgcatttcagcttaagcatggaaaaaagtcttgttggtttgattgtcatcgacggtttgataataggtttttaagatcaattaaacctaaagcactatcatgtcgttgtagtactgaaggttgtcaatccaaatgggtgtgatgctaacaatcaagatgtgatcagaagtcactaagtcaagccaagcaataacaggttttggtgtgttctagcagttctaagtgaacatgcagaaaacaaaaattcaagtagaaacaataaaacactcgaccaacacagctctttgcagagcactggatgaggtcgagtgacaggtcgagtaacagacagaaagtgaaacagggatactcgactgcacagtctgttgccagacaactgggtggtcgagtatcaggtcgagtaacagtaaagaattgcagaaactaagcaacaaatgacaagatgcagtagagtaaacaataaaatcaatcagataaagaattcccgaggatagggtaatcgagtagtttcgttttctcagtttactggtgattgacatgctcaataaataaaccctaaacaacaagttcattaaccaaatctaagtgccaccgcaacagagactctcaagttaacctagtcccagactcaatcaccattgacgagagctaacctaacaggcattacgaatcaacaagttaaagccaaaacgctccctgcaaccaataccttggtacagggtcacgaatctctggaattagtggttcagacatttcatcgaacaccttttgggtgcggaaatgtctgggctcaaatttcagttgatcagaaagcaataggcattaagaacaactaatccagaagggatctatcaatcaatactcaatcacctagcatactgagaattctacactactctaacccatcctcagaaacctattcactactcagacatcataacagaaagcataaacgttgaacaagttgaaaacataataacaacagtgtaacagcaggatgataacagaataaacaacagtaaacgaaatctagaacaaaagttgaatactgaatagataaagagaaatccggattacaaaaggtctagaacacaaggtctgcggaaaaactagataaaaacttttttttttaaacttgttctcgaaaatgtaaagtacatgctacttatagcaaaatattccaaaaccctaatactcaaaacgacgcagtattgggacggattaagaactgtactcgagccaggtggtcgagtgagaggtcgagtgataagctggagtcttcttttcttccttgtgctcgagtgtctggttgagtgcggaatgaagaagactctgaagctggcagtcgagtatttagtcgagtgatagagatgatggtactcggctcggtggtagagtgatcgagtgaaggtgatgaatgtactcgaccgtgtggtagagtagttggtcgagtgattggtcgagtgaatgatgatggagttactcggcctgttggtagagtgattggtcgagtgaatgatgatggtgttactcggccatgttggtagagtgataggtcgagtgaaggtgatgaatgtactcggccttccttttcgggatttcttagactcgtcggtttgttctcttgatctctcatctacgcttcttcttttgtttctctatttgagtttcgactttttattcatgtttttttttattcgctttctaattcattttcttcatactaaaaataaggggttgggtatggatcagattattctcgtgtgtggcagatggatctttggaaaaaccaaatagccttttgacgttgataatattaaagattgtcgagttcttgaaggtaacagccaaaccatgatttcgttccaacgatgtatgaggattacgatttggataacaagctattcaaagtagttttgagttacaaaatctcaaaaaaaaaagaactaccagcagatacaccaccagttattattggtaataatagacaattttcagctttttttgggcatatgaagaatgaaaccactcgactttgtgctgaggtgaaggagaaatttatagttcaatccacaaaggaaggaattgatggtttcgttgagtgcagtttgacaagttctttacgaccaagtaatatattccataaggtagaatgagatatcgatttatccagtgaaaacatggaagaagctgaagttaataatatttatgtggatggtgaagatgatgaaagtagattcgattactgcgacgattctgacggaatcgatttcgaagatgagaaatttagcatgtacggaattccacctgaagaagaagaaaaacctcagttactactccaaaatttaggtatattcatcgaagaagaaaaagaagaagctacttatgctactttagatgtgtcttcattggagctggcggttggacaatgttttaaaacagaggagcacttggagaaacgtttgaagatacttaccgtattacagaaatttcattttgatgctgagaaatcgactccaataaaggatgtaagtggagggttcgagcaacactagtaggcgactctacaaagcttcatgtgagagtatttaagtcggaatttacatattctgttacaaagcgttcatcgcgtgcccgacaagcagcacataaaatacttagactgttgtacaaggattacgttggtggaattagaccaaaggttgtgccaatgcatgttgctaaagcgttgaataaactctttcaaatcaaggtatgatttactatttcttttttatttgttttctatttttaaatcgttttttatagtattgctaatactcactgtaaaataatattgtgtaaatggattattggaaggtatatcggacactaaggtatgcacgacaattggttaggggtagtctataaagtggatatgagcagcttccttgtacatgctaaggagagaaaatcttgaaattttacttgacctgaagttgatgaagaaaaacggtttaaatacttgttctagcttttggtgcaagtattttaggatttccttacatgaggaaagtggtactttttgatggtatatttttgcaaggaaaatacttatggacacttcttaacgcaacaactcaagaatgtaatttttagatataccagataacttttgccgtggtagatactgcaaatgatcaatcttggaatggttttttaaataactcagctgtgtgctactagatcatgaaagccttgccataatttctgatatgcatcaatccattggaaaagcaatcaagacggtttatcctaattctagccagggaatatgcacataccatttatacaaaaatatattagtccgttttaaaagtcgggatgcgtttgggttggtaaagaagggagcgaatgcttttagattagtcgactttgaaatcatttttgcttagatgcaagctttaaagcgtgcttacctttaaagagcggatgtacgactatggatacgtttacatttctatggggataggtacaatttgcttacaagtaaaattgttgaatcaatgaataaggtcatgttccccgctagaagttaccctattgtacaactgttagaaaaaattatgttcatgatgactagatggttttcagaccgaaggaatgatgctttgaattagtttacctctcttacacgtgaaatagagaagattttgcaggtaagaatttctaatctagtactatttgaacagcacatctatgtaaatattgttcactaataacaatcctgggaattgttttgtagagttgtgtagagtatgccaagttactaagggtgcaagatatagatgcacatcaggtacaagtgacgtttggagcatctctccattttgataatttgaaggatagaaaatgttcgtctcgtagatttgatctagaaaagataccatgtgttcacgcgattgcagcggctgaaataataaaattctctcggatatcaatgtgtcatccttactatcacaagaattatttatgctcatcatatgctaacgccatcatgcccagggattttgttataccagtcccgaacaagttgtgacaaccaaatgtttaccaccagaagctcgacaataacctggaagaccaaagtgatcaagagtcaatctgcattggagattgctatggataagaagaagccaagaaaacgacatgcttgtggaaatttgaattaagtaggccacaatcgtaagacatgcactgatcaaacttgaaagaatggttaatttgcttatgtttactactatttggtttcaatatttttttagactttttctttttactgtaaactatatttcagtcatgaataaagatcattacaaagaaggttcttaagccaaagtggctcgtttctagggtctgcttggaataccgaagtcgtataagcaggaaaaactaaatggtgagctatactattacaaagacgttttgtgaacgtaaatacaatagatgaaaatcttgaagacccatattctatatctagaagtaaattttcagtttcactcctatttgacctgccatttaggtgttaatgaggacatgcaatcttcttcaaagtgtattttcttgtatccatgtgtccaagcttattgcatcgctacaagtaatgctttcgtcttagcctctaggggagtgttacatgatctaatattgaagatccccaagctttttctttcccttcaggatctcgtattatccacccaccggtactttgagtagtatttttatgtaatcccgcgttgaaattgcatttgacaaaagaaactgttggtttcgtccatgaagctttttgtgataatggaggtcttgttgtagcagtatttcctcgcctctcacacatgtttatgatccattcattaacatccacttctgattgtgaaacgaccttcgaagaacattttctgaatttattgaacacataattatttcttgctttccagattcggaagataagccaaaatgggagtaatttttgttgttctgttagattattgttagaaatagaatcaataagaacagagatgttctcttcaacatcgtttgagaaagtatgtcctgataaatatgaaagttttgctagtttccatgttgtagttgcatatggataattaaatagaacatgacatattgattcctcttcaagtgaacaacgagaacagattggatctatattcattccttttttgactaatctggcacatgtgggtaaagcttctggtatagttctccaaagcatgtatttatttttggaatgataggaagtttccacatcttgtttttcaactctacctatccggaaggtgctgatggcttgatttgaaaatcagttggatcatgagtgagtaaccaataccttaaattaaccgtataatcccctcatgttgtataatttcacgatagtctatcatggattttcttgtgtgagagatgaatactctttatatgaatgtgatcatcatgatttattaaacgggatattagggtttcattccaaaagcggtatattccgttaatagaaatgaacttctctactttgttgttttgtgcaggggtaaggagactgatcggtctaggtggatgggttgctataacattattatgtatctgcttccttttttttatcacattcaaacccgcgagtagtaaagaccaaccataagattgtctctttcgagctttggcatataagatagtttcctcactaaagtatctcgccttcataacccgagcaaataatgaatttcgatgttggatgattttccatacctgtttcgcaagcagcgcatcataaaactttcctagatcccttaaacctagcccaccttctttttttgaatattgtagtcttttccaagcaatccatgggatacctcggtgttttgcattcttctcccactagaagttcatgagtagtgattcaatttctgaaatgattcccattggtaatttgaagcatgacatggcgtacaccggcattgccattgccactgatttcaacatgattctttttcagccggttataggtgttttacactccaacttgatgttcttttcttaactctttcaataatgtaattaaacatttctgttttctttggaccaaattgctctggtaatccaaggtactttccaccaccgccttgactttgaatccctaacaacctcttaagacgattttgaatgattccattaactttcgagccaaaagtaatgagagattttgccatatttattttttgactagaatagtattcagaaatgtcaaaagcgactttcagggcttgacagttgcgaacgttagcttgacagaaaaatagagaatcatctgcaaactgtagatgagtaacacattggactccatttccaattcgaattcctcggatatctccttcagaaactctcatcttaacaagatagcttaaaatatcggcacattaaaagagatatgaagatagaggatctccttgtcttatttcacattgtggtttgattgtaccatgaggtatgccatttattaaaaccgggtaactaactgatctcacagtgcccattatccagtgaatccatttcttactaaagccaaatagtttcattattgtctccaaacaagttccactctactttatcgtatgccttgctcacttccgtcttcacagccatagaggattgagatacttttttcctcgacttcaaagaatgcatcatttcgtgtgcgatcatgacattatcattgaccagtcttcgtgaaatgaacgctgcttgagaatcggagactattgcatcaaggtgatttttgagtctctccaactagacattttgagattatcttttataggatgttacataaagctatgggccgataatcagatagtgttataggattattgatttttggtatcatacatatattagtgtggttcattgactgtttcatgtatgaagttctaacgtaattttttacctcctacatcacgtcttgtccaactatgtcccaacaaaatttatagaatctagtagttaacccatctggtccaggtgatttatcatctccaatttggtttattgcctcaaagatttcgttgtcgctgaattcctttgtgaggtcatcgttcatttgtttggtgactgtagcttttaagcccgcaaagtctattgtagaaaattgtcgactattactctcataaacttttgtgaagaagctttgggaatgttttcctattactttatctcctctataactcaaaccggtatcatcttttattgagattatgcgattcaccaaaaatcttgtttcagtgcaaggatggaagtatcatgtattttggtccccttctttcatccaattgcttcggcttttttgttgccaatatatctcttcatcattgtatgcccttgttgactttgtttggatttttggaatgagtcctcttactgatcagttcatgcttgacatagcattgttcagttgagctcgtagatgatcgattcgcattcgtgagttcatgttaaacttatgttttagagttcccattgcttgtctacaagtcctcacttgatatattatttgtgttttctgtctggtgctctgttttgtccatccaacttggacgtgttgtttgaagtgaggcacatcaactaatctcttatcaaaacgaaatggtctctgcttcgaagtttcagttttttctagagttaacaaaagtggtttgtgatctaaactagtaaggtcaaggaattccaattctgcaaaatggaaggaggctgctccttcagaattaataagggctcggtctaaacagcattttactttgtgtttatgccgttttccaaccgaagaaaacctaagccttttgatcagacgtccagaaggtcacaagtagccatcatgtttcgaaaactcttgaaagtgcattcttctcttcgtggtcatcctatttttttcagaatttgacaatatcttattgaagtccccaatcaatatccaagagtcattgcgtgtaagtgacaagttttcaaagtgtttccaaagatgatggccctaaatgttttgtagcttttaattgatttttagattttggtttttggtttttcatttttgtagtttgtgatttttgttgtagattttaatatttgcaaaatcttgaatggaaatttgtttagtttttagtttttctacataatatttatttttcaacgtttttaagttctctattttaatatttagttttctattttctatttaaaaattactaaaacaatgataataaatattttcttaataataaaaattaaaaagatgcagaaaaatattaaacataggtatattgcatataaacatagattttataaattaaaccaatttttacatagaaataaaattaaatttttaaattaataccaaaacaatgatgtagaaaagaaaacacaaagcataattaaaataataaaaaaaaattaagaaatatatcacgtaatacttctaaaaaactcacaaaacttggtttttggattgtatgaagaaataggtaaaatctcctaaaatctagttttcctatcttttaggaaatctacttttttcttaatcatgaatgggtaattattagttattgcaaaattaaaatccaaaaacttttctaaaaactgcagtcattcaaggtcgatgtctttcacgttgataaggatgaccatacacacaagacaaatagaaattgatattattgatagagatatgtacattgatatggcgttcatcttggtagactttagataaatgcacattatccttccacaacaaggctaagccaccactatgaccttgtaggggttgagttattacattgggaaatcctaatacatatttacataatcacacttatttagagtttcaataagaaaaacaacattaaacttaagtaatgtacatagtttactaagtcgagattgagtcagtggcgcaccatggccttgatagttccaggagccaatcctcatgggggatgtgggggtaccgggccccctgcacctccgatcaatgtcattggggatgaaccagatgtagcaaacccaagcttcttgtctttcttgcgtatgtgtcttagtactgctgattcttctgttgcttccgcttgattgtaaagcctttcaaagctgagtctctttctcttaacaaatgcatactcgttcattacattgtctgaaaactcctctagcagccctgcttctctttgatccatcagagattcacatacatatttggcatgcaggtaccttagtctatgagtagttaaatctgtatcttcaaaagtacttgccatttcagatggaacaaagtctgagtcttattcctgtcttggtcctgtagtcgaatggttctgaagacctggtatcaatgtagccggatcaatgcttggtagcgagccatcaccagtcatatcttgttctccatgttcatgctcctggtggttatcatcactcccttcatcatcatgtgcaggattatcctcttcaaaggtcaaggcacattcatttgcatcgtgcttaagggaaccacacttggtacagaagtttctcaatctctcaaatctgaatttgatgatagtattctcattcgcctgaaattgaatgtttctttggaaccggagtggatcatctaaatttcaagccaacttaaccctaatgaatcctagttgatttgtgttctcatcaaaatcaacatctacaacatatcctagtctgtttccaactgccctagccattgcattggttaagaaaagaagagggataccttggatttaaacccagaaaagaattatcttcatctcattctctgtgatattcaggtaccatcgattgattgacaacatccagtcattgaatgaccacgtcgcaggaccaagttcattgattcatctgtttggaacttgaattgcacctttccattgccaacgattcgcccaacgcaagaatccgccagtccctaaactctaggcatttgactgattaacgctcgtaggttttttttcggggattcactggtgtgacgattagtgagaagcggttaacagcgaacgcctgtgagacgaattcctgtgacaggaaatttggagcatcgtcgattcccaaattcagatcttggacaaactttcttagaaaatcactcataattgattgttggtttttgtcgagttggtaaaacagtggtgagagaaaaaggaatagatgattgaaagggttaaatagaatgatccatgacggttttggttgacgattacctcccgtaaagaggggagaagaataactaccattgtcatttggcagacaaaaaccggcgttgaagactctagaaggaattctgcgaacatctcaggtcggaaaaaaatctccagtggagaacaagcaaatggcgtcgatcgcccaaaaaattgcctttcgagagagacgacatcatcaatttttagacttaaacctcttctattgtcttgttttgcatgtttaagctattagacttgatatcttttgtgtcttgcaacgtttttttgattcagtcacttatgttttctactattttgtttcaatatttttttgtcttaaacctcttttatgtcttgccacgtttttttgattcagtcacatatgatgtagaagtctgagacaaatgaaaaaataattaaggttctgcaatggtttttaagccagtcactcaatagtaagaaattcatttctacttgcctataacgtagaagtatgagagaaatgaaaagatatacgtcgaagtctgagacaaaataacatgaaattttgaaacacataccatgaatgtctgaaacaaaacccaaaacaaccacataacaaaataaaaacacaaacatagcttctacgaatcattaaggcgaggaatctcgaattctttctgacgagtctcacagttaagtgttccgacaaactctcctaattcatcaaacatctctacaccaagattgatccataaggcctgcatgtttctatcacacaatccgtcgaatgactttccaagtgccaaacattcaatgtattttatcgcatatattgcacaatcacctcgatcgtcattcactgggttcttctttgtaaccctcttcacctccaacattgcgtagctcttcttatggtccttttctagaatatattcagacaacatagttgggattatcttccttaaaaacatgcactgttgaaccatttctaattcctcaacaggtgtgggaatgctgtcgtaaacgtagatcctgtttgtcttcaagttaaaatccaaagccacccaatgattttcattgacaaagagacaaccgtaaaggtgatctacattagtgaaccacttattgtttgtcgctgcgtctgtatgacttgtaccgttgaggtgattcacataatagccggtccagttgtaggttttaaaatcagacgaatagtgtttgttgtagtcattcttcatctttcttatcaaaacttgatcaaggaaagcaatgcggtgatttggtatttataaggatcacgaatgaactttctaggaaacatagtcattgtagttcccatgtggtgcaacataatcaatacaacaattaaaaccaaattttaaaccaattccacaagctgaaaattgtaaattacaaaagggaatacttacatagtctttcacccaaccatgtgttccatctggtcttttctaggagttataatttgccaaaacaatcgaacatcaaaattatttgtttgaaatggttcttctctgggaaaaaaaatgataaaagagaaccgaaatcatggattttagaactagaaaacagaaacttactcatcaagcctagccaatccatgagactatgaagtttctcatctgaaactggttgaagatgctcgggtatggaaggggatggtgctccatccgtgataatgcgcttcactgtggatttccctacataaggaggttttatataatcggctagttgagtcactcgtctctctagtagtaccatcattcaaatttttaatttggtcttcaattgacgacaacacgatagccattgcttcactagcccgctgtacatgaggattagagaatgtatcttcaaaactgcaagccattttcaaagtatctgctacaactttttcagttacatcaccaacatagtcgtcatctctcctcattgtcttctttaaaacttttggagttgataccttcatttcctttaccttggccatcttcttcttaggtatcttagatgcttttttaggcatgattgcaactttcttcttcttaccctttgttgcatctttcttttcacaaagaacaagcagctcagatatttctcattcatgctttttcttgttcttcactaagtagataactttcttcactactctctaacaaggcaaaccatcttgagattatggcttctcctctaccatacaagacttcgataatcaataatttaatatttcatcaacatcaaaattcatgataaatatgaaaaacaatttttaattgtagttcaagttctttattgggtgtctcatcttctttatcgttgttgaatgtggcatcatctcctttgttgttggatgtgacatcattaatggatacatcagcgggatgagactctttcaaagctttcaaatcattctccacagctgcaagtctcttactaagctactcatctaaaacaatcactttctgattaacaagaggaatttactctccaaaccatcaattcttctgttcagatttttgtccatctccgtaattgtccttgtcattttttccagcatcttccaaatatccaacaagcttgtcttctcctatttatcaacctataattagtgaaataattgtgtaactaaattattgtcaaaatgtagacaattataaaagctaattttgtaaaatgggaagaaaaaaaaacaggacctccatatgtgctttttctgttagctgtttttttgttagaaacctctgctctttcatcatcaataggcgttgactcattaccattcttttcctttgaaatgacactactcgaacatcctcatttttttattttttcgtttcctcttaagcactgatttcacatgtttccacgcattgtttcttaaacggttgtgtatgatatctctaatcaagttgtcaagcgtcatatcttgattctcaggcaagtcactccatttagggtacatgttttccaaagaatcaggaagcatatgcctgacctgcacctactaacaacacaaaattaaaagattatgttagttacatgtctcagaatttattaaatatatgaaagaacctaactaaagaactagagaagatcacacaaacctcttcatgggcaaccttctcagtttcaatgaatttcttaaatttgatacgtgcgcgacttgatctccaatcaagtagtgcaacaccattagttgttgctcttctaaatccataaatttctctcaatccaggcatactctcgtaaatccaaatccacaaggcatagacacatccatgaatcccatatgagttttttttgtagtcaataatcttcacggaactaactagagactcaattgcaaatcgaccccaaggatatttctcaaaagactctggatcaagaactaattagcgcttggcaaagggattctagaaccgtgaagaatctcatgaactccaacagataacaagcataacctaccaaccatcaacctcttctcataactccattccttgctaatatccattacgcactccaacttagtaaacaagggaccctcggacgttccaacatccatttcattccaaaactcatggtgtccagcttcacaagtggctgacttgtcaataagatcacagttgaaacccattatatccgcaaatttagtaagagaaaatctgattggccttccatcaatcacagatcaaagctcctgaaagttgttgacactcagctggtttgtaaagaagtagtgaacagttttgccagcccatatatattccgcatgagcaaactttataaagacaccaagtgatgatttcaacaaacctttccacacatcactacctaatcttgatctaatcttaaagatatttgaaacaaagcagcaatggtttatgctcctgttttgtagtggtgatttaccttctagataaagacgaggccggtaactatataaggttttgactagacgacacaataccttatcatagagaaaaacaatgttcaaagagattgtcataaagatttttgaacaaatctgtcactaaagacacatgataaattgagtaaatttgtcacaacatgaccctaattcaactacaaactatttccaaaggcgggaatatatttctaattttttttccagcgaatttggcataagttagctaccaaaacaatagattactaagaattaaaatctgaaaaggaatccaaacaatacactcggatatcaattgattactaaaaattgaaatccaaataataaacaatacactcgataggaataatgattcaccaataaagagtttttaggttttcttaaaaatttacctctaagtatgccgactagtttcgagagcagcgatgatgaaacaagaacacggtgaaggaatagttatgaaacaaaaaggggaaaattaatattgaaatcataatcaacaatacacgattgatagtaggatttttgtcaattaatcctaaaacactatcttgtcgttgtagtattttaggatgtcaatccaatccggtgtgatgcaaacagatgagatatgatcagaaagctctaagtcaagccaagcagaaagttggttggtcctaacagtcctagtatgcaataacagaaatgaaatgaaactaaaagcaggaatggcaatagcaggcaagtgaatgacaaagcagaaatgataacaggcaatcaaatggataaacgattcctaaggatggggtaatcgaatagtgtggtctacttaatctattcaggcggttgacaaaacttcacagaagctatccctagacaacaagttcaacaacagattaattcactcccgtgatagaaatcctcaagcaaagctagacactgacctaaatccctttagtgatctctaactaagcaggcattatggaatcaacatgttaaagtcaataccctctctacagccaatcccttggggtagagtcaggtatctctggaattaataggatccaacgcccattaaacgccttctgaacgctggacgtctggactcatactccacattagccagtgaaataagcaataagcgcaactaatctagaagggattctagaattctaaactcaaccacctaaaacgaccaagtaaaccacaactattctatcccatcctcagaaatacagttcactactcagacataatcaaagacaataacaaagcaacaattgaaaacatgataacagaattgacgaaagacttaaacgaaaactgaatatcaaatacttgaaagcgaaactacaaagtcgcaggagaaacactgcggctatcaaagttgcgaaaatgtaaaagcgagataaaaacggataatagcggatgccttagggaaaaccctaagaggtagtttatataagccaaaaaatgaaacaaataaggaaactaaatatatagcgaatcttcacgtcatgatcctgcgaccgaatgtgtcattggcatcagacgggctgaaatgagcttcccagtgatcgagtatgtcattgatcaaactgggcttcaggggctccgtcttgcgatcgagtgaaatgcagtgaaatcgagattgaatggtccagcgaccttgtgatcgagtgcgatcgagtggatgtcatgagggtgtgatcgagtggttctgatggggtgattcctccggcttcgcgattgagtgaaattgagctgtttgcttctccggggttgcgatagagtgatttgccctggcagagctccgaggctgcgatagagtacttttgctgaaggcgtcattgggcattttgacttcatgttctgtttttcctctgtttgaactccaaaagcatccaaagtacctgaaaacaaccaaatatgccatgcacatgcaatcctaatgcaaaatcgtcctaagtatgtaaaacacactaaaacgactcctaatgagatgaaatgtggatgaaagaatgacaaagtggtgaagaatgaatgcctaaatcatgcaaattatagacatatcaacgattaactcaaaagggatgggaaacacacctaaggatgataattttgctaatggatgaagaaatcaaattccaatgaaagggcaaagcaatgacaccgaagaagaagagcagtcaccaccggagaactgaaatctacaaagctgaaccgccaaatttagaaatcgacaaatccaaatgatatctccgccgttgttctaaccggagaaactgtattcaagaacaaccgatttttgattgaaaatagaagaagaagaagagacatgcaaagagggaaataagagaagaaataaattactcaccaacggcaaagagaaatcgccaaatcctgatgatattgacgccgttgttgttgtcggagaagatgatttccatatcggggttttgggttttggttttgcataatatcgatgaagaagaagaaagggaaaaaaatggaagatgacggcaaaaaaaagacctagtttatttagtttctttgtaacttcttcatttatcatttttatttttacttaattcattattcttatttttttaaagggaattatgggtttaactttgattatggttaattagtctttttacttaagattagagtcattctagttatttttgttaaaagtagagtcaatatgagcaaatttcagtatatatattatgaaagcatatttacatgtttactaataaatatatataattaatacagagataaatacttttttcatagacctttgctcaagatccttcgcagccaatgatataactcttcaggataagaacattcctttgatcttatgcaatttagaaaaaatattttcaccattttttttttgatgttatggaacatcttccgattcatcttcctcgagaagtagtgttaggtggacatgttcagtataggtggatgtatccatttgaaaggttaatgtttcatctaaaacagaaagtgaaaaatctgaggaaggtcgagggttctatcgtggcgcaaaatataaatgaagagactacatatttttcttcgtactacttcgcacctaatgtttaaacaaaaggtagaaaaccatgtcgctatgacgattgcgggaagaaaccttcttaccactctgatatcccaaaaatatttgcagaatttgggcggctcagatagaccatcaaccatggagttgttgtgcgtacgatggatgcaaaaaattacggtgtgattaaagactttttagaggtttagtatcatggactcataaaatgtgtgtttttcaagtgtcagtggtacaatcctactagggaacgtggtgtttgacttacaaaatttggcgttacggagattaattcggctaaaaagctaaataagtatgatccatttgttcttgcatcccaagtcaatcaagtgtgctacattccatatcctagagttaaacgcatctatgatccgaggatcacagctacacaaattaatccaagaggaatagtagatggagtgaaggaacacaatccgatgcaacaaagctatgtagactttattagtgtggttgaacattctcttgaaaacactatattggtggatgttgaaaatcaccaactaaatgatgtaagtgtaggtgtcattcaattcggtcaagggactcatcagattttgatgatcatgagtaaaaatattgttttttatttacttcagttatttttttgtgatggtgttatgtttggcttagctctctatttttgtatagagatgcttacaattgtactctttatttctgaactatatttttaactttatcattgtgagttgtttcaaagacaagcttggattttaagcgttgtgagaccatcattattgatagtttcttaggttagttcttagataaagtaagtcttaaatttaatgttataagtcaattaattgttaagaatggctcttatataagagccaaatctaatgtttcttaggttaattcttagataaattaggtattaaatataatgttttaattcaattaatcttaattcttagataaattaggtattaaatctaatgttttaattcaattaatcttaattcttagataaatttgagttgtaataattattaagttttttaaaattataatgtttctaattttttttcaaattttgttttttaaaaactccaagttaagagtccaccattacatattgccaaaatttcaatctctaaactaaattcttaacttcaaaattttcaaaatcaattataaaaatattcataagaactatgtgaagattatgctaagaaactaccattaatgatgctctgagatctttgttccttctacgatttgcatttttttgttgggttttaatgttttttttgtgggatccgggaaataagaaagtgagagagatggtgaagaaagctgagacggtgttacatgaactatcatagttgagactaaaattatgcccacaaattttaaaggaacatcagttttggagcatatatttctagcttgtgagggagcttgtgagggagcttgcagcaaagtaagtactttttatgccaaaattttgtttgagtatttggtatttggaaagtattttggcagatatgaggtgctagcaatccaacaggctaaaatcaggagcgtgtatatgaagttgaaatgtcataaacaaagcaaaggttgagtacatgatctgcaactccatgaagcttgtgtggcgatgaattgataaattctgtaatattagaaacaactttttttacttaatacaactattatcaatgatgatgatagcactctaaacaccccaatgatttgtttttgcagctttgttcacaaactaaccaaaccaaaacgcagaaacaacggagtttaagcaggacttgattagtgatcattgtcaagtgtttaaaaggtggcaaaaccaagaaagttttgattcttcagatgtgtaaatgatcatgtgaatctagtacgtatatcagacatgaatacaatggtcttaaatgctttgtagacatgaatagtgcatacaaagcataatcctcgtagctcgaggtaccgtaatagactcctgccccacataaccgtcgatttcattgttaaatttgacatatttgccatcaattctttggctagcatacaaaacatccctcactagaacctcctttgtcacttcattctctcacttaaccaaaatcgcatactgtctaaacgcaatatccctcaaattctcaggatctttactaaccaacaaaactccattactccaatccttcttcttaactattccacggcttaaaagcccattaccattatcacttatccccaaatgagtggaagttgattcgtctttacccatatgatctcttccactcgtttgtatcccaaagctccaaactttacaaaaaaaaaaactgcatcagagtggaaactcacatgatatccaaaatttgttgagatatttccaagtaccattcacagcctagctccattgcatgaccaatgatccagaggaaaatcaaaccgtcagtctgtacttgagccttagcttttaaatgaaaacacaacccatcttctccccacttaacccaatttcattcataaacgaaagactaaccacgagattgaaccaatcctcaacatgacaattttctgtgagttagggtccgatctaatcttcttcccatttcccaaattctggaatttgattcgatactctatttttaatatttgtaggccgtatcttctctaataatatttgtttgcaatttcttaagaagcttcgttttttttcctttcatattttcgtaaatctcagaagtaaggaaaaattaaattcgtttcttacactcttcgatgttaccaaagctagttctgcttcgttgtggatagggcacaacaataattgcctaaaatttcttcacgagtgactagggttcttggagtcaacgaaaaatgtattttcctttgaaatgtcttgttctctaaattgccacgtattattttatataaatatataaattactaatttttaaaaagaatttggaccggttgtccactgtattccattaatttaggttggttttaccacaactattaataccgagaacctcttatgttaaccctaatcttcatttagcaatatccacaagtttgttttaccgactcttcacgtctcaccaccgtaactcttcttttctataggtaattctattatttttatatcataaaactggctttgtggatgaaatggtttgttaatttcgtactttgcaacttagtttcgttatttatttcatgaactcatgtagatatgggggacttgggatgactatttggcttatagacgaatgatagacaaaaacatcttgtgatcgagttctcaacagatgagtgactccgatccatatgctagagaaccgtctgaagtaccagagatgcctacaaatggacaaggcttaacagatccagcagatttaatgactcttgaccaattgcttcgatcagcaagccatgcaagcctaaagaaacttatccgagaagaatgaatggtgatggatggtaaattccacttaaaattctctacctttattctttgagttttttttctcttaatatgagactgtacgtaataagattctagagatgataaggtccgtgaatgacttgtattcatggtcgattactttatacgtactagctagctaatatattacctatcagttactttagaaatatgctctaatgtattctaataactactcgtatatttactaacatacaaggtttgaatacacaaaggaaactactaaggcggtgaaaaaaaattgtggagaacaatttcaaagaagtggatcctaattggtcaacactctcaagcgacacccagttacgttggttcatagcttttgcggtatgttttttctatttgttttgtcaaagtttttatgattagtgttacttgatacacattattatttatttgattttcattccttttatttgatcttgtagcaaaagtataattagcgttacgagataacaacactcgttcgccatgagtttgagactttgtgtgcatctcgtttaatgggatatgtccatgaatggaaaaaggcatggaagcaatacaaggagaagcctcaatggatgctaaactctatttgaaaatgagaaaacatcaagagaagcaaaaccaactccaaaaataagaagaccgatcgtggtggcttaagatagctaagcacacatgtgggtcagtaccatatgtccggagaagaaaatagatggaaattttattatttgcatacgatcaattcagtttctttcaaattcaatcaaagttttctataatgacttgtttgtatttcaaaattgtttagcatgataaggtgacaagagagctcccaaatatggttacttttatgaaagcaactcataagagaaagtctaatggtgtatttgtgtgcaaaaaagctgagttgatcgcaaaaaaatgtcggaacatggagcaccaaattctcagtcaaagagataatgacgatgatgacactttggagactaaccatcttacacaaaaagaatttgatgccatttaccaaggggtaaaatgctgaaactttgttttaattatactttatatgattttttgtagaccatactgtatatgtgtttaatactttatattttatgtgaagtaacatgcaattttgaaattctaagaaattcaatggaagaaagccaagaaatttggttatggtccaattctggtagttgatcctactgttgatacatctccaaattatgaagaaatgtatcttgagactcaagaaaagctccagaaatcggaccaagtgattaagggaatgctgctgaagtttaaagatgttgatttttggaaactatgatgtagaacaagtttccaaacgaagttccaccttccattagagcaacatgaacaacaatgaaggtctttagattcaattattaattttgtttcatgaagattttaagcattttggattgtttatcaatattaagtttggatgtttaaatgtttttgagattttaaaatatttaattattatgatttttaatttaattatttatttataatttataatttatttttatttataatttataatttatttttatttataatttgttggtaatttttaaattataaaacattttgttggaaatttagtagaatatatcaacatatattcaactggtaatctatgattgggaaacattctaacataaataaccctataaagggtaaagatttacatggaatgctattaggattttttcaaactaagacttaatggagaatttcataaaaaggtattttggacaattggctgcaaactgggacgcggatcctggatcttttagtcggatctgtatccacccactgatgatatcacgcggatcctgttcaaattaaatttcgaattagtagtaaccaattagacttattgggcccacaaaatagaaagaccaatcctcttaaaggatcttaaagtcttcagcaacatttaacatattaaagaaatctgcagtaaactaaataaatgcaaatcttaccataacaaccaaagttttgaataataagcaaatctttgaatatctatgcggttacattaactaatttcagtaaatgtattaccataacaagcaaagttttaaattgaaatttgtcactacaaaaatcactgaagtcacgcaaatcacgaaaattaccttaccaaactaagcccaaatattctaaggattatgcaaaacttatcataatagtcccacgggacgggttgttacaagtatttaaggaagtttttcagaacctataagactaagcgttgcaatagacattttttctcagaggtaaaaaccattaacaaattttagtgatctttctctgtgtttagtataattaatctcttcttttttaaatcttataataggtataagctggtttgaaaacgggtaatcgaaaagtgattgaataattggaatcagtttaccagagaagaagtgaagtgttagattttcaattttcgtttttaaatcgacattcaattattctcatttactttttcaaaggatctcaaacaaaaaaataataacacatttactttgttttcccaaaagtaatttatgtttgctattttagatttagcaaacttacgtttatatgttttcattttcttaattagtaaccaagtttttttttgtgtgcaaaatacttgtattcaatcaatcaagaaagaaccaaatacaaagaaaactgagatcaaaagattcagagtttagaacataaacaagaaggacattccccaatgccacaaacagataaatagtagaaatcgacaaaggttccatgagagctttgagacaaatgcttgaaggtgatttgacacatgtgaggtcacggtttgacgaaggatcttccatgaacgaatcaatggatgacaagatagtcacagtcataagactatgtaacgttgataagtgaaccatggctagacttctcgtcttgagaaggactacacgaagtagtacagcagcgcgggttcgggcagctatggatttgtagcttgaaggagtttgctttacgacataaagcaggggtttgggatcacttctatgaagatagtaaatgtcttgagagcacatgatccggttcttggagatgatgatacttgggcaagagttgaagacattcaataatattgtcgtagcgtagagatttaaacaagggccttcatggccacacacaaatctccagcaaaaacggttcaaatgcaaggacctataagtcttcaaaattttggaaacaatattcaaagccataggtgcaactaaaatcagggttctcagaagattggagtaaacccgtagcaatgaaagtgatctacgtttcaaatggtgtccattgccattgagaacatatacttgatctaagcattgaccacagggagacaaaggcagtgtcgaaacagaactgaagttaattctttgaagaaattggcttgggccacaacaacgttaatgggccgactaaaaaattcaggcctgcccacagaaaacctaattttgttttcgttggtctaagcgtgtaggtcatgcggcggctcaccagagaagactgagatggttgttgtgaagatcgtgtctccgatggcagcaaaagcggcgaagccctgaagagaacattgtccaaagtggagaagggaggccagaagaagctcttaagagtttccgagagaaaaaccattgcccaaagaagaaaaatgtcgtgcgccgtcgacgtctccatcggccatgacgcaactgacggaccaagagggagacctcttgccatcaacgaaaaccagagagagaactctttagcgtgcaaatggaatttaggtcgagaacaaagttgaatgatgcttttagatctgttctaaattttgaaggtttctggaaaatcagacctgtaaatggatctgcgaccaaaagagcggcgagggagaaaaccgagcaccacatctgtcctttgttatgaaaatttgataagcctgtgagggtaggtgtgttcgagaaggttcgagaattttgaaaagttaagaaaaaattagggaaaactttcaacgagagataaaaaaagagacgagagcagaagcggaaagattttgagacgtttagatcccgacgccggcgagcatttgcattgccgacgtcagacagtttgtttggaagaggcttttcgattatcatgccagagagagttcacgacctcgtaatatgtacgattctcctaatagtaaccaagttcaagtataatcaaacaacaacagaagtgaaatgacaattgcaaaaacgtatcatagtaagttatataaacagacaattgcaaaaacgtatcatagtttatatcatcaactattctaactgacaataatgttttcaaaaagattttaacactaacctttaatatagtttggtccttctacatcgtgtctgcttcaatagaaaacattatctcatttattggaacaacataagaatctggaggaggttgtctcttccaattgaagattcgcctaaaaacaattaattttgttaatactcattcttcgaaagatttcgtaatagctattgttttctaataatcatatcagtttctatcctttgtttatcctccacatatttgaaaatatgaacaaaaaattgtaaatagaagtgaatggaatataaattagctttgttaaaactggtaaataaaatttggaacaatgtacttgatctaacaagttaagattacacccaatcaattttgtattcgttgataaattagtgaaaatcaaacgatgaatatgaaattgacaacaccagatgcttcttggtcaagaacacaattccagtttttatgatctgggatttcaatccacatataaaaattgtttaaaagtataaatctgagtcaataataagcttacctctttaaagatcaaaaatctcaaaacacagattataaacgcagacgacgaagcaactgtctaagatttcgcaatttagacttcgatcaaaggatttgcacccaaaaaaaaaacattagatcaaaggattttattagttttgtttggtaggtgttttttttttagtaagatacatccacaacttatgttctaaaatgaaacaactgtccaaaccaaaaaaaatatactaatgggacagattataacattttaataaaaaagaaatattaatggtgtaaggagaaagttgtcttgggttattactacaatctttatcggcccacaacaaattaactcgacaacactaatggcctatatatactaacttttttttgttttgtaaaatcaggttttaaattaccaaatattaaattataaaaaaatttaagttactaaattttataatctctgaatttttaacattttaattataacttttacacacatgaaatatcctacaattcacattattgccaaactatacattgtattaaacacattaaattgtttattcttatgctaaattaatagaaacaaaacaatttatggtttaaattgttatcaatttatagtaatttatagtttaaattgttatcaatttaatataatttgaagtaagaaaataataatacaattataactattacacaccaatattatgcattaaaaagctcattcactaaaatcaccctacttatttatatacaacattaaatatctcacacttatctttctattgatactttataattactcaaaaaaaaaatatcagtataccacaacttatcaaattcacaaaatgtagttaagattctaattttttaaatattatgattatctatactattctctaattcactacaaatacagaaaccaatttggtagatactattactaataacatttgaggaagtatacaacagttcttttaaaataagaaaccctgcacgtatgtgcgggtcaagatctagtttatgataaaattctaacaattaaatcattagtaatttttcacaaatttacaaggaaaagtatcaataaattatcaacaattaaattatcattaaatttctatgaagtttcaacaaagaaagcgttggaaatgtctcacacaatttcaagaaaacatttcaacaaagtttcaacaaatatgttatcagtagtctcccataataaactttgagatttgttgaatatccgttgcaaattatcaatgacattccaaaaaattacatgttggaacaattcgttaaacacttcactgtaaattccaacaaatgtccaacaaataacttatcaaaaatatccaacgaattggccagattaattactcgatgaaaacgtttccaataaattcacgacaaatacaaacttctaacaatcatattctaacaaatatatattctattgaaaatttattggaaacatataattcctacaaattaccaactaatatggcggttggaattaacctttttcttatagtgaattattcaaaagaatgcctcatggtggtagaattgtagcggtaaaaaaatctaagcctatgtatcaaaattacaaaataagatcgaagagttcataaatgaagttttcatactctcgctgatcaaccaccgcaacatcatgaatatattaggatgttgtcttgaaatagaggtacctctacttgtttatgaattcatcccaaacgacaatctttctcaactttttcatgaagaggttgatcacacattgattacatgggagttacgtctacatattgtcatatatacagctggagctttgtcatacctccattttgttgcagcatctccgatttatcatagagatgtccaatcatcaaacatcttgtttgatgagtattaccgagctaatgttttggatttcggaacctcatggtcgatacacgttgatcaaactcacatgacaactgcggttataggtactgtaagatatgttgatctgactactttcaatcaaacatgtttacaaaaaagagtgacatgtagagcttcagagttgtgcttgttgagataatgaattgagaaatacctttttctttccaatggttgggaaaaaatagaacattggtcacttactttaatcttgccctaaaagagaatagacttttctacattttatttttaaataagaaatgactataacctaggacaagttatatagttataacaaatatttcaaacaggtatctctccagacatggagatttacaaaaactaaattgaagtacttagcactgatgatgatgattgatgactagtcactttccattgtaataatttgggtgaaacaaattgtcatagtttctactacacatactttgcttatattgttgttcaatgattatgatgaatattcttaattattgtttgagacttcattaatacataattttttttatcattttcagatttaggaaattgagatagcaaattcgaagagggttgttgctaaaatacgctggccttcaaatgacctgacctaaaagtttattttgttcctatagacgctaatggagttcgcgtctgagtagatatagtaaaggtaaatgatgcagcagtttggaggcattcttctaagtttaagtgtatggaagatgcgttcagtttcactatagcatggctaaaggccaaagtagtgctcgtctaagctgatgtaagatgcattttgtactttcttttgtgttgcatggttcaaacttttgttgagacttgatacttgaacgaatgaatcaatggttgttttaaaatacttattgtaatagtcagatgatatgtactgtattttatgtagatgtttctattaaattctttttatatattgaaatttttgcaaaagcatatctacgatcaatagaaacaaaaatcataaatatatagcataaaaataaattttacatagaacatggccaaatatcatagctacataatacaaaaattataatagaaatattgttatactggtagtatattattaatttattatcaattttttcatgagttttagattttttttaactagtccatttggattagatgaaagatgtaaaagaagtaatgtattaatatatatatatatatatatatatatatatatatgtttagctattgcagtttaaaataaatatcttattttaactctatcagactatgtctgatttcagaactcatacatcgactagcgaccagcgacatcatacattgttcgtttgtctgtcgctgtattcagcgacctattacagcgacaatcgctaaaaactgtcgatgtgttgttcgtttgactgtcgctataaatagtcgctatatttttaaaatatttaattatttttcgtgctaatgtatattttaaaatcaaaatgtaaattatatatatcatacaccatgcgaaaaaataaattaatatatttatttattttagtattatcaaatttaatttacgttatttgaatttatttttttttttaataagaattattttaacttaattagaactcaaaccccacgtgatatcgcaaagaaatatattataaatttgtttatataataatttctttacaacaaatctaactcaaaatgatgcatattataaatttttgtagttatttaagagtatatatataactaaccggaaaaaaataaccgtaaatattttgacagaaaattacaatataggaaagttgcaataaatgacacaagcgagaaaaacaaccgtcaatatttttttacggaaaattgcgattaaaagacacaacctttcaaagtacaaaaggcatttatttaagtttaatttaatttaattctgtttaatttaattatttttaatttatattttttgatcgataagttgttcgtttgcatgtcgctggattcagcgaccaaaagcagcgactaatcgctaaaaattttaacgacaaaaaattacggtcgctggtccctggcgactgtcgctacttttgatcgctgaaccagcgacaagcaaacgaacaacttttgatcgctgtcgctggtttcagtcgccagcgacaggcaaaagaacaggaccttaaacatcagtgaccttctttaagtatacggaaggtataaaatttaagtataaaattcgttacttacattaaaatggttcgttacttacattaaaatggtcaaaactcatcctctttacaatgtaagaactaacacatcgaatgaacaaacaataccgaaaaaagtttatgggcccatctaggatcattagttgggcctatattgtacctaaactttaactattcaaattagattaaacaaatcaaaaacaaattcagaaattaaataaaaattttgattattgttctaaggagaggaaaaaaaggctcattgtttcttcatacgtttcgttcccaaaaaattgacacagaagagagaaaaccaaattaacaaaaaacaatttctcgcctctactcgcaaaaaccctaatttcatcatcttcctatctgattccaattatttcttctacaagtttccttcttcttataatccatcgtttcttccttctatcgcgtttcacaaagcttgtcgtttttctctccttgtgggttggttaggccaatttgtttcgattgagcgattgaatctacgagacgcaacaatctctttctgggttagggtttcttcacataaccttttgtggtttcttgttttgggcggagtttggtggtttctggaaccctagatagagaggagccttagggtggttaatattggcactggtgatttagatatagagaaagagatttgagagatatatgtgtaggtgttagggttttcattacttgtgaattgtggctgtggcattgaatagaggtgtttggggttttgtccctttggtaaaggatgagtgttctctagtgtgaagctaaattggtcttctaagccatctgtgtgagggatggaagtgtagaaggtgctgaaacaactcatttggattagggattggaattggattcgtcttgtggcctttaccgtggtagggatttagatggtagagaaagctagggtagattaaattttttgtaagaggagctttctctgttgttgttggtggggggtgaagaaggttagagagagtgtgtgttctttcttgtatctgatgaggtacagctttcctaatggacaaaggtgaacactctttagctccggaatggttgagaagttcagggcatgcttctggtggtgggagttcaaaccacctccttgtatcatcctcttctcattcaggtatgttcgagtcatcatggatcatttcattgatctgatctttgcctctttagtcagaatagcgtgattttaactgtttgctatcttgttttttttttttttgttttgtatagattctgcatctttacaatataatagcaggaataggaactctaggagcaaaagtgacgttgattcaattcattctccttttctggatcgatcttcttctactaattcaaggaggggctctagtaatggttctgcaaaacatgcatatagtagtttcaactttaataggagtcaaagggataaggaccgcagcagagacaaggatagggtaagctatgtggatccatgggaccttgacacttctatccctcttagaactatcttgactggtagggatccggatccattgagacgatcacattcaatggttacaaggaaacagggagaacacctgtctcgaggattaacagtgggcttgaataatggtggcagtagtaatagttacaacggaaatggactactttctggacctagcattgggaatagctttcagagaactgggtttgataaggattttccttctcttggagctgaagagaagcaaaatgggcaagatgttgtacgagtctcatctcctggtataagttcagttgttcagaacttgccagttggtaactcagctttgattggtggggaaggttggacgtctgctctggcagaggttcccaatgtcatcgagaaggcttgtactgggtcattaacgtctccaaaagctaatgctgttagcgcgggaactttaactggcccaagtggtcttaacatggctgaagcattggtgcaggctccagcaagaactcacacccctccccaagtatgattcgcatcatcttggtgtaactttgttgtacatttacctctctgctcgtctaagattatgaccatttttttttagggatctgtgaagacacaacggctcgaggatttggcaatcaagcagtcaaggcaattgataccggttgtgccttcagcaccaaagggcttggtaagtatttaccttggtcaatgttattattcctcattcatttgtgctacaatcaatatctgttctatttcatttgtcagagtctgaattcttctgataaatccaagacaaagcaagtggttcgaactggtgaaacttgccttgctccctcaagaaatgccctacaacagcccgctgtcctacttgggagtttccagtctaatcctagtggtcaaatcaaacctgagaagaagctgttggttctcaaaccggctagggaaaatggtgtcagtgctgttaaagaatctggaagcccaagtgctaatacaaacactcgagctgcctctagccagctgatgtccaatactcaatcaacccaatctgctcctgtgagaagtacaaacagcccaaaggagctcaagggagccagtgccttctccatgatatctggccaaacaatcgaaaagaaaccttccgctgctcaagctcagagcaggagtgcattttacagtgctctgaagcagaaacaaactgcatcaacaagcatcaccaccgatcctgttagctcttcaaccagtgcctcttcttctgttgaggtaaaactcaacagctcaaaggatcttatagctagtgacccttcaagttcacaggcaacaagtggcgtcgaagtgactgacagtgtccaggtagcttctcatactagtggctttgaagcaactgacactccagatgaggaagaggcacagttccttagatcactcggctgggttgaaaacaatggtgaagaatatctcacagaggaggagatagattcctttttggaacaggtaaatagacataacagccccagtctctctctctctctctctcatattataactcagaaatattaataatggttatgttctttgttttgtttgatcagtacaaggagctgaggccgttatttccggagagactatccatgatacatgaagcaagagaggatgtagcttaagactcctgaacccaactttacaaaactgaagaaagtactggtttttggaaagatagtttctaatttcttttttaatatatttttcttcttttggtctttttgttcctgagaaaagcttagctactactttggcaatgggagaggagaaaggcagggaggggtttttgtttgtttgttttgatgatttgcaaatagtgcaaataaagctgatgaggctttgagttgccatatgagtgtcctgccctcttcagactttgtagatctttctttggtctgaaaaaaaaatggctcagctctcacacacgtgttcctctttttgtctttttctcttgtctctaatgtttgatgagcaagagttcgctcttaggagaatatataattgcgaaagagtttcttcatcaacacaaaacattggataaacccaatagaggtgccaaacaggccaatccgcaataggcatttatatttgtaagactgcgacaggctggtctgctaagactgccggcagaaataatgtgtccaagtctacccactaagcccaacgtgttagcatgccggcctgcgaacttatctcattgagcatgtacctcgtcttgctgatcacatgattttgagttttcttttctaggtaatttaaaaggtttgcctatttgcgttctctttggacaactgattgatttggagtattttcaataacattcacacaaagttttaacagaaacacacactgatgcaacagaggaatctcgcacacaatgccaaggtgacaagacaagacacaggaatttacatagtagagaaacgagaggaacttgtaagttgtcacagtatgaatctgagtcggagatgaagtatgtgcctgtgcgctactctgagtgcgatgtccaatacattagcccactgtcaaaaaaattgtggtcagtgaccagacaccagagatatatacaaatagattagtataagatgatatgcagtatacgaaaacaaaaaggttaggatgcttcactgattgcaattcaaatcacatttgctaggtttggaagttactgttaccagtacaaaatctattgtgattatgaaagatgattctaacgaaaagttttagtccagatgcgaaaagaagacagccacattagttaagaatggaagtgttagaatccaaaggactatgactaaaattgtaagaatcactaaatctatttgtacaagtttgggtaattttgtaggagtatttgtgttcaatttcccaatctaaaaagcagtgtttagtgtttcaagaaatgcacaaccagaagagtgcatagaatagctttaccttatcaatacaaatacacattgaaagacaccagccacaccagtccaagttgaaggcccagtcttcacaaccgaatcttgaatcagcaagccaacagaagcagctaaggaaacaaatgctacgacatacgctatgaaaagccacagcttcaatctgtagccaagaatccaaatacataaaaacacaaatcagaaacagttgaaactaaccgcaaatgtcagcgaaaacttgatttcagataatgagggttataaacacacaagatttctcaagtatcttctagtttacacagaaatacagattagaaacacttagtaaccaagctcttaaatcttatccttgattaaataactgtatcagcaagccaacataaacagctagggaaacaaacgctacgacatacgctatgaaaaagccatagcttcaatctgtagccaagaatccaaatacataaatacacaaatcagaaacagtttaaactaaccgcaaatctcagcgaaaacttgatttcacataaatgaaacacacaagatctctcaagtatcttctagtttacacaaaaaatacagattagaaacacgaagtaaccaagctcttaactcttatcttgatcaaaaacagaatcagaagcagagcgaatgaaacaaattcaacgacatacgctataaataagcttcaatccaaatccataaaacacaaatcatgaatacttcaacacttatagaagcaatgatcactcaaatacttcaaactaaatggatcagtcacaaaaatcagctaaaatttgtacacttatctcaactaccttctactttccacagaattacagatttaaacaagaagtaaccaagctcttatgttgactcagatcaatttgaaaaactaacctccactcgccttcgtcgtaaggagagtaatcaatgtcttcttttctgacgcaattgaacatcaaagctccgagagaagcgaatatgcctgcgaaatccccaaatccaacggaccaaaatcgctcaaaattcggaaaccctaattgataaattatcgagagttagatatatttaccgggaaggtaatggacgaagggaacttggatggaactgcaaacgacggcgtcgacccaaaaccaccacccggttccgaaaacggcgccggagaatccgggtccgaaaatcgcccacagttctgccaaatccatcgctcgatatgattcgtctccaattggatagatagataaataaaaactttattgttgatattgttaaattattatagtttttataccgaaaaaatgtcattaaaattattatgccaaaagtgtcgaaacaaagcatcaactttacctgtaatgataaaatcatcaaagtaaattattaatttttttcgattttgccaaataaaagatattagataatcaactaacagatcaatttaacgtataaagtcaacaataacattttctgtcaaatagtaaaacaacatcgtttttgtattaaaataaataatacaaaaaacatatagctaccagaatcggaccctgcatctgtggctatgtaactttatttgcgtgatttgaaaaaacactttgcaaacgatgttgttttactatttgttctggtagctaatctcagaatcgattcaccagaacacatagctaatctatcatattctccatatcacgcaaataaagatatataatattttataataatattaaaaggagaaaaaattgatgaaaattaatctagaaattgcaggtcttctgataacaagaaaactgtaaaacttattatctgaaagagtcaatacaatttgttcgatacagagagctctaaaacacaaatctagatcattactctcacaaacccagacacatacgtcacaggcagttacaaacaaaatgcataaatcttctaaagaaagctaagtctcaatatatacacttcacacgtgtgacttcttcttcagcgcacgtgctcctcagcaccatcttcattcgcacgtgcttcacgcctcttcctccttgtatacactattaagggcttatcaataccccctcccccccccccccttcaacatgcagcttgtcctgaagcgctaaacctggaaactgtttcttcaagtccttggctatctcccatgtatcctcatgaaccggaagaccttgccaatgtaccaacgcttctaagagtccatcctcattgtaacgagtctccagcacagcttcaggcacaaccacaaactcattatctgcagtcaacacttccggtaatggaatgacttgatggtggtcacccaaaacctgtttcaactgagacacatgaaaaacaaggtgtattttagaaccctctggaagtttcagcctataagcaactttcccaatgcgttccatgatctcaaacggaccaaaatacttcgctgccaacttctgacacactctctttgtcacagaattttgacgatatggtcttagcttcaagaacaccctattccgtgtatcaaactcaacttctcttctatgtttatcatcgttatttttcattaactgctgtgcattcaccaaatgctctttaatatcggccaacatcaaatccctctgcttgagtaacccttctaactcacaattcttagtagaattagcttcaaaacgcataattggtggaggatctctgccatacaagaccttaaaaggtgttgttttgatagttgtatgaaaagaagagttataccacaattcagccctaggtaagtattggaaccaagtcttaggatgagctgaagcaaagcatcgcaaataagtctccaatgtgcgattcaacacctctgtctggccatctgtttgcggatggaaagcagtgctgtatttcaacttagtgcctgatagtttgaagcagtctttccaaaaggaactcaaaaacgtgttatccctatcagaaactatcgatgcagggaacccgtgcagcttcactacctcgtgaataaaaattctagccacatcaactgcattgaaaggatgtttgagaccaatgaaatgaccatatttgcttaatctgtctaccaccaccaaaatgacatttttttccgtgagaaccaggcagcccttcaacaaagtccaaggaaatgtcttcccaaacctgcgttggaattggtaaaggttgtaacaacccagccggagataaggtggagtatttctgtcgttgacacatttcacacttagcaacaaatttctgaatatccttcatcataccttcccaatgaaatgattgttgaatacgtttcattgtcttcaacacacccgaatgaccacccaacaggccactatgatattcagcaagtatgagtggtaagaactttgagtctttaggaatgatcaatctctgtttcttccataatctgccttctttcacagtataggcactagtcccttgtttagctgatagacattctttaaccaagtgttgcagatgagcattagaatctatttcttcatagagatcatgcaactggagaactgtgggcactgtaaacgccattaacaacattgacgagaatgacccagttggttgtaccattctagataacccatcagccgccttgttatcaaccccaagtttgtatagaatgtcaaattcatagtgcaaaagcttagtgagccatttctgataatccattgacacctctctttgttcctgcaaaaactttaaactcttctgatccgtgtgtaacacaaatcggcgacccatcagatagtgtttccacttttgaattgataacacaatcgccattaactccctctcataaactggtttaagctgctctttagatgtgagaccatggctaaaacaagcaattggtctattgtcttgcattaaaactgcccccagaccattcctgatgcatcagcctctacaacgaacactttaccaaagtcgggtagtgctaaaactggtgcagtagacatagctctcttcaatgcatcaaaagcttcttgggctgactcactccacacaaagctgtctttctttaacaactcagttaaaggtctggctagagttccatacccttttaaaaaccttctgtaatagcctgttaatcccaaaaatcctcgtagttctttcacagactgaggcgtcacccacttagtcatagctactgtcttagtaggatctgttgaaacgccttgtgtgatatgatatggcctaaataatcgatcttggcttgaccaaatgaacacttctttctgttagcatagaactggtgctcctccaaaaccttcaacaccattgccaaatgttcctcatgttcttgctcattgcgactatagatgagtatatcatcaaaaaacaccaacacgaattttcggagaaatggtcgcaacatgtcattcattgatgactgaaatgtggcaggagcatttgacaatccaaatggcattactaaaaattcgaagtgtccatcatgtgtcctaaaagtcgtcttttcaatgtcttcaactttcattcgaatctgatggtagcctgctcttaaatccaatttagagaaaatgatggctccatgcaattcatccaaaagctgatctatcatgggaattggaaacttatttggtattgtggctctgtttaaagccctgtaatccacacaaaacctccaactctgatctttcttcttaaccaataacacgggactagaaaaaggacttttgcttgctcggataataccgttatcaagcatttctgaaactaaaccttccatagcttctttatgagcgtgtggatatctgtaaggcctcacacttatagctcgagtcccaggtaaaagggaaatagcatgctcattacctttgataggtggtaatccttttaggttctgagaacacattctcaaactgttgcaggattttttcagttccacttgtgaacattgaaggattttgtggtaacacctgatggctgttcaagctgacttccagctctttgttctgcagcctgaattttgtagagaaagacttaagagacattttaaaggtatccaactccggatcacctcttaaagtcactgtcctcccatgatacaaaaaggacaactcatgcctctcccaattgaccttacaatctcctaaggttctcagccatgcaattcccaatatcacatcaactggaccaagatccaaggtgataaaatgtgttgtcaactccaattcctgcccacaaccaactggtagagtcatcgtcactttatcacacaagcctaaaccttgaacagtgattcctgtacccaatcttatatgaaagttagggaaataaaattgtgtgtggcaccactgtccaacatgacaacaacctctcctttacaaatagatcctttcatcttaattgttgtataagatggcaaacccatgtatgatgaaaacgataattctgcaaattgagcaactgaatcatggaattcttcttccacgctattactctctaaaacttccatttcaaatccattaatcactgttagtacccgcagctccttattgggacacttgtgttctttggaccaaggtccatcacatctaaaacaaatccctttccttctcttctcatccaattctgcactggatgccgtctagtctctgatcatttcttccaattggtttgtcactaccatgatttgactcagtcattacagacttcatcttccagttgtttgtagctggtgtataagaactcttgtactcagaccaatgtggatctttattctctttacttaccaactgcaattccttttgcaccactcttctcatcacactcgtctccatagaacgtgccacagccaccatttcaggcagattctgtggtttatgcatgtgtaccagttcctgcatttcacctgtcaggccattcaagaatataccttccaatttctgatcatctaagcctccaacctgtgatgacagatcctcaaacctctgcacatattcagccactgaaccagtctgtttgatgcaaaacaaactctgactaggccctctcagcttcaaattcccgaaccttaacatcaatcctgatttcaacttcaaccaactcacaaaatccccacgactgatagcccaattgtaccaactcaaagcctcgccactgacgctaactgataccaaggctaattgttcagcctcattgtaacctcctgaacgaaaaaacctctcgactctcgcaatccacccatatatcccagatccatcaaacattggcatttctacattcttaagtagattctcgcgaattctaggtctaatcacaccacgacaaggttccagttgagaaacacgtacctggttcctatgatcttgcgatcttggaggaagagtttgacttgtaccacccacttcttgcaccgttgcaatacctggcatcgaattgagtaagagctccaacttcctctcaatcgctccgaattttagatcttgcgaacccattttgtcatccaacgacccaatcttggaatctagggttgataatcttgcatcagaacttctgattttacctcccaaatccccaatctgatcgtacacatccgccaacgaagccgcgtgctcctccgcctgagaaatttcacaaaccggagataaacttgattccatcaccattgcaactactatcgtcttcttcgatcgaacaaaaattcccaaacttcagcgttagattcaatccgagatcacgaacgcaccatttgataacaagaaaactgtaaatcttattatctgaaagagtcaatacaatttgtttgatacaaagagctctagaacacaaatctagatcattactctcacaaacccagacacatacgtcacaggcagttacaaacaaaatgcataaatcttctaaagaaagctaagtctcgatatatacacttcacacgtgtgacgtcttcttcagcgcacgtgctcctcagcaccatcttcattcgcacgtgcttcacgcctcttcctccttgtatacactattaagggcttgtcatcttctttgtcatcatatataaccttcgattagtgacgaagaagacctgcaatttctggcttaattctttcatcatttttttctggttttgatattagtagaaacgcttatatatttttgtttgcgtgatatggacagtaacatactttagttcggttggtttagagtttttagctctttcccacaggtgcatggttcgaatccgatagtaggatgatttttgtatttttgtttttaatacgaaaacgatgtcgtttactgtttgacggaagatgttgatgttgactttgtaccgttaaattgatctgttaattgactatacaatatattttatttggtaaagtcaacaaaaattagtgatttaattgaaaagtcaactaaaattgatgattttattcaccataagtaaagttgatgatttgtttcaccacttttggcgaaataatgattttaatgacgtttttcctgtttttatttatacaaaatacgaacgttattaatattaggaaatattaggcaagaaaacactttttaaaaacttaatttggtaatagagcattttaggaggagtatgtattttttaaagttttttttatcataaattcctcaaaagttagttaatcatagttagtttcatatggtttgggaataaaatattattttttgcagttttcctaaagtaaaacgacacgaccaattattcgtcactttgacctaaaagtgaaattatcctggcgactgtgttgaaataaacctccgtatccgttctcaatccgtaattcttctcccgtaaatcatattcgtcttcctagttatccaaaaagtgcccatctaaattccgatcatttccctccgtgaacttataacaaacgggcgacattaaaatccctcatttttacttttcccaccggtcagtaatcaatgacaggtaatcgttttctgttttttttgttctattaccaaaaacagttatcttcttgttttatccatttttgttctaaaatttccttacctattaagtaataatctcttcacaaattgtccctttgattgcaggcgcggtcgaagatgatataattgacaacgatactcgtctccctccaaggcttttcgcaacagaccgttaccctgatgctcgtctcaatatctactcgagacccgacattcttactgtaatatgtgacgttttgaaaggtaccaaggaagtggaaactatcttagactcttgttttggttctctgtttagtttaagggttagcgaatgttcaatctcttgcaaactagttcatgcgttgttatgtagacaattggttacaaaacagaaatacgaactgaagatgatttttggtggacagccattgagattctctttagttgagtttggttatctaactggtttgccgtgtggtgaatttccaaaggagtatgatccagacttcttccctaaacgtgtcattgggatgaaggattactaggatgcgttgatagggaaagataagaatgcaacattagcgtaagtttgaattgagagacaagacggttctttatttgattgaacagattagtaaatgtcataatttcaccaaaaaggagtatgatcttgacttcttccctaaacgtgtcaatgggatgaaggattactaggatgtgttgatagggaaagataagaatgcaacattaacttcttccctcaactaaagtgagtacttccacgcgaggcaggaagggtaagtttgaattgtttgatgatgatgaagcagaagataatgatgatgaagcagaagatataaaattgtgggtgaattcgctgttgtcttctgtaaaacatgaatttgcggagagtgttaagaagttaagatctcagaatctaaatcttctgaaaaagatcaaggccttgaaatctgtcaaattgcccaaatttcgttaccacaagatctccaggtccagacagtcaactagtcctccatttaagaaagtacgcctagcacttaaccaccacacatcgtctgaatctcctgtcaaccctgttgtatattctccaaacatcacaactcccccttcagaaccattaacttcattgcacgagggagacaatgttttatctgattcagtgcatgatggagactttgcagtttcaggagattctgataagattgttgatgatctgtcatggcgtgagttaaaaacacataaggtctgccgcacttgatctatgttaattttatagattggtagatattagtcaataatttattttaacttctctataccacacatgatgagatatccagggagaccaacaaggattcagttgattccccacaaaactatctggtaattgttaattaagttctttcacatattgtttccaaaacattgattatatattctcatattttacttttttcagaatgaaactccatcaatgtttatacccaagtttatatctgctaatagcacagaggtccctacctctcatcaacccatctatgacactgagtcgaaaactagagacgaggtagattttttgaatatctgttactagccaaaaatatttaactattatatacctaactacattttcaaattactatagcatatgccttctcctcaacctcctgctgtttacgataccgcaacaaaaccatcttctattgatgtatccgaggtttttctccctaaaggattttactattactttaagtttcttataatggatgttactcatacgctaatgttatacctcttctatcttaacaaggagattaagattcaagacttgtccttagcagaaaatgttgacacattggttcattcagtgtgcaagaatataagtgcttcaattgctgctctgagtgaagtaggaaaagagagtcttgctatgatagaatgagttccacccattgtcgcacaagtaaccttcaccataatccacgtggactagtttatattatatggattcccaattatggatatacttaacttcgtagatacttaactttatgcccacttttttttatgcgactactttttccttccacatgtaagatgatcaaaaaaaggatgataaaaaaaagaatgatcaaatgtcccaccatgcgagaagcccttaatattattgatgttcgctacgatcgtaattttttattttttttccaaagtatttagtatatattacaacccaactgcaacatccaaaacttggagaaaccaaggtggaaaggcaagagtaagttacagattacagcaatatgtacaacctaacaacaaagagtaaagaaacaacacttttcaatactaagatgaaacacgaaaatggtaactttgtaaaagcaaaagcataataaaactcaataagattagatattgaagcttcaagcttgcaattgatcatatcgcatccaacatttgcatgtattatgattgcatcttattcaccatcttttagtcgtcttagaagtaaaagtatccaaaacattcagtgagcataagcaaacagtgaagctctaccactgagttttaacgctctaatgctaaacttcattgtggcaccaaaaagaattccactcagccacaaagaagatctctaaaaggagcagttattcctaataaactaaaagcgttacttaccccaaaaagaaactatctcaagagcctaaggtaaattaaactttgagttcttgtttaaactgagagagatctatgggggttggcctaacaccggataaaacctaatcccctgatccttgcgatatggcctaatgtagcgctatgtaccagaatcaacttgcttatcctttttacgttttgagcattcaccaatcttaatttttgctttttctttgcccttaaagtcagaataagagctagaaaagtgatgctgagatatagctcttggattaacaagtctggaagcctgaattcccgcatcaaagtaagagtcatgagaaggtaaagatgccggaagaggaggctgtgatattggtgatgccggggatatgtctgaactgtttgagctagtcatatgagtttgatcagtgatagtattagaagcagcagcttcctcctaaacaggtacatcaagtacctctgcctcatcatcatgaatcacaggtgcatttaaaaaggacagttgttgacttgatgagtgataagacaacacttagtacatatccttcaaagcttctcatattcaaactcaatcttagaaccttctctagattcaaaacgaactctccgaaaaaaccgaagacggtctatgaatacaagtctgatcttaacacggataaaggcaacataagttgaagtatcttgattaaattccatctcaagaataggccccaacgttccagctatgaagctcacagttaattcagaaagataaggtagaggtatacctcggacttggacgcatagatcaataaaagtgagaaaatccggtcccaaaaaatctccacctttgtaaggcaacaaacgagtcattaaacatccatagagttctccttaaagcagttgccaagtcaatatatggatatataaattactactccctccgtttcaatatgggatgttttgaggcttagcacagtaattaacaaaactattatttaataaaaacaatcaagtaaagtaattaaagcaattaaaacaattaaagagtaataattaaactctcaaacaacccaaattacttgaaaaaatggagcaactttttacataattaaatttttttttgtgtgcaaccataacagaagtaattttaaacaaacaatttcaaaatttttacatcggagccaaactaaaactttcttgaatcatacatgtttatgtgagtttttaaaaaaaatgatttctaattttcttcacaattccaaattcttatttgagtatgtcacttctaagtgaagagaatgaattttttttgatttaaatgaaattccagaagaaactgtttatagtgatgatggagatgaatttttgtttgatttaaataaaatcccaccaagagaagaaactgttaacaggagcgatggagattttgcaggtatctatatatacatttttgaagccattttaacaaataaatcctggatttggacttatttacaactcaatgtcattagcattaaatctttctccaaaataattaattttactttaaattgttaaccacattatcaatcaaatttaatccaaacaaacttcaaatcaatcccttaaaattagcataaacatatttgtcaacaatattttaaaacaaaattttttgttaaaacaaatattattcttactaaacgttttttgtttaaataaataaatcatgtatttgaacttatttacaatgtcatgacactgacattaattatttaggaatgaaaatattaaatcttctaaatccttgcttttagaattattatgtcattacttaaaaggctcaaaatataaaaaaataaatattattatttatatatctagactttataaaacattattaatatttaaacttataaaaagtttaatatatcataattttttaacattattatataatatataaagtttaaaaaaatcttaattctttccgtcatattttgtgactcgaaattttaaaaataaacatatattaaccaattggcaaaaaatgtgtgagttatacgtcccacatgaactaaaatatttagacaatgattcataaacatattataaataagattcacattaataaaataatggtttatttacaggacgagtttggcgggacgggtttagcaggacgttacttaataacaaatataaagtataaaataaaaatattttatagatagatacaatttgcaaaattttatatatactaactttaaaatctagtctacatatacatttttgcagtcattttataaaataaatcccggagttgagacttatttacaatggctgccactggcttttaattcttgtttttttttggcaataaaattattaacaaacgaaaaacattccaaatatatttcaatctcatacgtcacgcagatttctccaaaatttgaactagatttcggcaactatttaaaacaaaatatatttgacaaacgaaaatacaattgcaattccttaaaataagcaaaacgcacctaaatacattctttatctatccaataaaacttatttctccaaaatttgaactagatttctgtaactatttaaaacaaatatttgtttgacaaaccaaaatacaattgcaatcccgtaaaatatttattttaattatatatttaaattagcgtgtgtaccgcgggtttttttaagggacgggtttggcgggacgggtttggcaggacgttatttaataataattgtaaactataaaataaaaatattttatagatagatataatttgcaaacttttatatatactaatttaatatataaattgtcttcgcggtgtaccgcgggttaaaatctagtctacatatacatttttgtagccgttttagcaaataattcctcaagttaaaacttatttacaagaaatgccattagcattaattattatcaattaattaatattcctaattattagtatttccttatctaatatatctcaatcaattctaattacttttaaaaaggagaaatcttaggactttattaatattatactttattaaagataaatattatagttatttaaaatttataaaatgtttagaatatttaacgaaaaaagtttagaatatatatgatatatgaaatctataaaattaaataaccatttcaaaagaaaaattttaaattgatttgaattagaaatcttttaataaaaatattattagaacaaaaaaaaagtttaattttaccgaactggattagatggtgggatagatttagaatattataatgtatggattttataataattaaataaccatttgaaagaaaaaatttaaattaatttgaactatacgtatatcttttcaattaaaatattattaaaacaaaaataacaaaaacaaaatgtttaatttcactgaacagggttagatggtatgacgggtgtgggtcgacagtaatacaagacgatataccacaagtgaaatccattagatatgcttagtttcaatgaacgggattagattgtaggacgggtttgggtcgataataatatgatggatcgacagttatacgagacggtataccacgggtgaaatctgttagatatgtttagtttcactgaacgggattagatggtaggacggatttgggtcgatagtaatacgagacggtataccaccggtgaaatcctaaatataacaatcaaaatacaattatattatcttaattaataaaataaatataatttaaatttaaattatttagttataatttagatattaacttaaaaaactgtacgttattgctcctatattttaaatagtaaaaatcaaacatagtaattgtatattaaataatatacaaatataaactttgtatattcagaaaatataaaacattaaatcatatgtatattttaattgattaaacaaattatttttttattcttaaaagaacaaattagtctcgcatgtatcgcgggttaaaatctagtttttttgtattaagctatgccttttctaggaaaataaatcatggacactttaaattttctttttgcataattaaaatgaagtttgttagtgattaatttttagttcctattttttctcaattagctcccaatcattaactagttcacgttcgtattcctttttggaagttgtaactacatctcgaaaaaaaaggaacattgatttaattattaaatgatatgcttttcgaaaactaacccctatacatttatcttttatttgacatgcatgtcaattgtaataattactttccatttaatattttcgatatgtcaatcaaagaagtcaaatcgatggttttaccgtgtttcttagcgcgaaaaccgatgtaatcaagccacaaaacgaaaaatggctccggaggtgaccaaaggtgcgatatagggtttcgtttgctagcttttgttccgttttttccgaatagattagggtttcatatcgatttagttttcgttttctaataagggtttattcgaatcgaatagggtttttgtatatttctgggtttgacttggtttatgcttgtttgattctgagtttctaaaggttggatatcgatataagggaacaagatttcactggcttgttcacttcttcttcgttgattcttaaactacctaatttcttagcttcttattttgtcaagcacatagaaaaagtaatctccttttcattctatccgtgagaaatcttgtttttatttccggaaaaattcgattttttctttgcttatttctggatttgaattgggtttatgcttgtttgatcttaagtttttgtatgtttggtatcgatatagggtttgaggatggatactgatccctaccaggaattgaggatggatactgatccctaccaggaattgaggatggatattgatccctaccaggaattgaggatggatactgatcatatgacatacgaggtatgtttgtcaatatcgcaagagaagacaaaaccttataagtttatcttatcatcttcattgagtgtgtttttttggctctgcacagcaacttctacagctgtgtaacagtatgggctatgagaactctagtgtaaaagcaagcaacatagaccgttgttttcgaaacaccaaaccctccgaatttcaatctcttgccgataaaatatgctgcatctgtcaggtaaaagtccagattgagtctttaagaaagattattacagaaatgagatgcgttcatatcctcagtgtcaattgattacaggataggtttcagaggagagctggggttggaaaattgaattgtgggcacaacttccatatcaacagcgtgaaaccatggatattgacgaagaaacagtgtccggtgtgtcagaaaacagcacacgatgatgaacatcaaactcaatcatatcaagtagagacaattgtactaagcgatgatgatgaagaggacatgaacagtcgcgatcaccaacagtatgatccagagcaactgttgttgttctatgaaatccctacaggaagaacacacagaccattctctctcacgagtatgaggaagtggtgggatcaggggtactttgatggctttccaaatttgaaatttctaccctctttaaatttttaataaccattttacccctatttggaaattgttttaacttaacaaaatgaaatattaatattttttgcctaaaatatttcaaaacaatttataatgatttttaaaagcatttttttggctgagaaaaaatttgttactaaaaaaacttttggcgggaaaaaagtttggcggaaattttttttggcgggaaattttcaatttccaattacatgtttctattagatgacggtaatttggtcattttgttcaagggaagatgtatttttaaaaatggacaacataaaagggtattgttgcaaaaaggtagtgaaaaagggtagttttgcaaatccatcccgccatataaatccgtcccgtgataactaaaaatcaaattattcttattctttttctttttaataatgtttttatttaagatacttcaagtcaatttacaatttcaatctaataagaaaattgtatactatttttatctattttttatatcgaattctttgaacaaaaaataacaaatttcttgttaaatattttgtatcttttaaattaataaatttcctatttgtatttattatcttcaatatatttgattttgatatattatatatatatatatatatatacacttattgtttatatttgttgttgagatctttttagtgtctatttttgtttaaagatatatatatatatatatatatatatttaatttttttttattttgttcagaaaaagagcaaatatgtatttcaaaaatgttaactagataaaataaaactgttaagtagataaataaattaaaattatttttgtaacatggtattataattttctcaattaaaatttttgcaagtattattagattgacaaatagtgtaaataagtgtaatgtatgtatgtgacacttagggttctaatgaggattaaaatattgcatgaccatcagggcgtagtaactataaatcttttatcctaaattaatttgtaagtgcactagcaatcatagtagtatttagggatataatttacaaggataaagaagatacacaaaagacttccgaaaaacaaaaataagttaggataaaaaggaattacatgaactcaaggaggttttgcaggaagaaaataaaaataatattctcttcttaaggtgtgttttggtccatttcatcaccgaacgagcctctaaataaatattctcaccgaacgggtctctaaataaatattttcttcttaagctgtattttggtccatttcatccttatattgctcactttagtctcatgggtccaaaatcctaaaaagtcgtatttatagtaagaatgatttgttcttgaataaaagattcaataaaacaaataaaatattcaggaactttatgaccacatcggtcaagaaggtcgtgtctaggctgcctgctacagtcacttagcctctcacccttgtaaacagtcataaatcttgccacaatactgaacttaattaaagagaattgacacttttacccttaaacctagttggagcctataaatagtgaaacataagatgaaaatcctatgatcttttagagcttgttttcattaccttcttcacacaacctccaaggttgaagttgttgtcccttgaagatctactcttgatcgtcattgttttctcttctctattcttcaaatatttcataaactacctttcgagagacgagttatcttctgtgacaaaccttgatccaaggggttcagaactctacccggaacaacctaatttttgacataatgttaccaatccttggtgttgatccctgtgatagttgagtaacatgacttagagcacttagcgaatctgatcctaaagtgtcgaactatgtgttgttgcctacgaaaggtgagtagtagagtatagggagattttctggtttgacctatacctaggctaatcgtttatttgccttttgtagttgtaaactagaacgaaacacatagaaaattaatagataataaccctactttgtcgagaaccatgataccctgaaaaactttcctttatttgctttcttatttcattgcattagtcattgggaaacacaaaatcaaaactcctaagattagttttgtcttatccatatcttcttctatgaattcaatatctctagctatcactctctgtcggatcaatctttaaatattactactaattcatgtgcatttccagttaacgtgtggtctctaaagtaaaaccttgagacaaaattaatcgcatatcagataacacacccatgtaagtagaagacgttttgttctcgtcaacaattaattaagcaaattgaagtgtccataacatagtgaatagcgaggagtttccagtcatatgatgggaagccctatataagttataacatctccatatatcttaccaaaaaccttcttttgattactacctccacatatcttttcagcaaccatcatgtgaatcaccttttattgcttaggtgagaactcgagaaatagaggcattagaagattttgtgtgtgctacgtaagcctaagctaatccaagacctatggtagatggacctcggtctccatgcaagctttgaaaccatattcgaacagaccgatcattctatttagtccaccattcaggatagccatgtaaatgcgagcaatacacattcttgtgaccaaatttgccacattgagaacagagaatctgatctctgttttacttgttccttgttaaaacatatattttggtcggataacaaaaccagtggaatcaccactcaaatcacgatgtgttgacattagatcaataacaagtaacaaaataaactaagtcttcatgctacgtactcgcatgactttgcatagaggattctttgttctttatgtttcaccttcgaatgggcttgtgcaaggtgtaatagaagttcccaactaaccaacaaccaatttactgaaatccatgattctatattagagctattaactaccagtttggacaaagtaccatcaactaaatccatcttcttattggctcgaagggtattaagcatcgtgtatgcctattcgttgtaattttctccattgagaagcattgatataattatcaaaccaagattttttagaaagaataaaaaaagaaaggcgtcgtggaatcaccactagctacaaccgctaatttacaagcatggagatttggagatttgtatgtgtaacattccggttttaggaatataataatgcatgtagatagatttgaaagaattgatttggccacctatatcatataagttcacttatcttttcgatcaaacatcctgagaaaactctacagttaactgtttcagagcaatattaatggggtcaattgataaactctttgaggaaatctgcttaaggttagcttcaaccctggggagctatctaccaaaagcaatatttcgatagaagaggggatcgaaatccttgaggaggaatgtaacgaggacaagactcctatcttggggactatgggaaggaacccttagcctcaaccaaaacggtggaaatgagtgaatttttctcttatctgctgctatctgaatcgactaagtgtccaggagaagaggaaattatttccaccatctcaactgaagcaaagaaatggactgaacgagcaagactgaccacggaaggaacgacgaccgaacaagggctagaacatggtggagcagcagaggaacttagacggacaaggaggaagagcaaaggaaaggagctttttcttcttcttagccattgtggctttttcgtttgtcattgtgaggccagccgacggcgacaaattagggtttggtgacttaatgccgaaaaagtcgcctttttattgtcgaaaagataaatatacccatttttagttactatcctagctggataaattgctggataacatttaaaaccgtaatagtccgttttgacatactcatgcacttataccacagctgttcacgtttagttcagccaaaccataggtagctacagtaaatgtgattttctttaattggatttagaatgtcttactaaaaattttataaaaaaatgcatgtgtcgggtcggtttaggttgagctgtgcaataatgcagaattctgaacattacgaagtaattcttgattgcttttattaactacggattacaaagtgtgatataatcaattcagactgtctcaaatccattttttattttttttcattcttcattttcctttgacacaaatatgatgattaaatctacctttaacaaaaaacaaacatcaaatttggtgaaaatcatgcaataacgtcttgaacaaatcatatatgaaaaaggacgataaaatatagggcttattgtcaaaacaggtcattttttattaaaatctttgattttgagatcttttgggttgggctttgaaaaagagtactttaggctagcgagaaagactattttacccctatcaactgtatcttcttctttgttctctttttccgaccaccaccacgtttcctccgccaaatttttcagatttgtttctgttatattcgccaccggattcttttgtttcgactacgttcacaaaaactaaaccctaaaggatagtgcacatagggaacccaaggagaaaatcaaacgaattgagagtattcatcttcttcctctctttttttctgtcaaattgtgaagtagataaaccaaacttgtctatctaatcgaaaaaatgatataatatatgctaatttacacaaacccaaacccaaaacaaatgcttgaaatccttttcgctaactttctaatggcttatcagtttccaattgagaagcttaaaatctcttcttctttttttctgcaattttgaaagttggtgtattaaccatgaattgagtttgaagagaggaaggagaaactgaatctgacgacagggaggtgccaacaataacagagcaaacatgaaatttgtattgaccatatgataagatgtttcaatgtcgaatgaatgagttgatgaagcaagggtacaagcgtcatttcatataagaaaaagtacctgaatttgtaagtcatcatgaaagtacctaatcttgtaagtttttaagttttttaggcattctagataaatatctctaaaatatatgattggtaatattgaaagacaaccaaaaattatgatttaacgaagaagaagagagaagaagaagagagaagagcataaagtatgaattttctatttgtacaaactatattaataactaaatttataacaacaaataagaagcctttttttgctaattaaagctttttttgctttgattgatccaaactcaaacagttgtaactttcagctgatgaactccattggtttgaatctgcaaactccgtagttgacaaccaccagatctcctcttccaaagattctccgccgctttatctccggcgccaccgtcgtgtgtctttttaaccaccggcaaaggtgggtccaattcagcaacgtcgataacatcaatctttttgttaccaaactcctcctttcttattcttccacgactagtcctggtagtggtggtagtgggagcggagaaagagagattcttgccggagaaaagacgtttaagcttgaagtaacggtgctgagcgacgggggtgatggaggtggaggtggtggtggtggtggggaagccggtgatcttgttgctacgtttgacttgaccaatgcagctgattttgggagataaaggatcggcttgttggtatgagtcatcttgatgtgatttagccgggagggtcacgttcttgatggaaggtcttgaacataacattggtaagaaagttggtctttggaactgaacactgttttgtctcgtctccatcatcttgatcttcttcttgattactcttaagacacaagagagatgaaacttcttgatttcacaaaaggacttagtttcttatttgtgtgagggagagaaagagaaataggagagtttgggtttgtggtagttggagagttagaaaactttgatggttacttaaaataaggagatatagagaggctttggtcaaagtggctttatcattagagcagacatgtcattatttttgggtttcacactcacaatcactttcagatttctttccagaatattggcttcttcccaatctggtaaattatatggcttctctatttttttttatataaaatattatctcttcaggaatatctgcttttttaataattgagatttcctattggcttgtaggtaggaaatgaaataattgagaatattgccatttttgaaagttataagaaaatattcacgtcaaacacatattcttactcaaatatcattctactcaaagttgcattaacaaatttcttatatgctgtgttaaaaggtttagtatattataaccgatctatttcatttagatattatagttgattaaaaagaatagtaattatattagttttgtatttattattataacatataagtacgcagtgtacaatttaccatgtaaccattgctgacaaaagtgtaccaccaaatgtaagcatcagcttcaaactttgcacgaggaaatgggacaatgcttaaatggaccgctaatttaacattacatcagccagttcacattgacactgttattaatcacaccaatacacttctacagtttttttcattataaaagattttaaattataaatctgaccaacgaagttattaaaatttggtgttagcatgtggacatagatatatattaagacatactattattattttcatacagttagatccgaaaaacacaacaaaaatcagtatcgtagaaaaaatctacgagccaactagtcctaagatcaaaataataaattctaattttgaaaattcaacaaataaaaacattttttgtggttttttatccataaaatatattatgccgatttgaaatcggattttgaagtatgcagtcaataataacagtaatttagaggaatacactactagtaagttttatttttactatggttttaaatggtaacttcaccgctatgcggtgacggatttacgttggaagaaagtatggcatgtgccccatacacatcctataatttttactttatcatctagttgtttaaaatatctattagctaatttggtggagttgcccatataatgtgaaggaagttgggttcgatccccaactgcggatcaaatatggtgcaaatacggtgcggttccaataataacaaaatattatatatatatatatatattttttttttttctgttactattagaaccgcaccgtacttgatacgaagttgatccgcacgtctctatttaaagcatatatttaactagacgacatgaatttttttcttaaacaaccttatgtaacatgagatgaccaaaaaaaaagaccacgctacatgtaagatttttttttcttataatgagaccagtcattactaaaaaggagcatgagcatgaagtacgaatgttcaaaaaaataaataatgaaggctagttgtgccctagttgtaattggttcttttgagtctcacttaaccactcgcgtgaatagaaacccatcatttattcattttgatgcctacatttattgagcctgcaaaaaacatattaaatggttatagtatcattaagatttagttaattttaattgtagaaagaaggcctaaccataatggctccaagacatgtagttctattctatcttttcccaagaaaggtacaaatttgatggtaaaaagttaatgaattatgtactaatgtctactgtctttgtccccttcttcctatacacttcagtctactttttcattttataatcactgttgcattattcggatctctccaaaataattatttctcatagccacttagtgacattttataataataaatatcatgtttaatggtgatctataaattattttctatataacaaatgacatattttgaaatttactataaaaaattacaactgagatggtagctttatctttagttcaatttagtgtttctcaagcttataaattcaacgcttattaaaagtcataaaactaacaatttcatggtttgttggatttatcatttcgtgaagagtaccttaacaacgaacatcactgttgagtgtggatagatttgtactttacaatttacagattttcatatgtaattgcgtaattttctcaaacttttacgtttttttttttcttccaaaatctaagattcagagttgtcagacctcatgtatacagatagtctcagccattttctagaaaagattttgactgaccataacaggaaaaacgacttagttaaatacaagctt

SEQ ID NO: 1179 - DNA, 68947 bp, Arabidopsis thaliana
  modified_base (2643)..(2702): a, c, t, g, unknown or other
  modified_base (5579)..(5638): a, c, t, g, unknown or other
  modified_base (7446)..(7505): a, c, t, g, unknown or other
  modified_base (9910)..(9969): a, c, t, g, unknown or other
  modified_base (14295)..(14354): a, c, t, g, unknown or other
  modified_base (19962)..(20021): a, c, t, g, unknown or other
  modified_base (30842)..(30901): a, c, t, g, unknown or other
  modified_base (39162)..(39221): a, c, t, g, unknown or other
  modified_base (45206)..(45265): a, c, t, g, unknown or other
  modified_base (51234)..(51293): a, c, t, g, unknown or other
aagcttcttgatgtttggtttcagttgtcttctgtctggaaattcaaaagaagaccaaagatgccaaaaccttgtcctaattcaacagtttcatcacattttggtctgaacagaggtaagattgtgtctgatactgaactatttgaattctatggcttcccagtttcttggattgttcatatgattttaggtattaatgtgtttgatgaaatattttcagaatcatctgctcttgctcctagtagtggttacttaatcgtggaagcaaatggcggtcttaatcagcagcgttctgcggtatcatcatcttgttcccttattgatttatttgcttaaagcaatataagtcaaaacatatcctaaagtttttttgtattgcttcagatttgcaatgctgtggctgtagccgggcttcttaacgcagttttagtcataccgcggtttgagtttcacgctatttggaaggattcaaggtaagaagccattaaaattttcattaccttttcaagtcttgttaagatattggactaagaaaatgcatatttgtggcagcaactttggtgatatctatgacgaagatcacttcatatcaagccttgaaggttatgtgaaaatagtgagagatgttcctgatgagataatgactcgttttagttacaatgtttcaagtattcctactattcgtgttcaagcttgggctactgtgaactactataacggggaagtttatccggttttaaaggaacatgggtaggtagactttaatctttaagcttctttacttggcttagctcttatatctctcaaggcagtgttattgttttattcgattcagggttattcggataactcctttcgcaaatagattggcgatgagtgttccaccgtatatacaacttttgaggtgcatagctaattacaaagcattgaagttttcttcacctatatcaacactagctgagaagttagtcgatcggatggttgagaaaagctcggcgaccggaggaaagtatgtctcggtccaccttcgatttgaggaggtaagtttttgtctttgatttacagaatcactttgctttagtgatagtttagtattagtatgctttagagagacaagataaataaaaagccttggttttttaggacatggtggcattctcatgttgtctctacgaaggtggaagagctgagaaatctgaaatggatgtgattagacagaaaagttggaaaggaaagttcaaacgaagagatcgtgtcattaggcccgaccttaaccgagttaacggaaaatgtccccttaccccattagaggtaaattcattgatctaattcacatttcagtatgttattgagctttgttttctaattgatgttctcacgttaccataggtcggtatgatgctccgtggtatgggatttgataacaacacttcgatatatttggcctcgggaagaatctaccaacctgagaaacatttggctcctcttcaagaaatgtttcctcgtctctacacaaaagagtctcttgcaactccagaggagcttgccccatttcaggtttttactttgacttcattagtctaagcaaatctgtttggtgtcaaagtcttatattttcttgttgctctgattatttagggatattcctccagaatggctgctttggactacacagtgagtttgctaagtgaagtctttgtgacaactcaaggtggaaactttcctcattttttgatgggccatcgaagattcctcttcggtggacatgcaaaaactgtcatacccgacaaacccaaactcgttctccttcttcaggacatggaaatgaggtactatacatcttcatttcctcgtctcgacttgatatagttgacatgaaagaactaaagctcccatgcacacaagagagacatatattgagcagttttaacactttttatgactaagagtttgtacaaatatttcctttgaatcttgaattaggtgggaagttttcaaaaaggagatgaaactgatgctaggggaaagcgatagaaagggagtgatggtaccgagagtcaggaagatcaaccggaaaacttcgatttacacatacccgttacccgaatgcgaatgcatcttccatttgtcttccaatttttcaaacaccggaaacattttgagccttggagctcttcatccatcttccaacctcataagttctgcaagactatagtccctgagtcattttgacccttacactgaagctctgagccaagtcctgaatgtttttttgctcttgacggaagcgaggaatcagatattcttacgaggagattgagttcacataagtgtaagaactctctaggattgaaagctgtgttgcttgctacttctggttaggagttaggacagtcacaaaaacaggggtgtgattttctgtacttatgttgttatcttttttgtgcattacttacgttgtcactcaaattgttcaagtgtatagaaattttacatcgttctggtgggattttttttgaaaaaaattcattgtaatattccctaccttcggttccagtagtttttacattcaatcgatctcccttctgcaaatgtagtcctgggggttcggttaaccaatcggttatcggttctattcgattnnnnnnnnnnnnnnnnnnnnnnnnnnnnnnnnnnnnnnnnnnnnnnnnnnnnnnnnnnnncccccccataatcactttggtccccccattgcaattcccgaactcaaccatctcatctctccaactctcataccaaagcatcctcatctcgaatccttacaactctctctttatctccttcacttccctttcttatcaaaaactttttgcaatccatttgtttcctccatcattcaatctcctaacctactgaattttggttttgagtttcccccacttttgttctcaatgatgaacatgcgctcgcttttgtcaaggattcggaacaaagctctctccccattgaagaggtacccaacaccttcttcgcatgcagcagctcgaggaccttctgaatcgtcacccttcgggtcgagcaggagggaacaagcaagtttcgagatcgatcacagtgaatcgagccaagaggaggaagcgatgcaagaagaggagactttcagctctcctgctggaaatactcgatcccgaaggtcgagtaagcactctacaagggaattctcgaggaacaaatcagacatcactcgaggaaagaagcccgtggggaggaggttggaactggtagatgaagactccgacgaagaaatggcttcaccagaggaagatgatcaaacagagaaaggaggcaatgatgatttggaatcagagaagtgtgcaactcgaaacgagtactacaaactactgaagcgcaatgagtttttaggaactcgataccctcatcccgagaccatggagagactcggcatctatgatgatgtaaactatatatttaagcagtgcagcctgaatattcatatgtttcggccaatggaggggtatgaggaagagacaatccagtttctttcatccgtggaattgttcttatatggagagtcaaaggacgatgaaatcaggccagacggaagtttgggatacttggagttctgtgtgtatgacgtagagtttcggcttccaatagagcacctcgagctgatgtatggatttccaagcggaaaagacacaaatcatcgttttgacaagagaaagcttcagtcattctgggccacactagggtctaagcaaggattttcattctctaggaccaagagcaacaagataaggagtctggtggttagatactttcataggtccttggctagtgcgctatttgcaagagaaaggaatggaaccttcgtcaatggagaactagagctgatggagacagcgctgcaagagctgcttggtttagcatcagacggtacaggtctagctggagatcagacagacacttccgtctcattcttcctaatcgagcacctgctgagttacagaggatggactaagggacttaagaaaccaggaagaatggttgtgggaggagttgtgaccccaattctaagagcacgcaatgtacctctacattcaaagtcgattcctccgagatggattgatatgcaacaccttatcaattccaagagtttttggtcacagcagaaaaatggcctatataagtataggttcgatcatcctacagcaagacaatctatttttctcctcccaaaccccgcttccacttcgatcagagatggtgacaacattgagttctgcccaccaatggagaacctctatacttcaggtgatgaagctgtaccgatggaaggagtgaatgatgatgaggctccaatccatcattctgataatgaggcagaacctatggacgagtcttacgctacacaacagttttactttgaggagtactcagcaccaaggcaaactaaagactcaaaggagattcacaagcgccttggtttcctcctaagttggtgtaagttccacgacaaggctctcgcggcactcaacaagaagtttaacaatctccaactcaagatcagcttttcttcctcaactacagcaatgccacagaaaatgccttttgggagaagcggatccactcgtcacgaacctatgcattttgatctgccttcaccaccaagacagtcttcatatgaaccaagggaacaccatgctgcaccttcaccagcaaggcaatcatcctacgaacctagagaaaaggaaaagaggagcaagttgaaaaagcgaagaagaacaaagaaatcaaacgctggagcaagccactctaatgcaccacttgaggagccactcgatcaacaacccgagcaaagggtcgagcatccagctaatccaagttcagcacaaacccgttcctcggagttacttaaaggagagtatcgatgatttcgtctcctcttacttcacctgacaactgaggtaacactacctcagccattgtacataccattagttttttttttttttttcttgtgtgttgtttgttttagtcttgaattctctttcagatttttattacacaagggactgtataatttaagtttggtggagggttcaagacatgttgaacattgtgttctcttttcttatttcaaattttgcatcatctaaggcatagaaaaaccatacaaatttgaaaatttttcagaaaatgatttcatcaaaatcagagtgtcatgtagattgcatttcattttaggattgtatatagagtgtttgcgtttaggattgctcatttgcataggggataatgatgatttcaaaccgataagcatgttttgattcaatgaagtaagttcaatgccaaggttgttagttctctattgcataaccgattgtatctctgaagtaagaccgcaccctgctttgaatttgtaacttgactatactactttgatcgaaactcgcttatctgatgccattccctatctattagaacctgaaatgaatttgaaattatcatgtttatgcattgtttatgaactcatggctaccatatacatacttggatcatcttattcacttcatcannnnnnnnnnnnnnnnnnnnnnnnnnnnnnnnnnnnnnnnnnnnnnnnnnnnnnnnnnnntttgtggtattggacgtagatgaagaaggcaaggatcccctggatcctaggtagaccatttcctttagcttccaagctggagcccagtcatagaatgtcagggaatgggaaaaattaatctgaaccttgaaaaagcatcaagatgaagtttgacatcagagaagcttcaaagaaatcaacaacaggaggtcagtgtttaggaattcaagatatggatgttgatgaagaaacagaagctggaaccccaccaagagttaactatacttctcaacttagcaagctgaagaggacttttgaccacaagaagagagcaacagaaaggctagcccagactgaagatcctacagaagatgactggtatgagatgagaaaaaatttaaatggcaaagcagagtcatagaaggattatcttcaagagtgatgaagctgaaaaatcaactatggatgtttgaaaaaagagttaaaaagttttcaaatggtattgacccagagaagacggaaactgcactagccatcaagggggacaaaaatttcacaacagaatggtttgcaccagaagatcagaaaggagttcacttagaggaaagaagcctagagagcaagttgttgagtgaggaggaaacccctactctgacatattctccaagagtgcttaaacagcccactaacccctctactgaagaagaacacttgacacttggttctgttactgaagaacttctggaacacaggatagaatacaaagctcaagaggataccattggggagctatcttacaagatggaaggactgaaccatgcgatcttggaacttcaagaaatggttaaaggctacctcagttttgaatttgaggattggtcaaaggcgcctggttcagaagaagaagaatactctgctgattagaaagaagcttactttgaagaaaaatcaaatgagtactcatcctaccatatgtcaagagaggatgcagaatatgtttcaggaactgaaaattcaaccactgaagatgaggacttctctgttcctctcttcaaccttttttctgactaagcactgtaagagtcaagcttagtgacttaaaacaagctcacttgggaggaagtcccatgtctatccatgtatataactttctatttttcttgttatttttgatatttttgtttaagtgtttcaggtttgttttagagaccctaaggcagtcaacggtcgagtaaattcaaatcaagtcaagaaaaatctcaaccgttgatagagtagaatgagaaggagtatttttagccattgatttgaatgaccaaatgagaggagcatcaccgccgtttgatcgagtgatttcttgcgattcattctggtccgtttgatcgagtgattgaagatggagcatttctcaccgttcgatcaagtgaagaaaccaaagagaccctctttgtagacaccgacgccttgtgacccgcctccattgaaacgctgatgtccctttgtcttctggtccccccaaaaaataccaactagaactacatgaaacactatctttgtcgttacgaacctaacactttctaccaagctaaatcggaataagacctcacaaacactcacaagtgatataggacttgaaagaaagtctaggtttgggtttgggttaactgctctaataaggagagtcagctacttggattaacaagagtgatcaaaatgaataagaaaatccaagtattttatggtatccatgagttcaaatttgatgcagacatgataattaaagatcagattcaggttcaaatttatagggaatggtatcagatcatgannnnnnnnnnnnnnnnnnnnnnnnnnnnnnnnnnnnnnnnnnnnnnnnnnnnnnnnnnnntgtttaagctctggtctatttccttctcttttgggagacaaggcacaccattaggagaagactctgcccccagaactccatcacctcatgggacgattgtaagaaaatcttttcttgccaagttcttgtctaacgctcgcagcgctagattgaggaacgagatctcaggtttcaacaagaaaaacaatgaaactttctgtaaagcttgggagaggtttaaaagctacaccactcagtgcccccatcacggttttaaaaaggcttcattattgagcatactatacagagaagccttaccaaagatcagaatgctatttgacaccgcctccaatggaaacttcctgaacaaggatgtaaaagaaggctgggagttggtcaaaaatctagcacaatctgatgggtgctacaatgaagactatgattgctcaatgagaggaactggaggaagtgaggataaacagagcaaagatatcaaggctctgaatgaaaagttagacaagctatttctggctcagcagaagcagatacactacatcactgatgaagagcacttccaaatgcaagaaggggggaatgatcaaactgaagagctatgctacattcagaaccaaggagggttcaactagggctacaacaactacaatcccaacccgaacctctcctacagaagcactaatgtagctaacccccaacatcaagtgtatccacctcaacagaatcagtccaagccttttgttcagtacaaccaagattaggtccttaaacaacagttcaatggaggtttccaacagcagaatccaccagggttcactcaacaacaacaacaagccccatcagctccagatcctgaaattaagcaactcattcaacagatcatccaaggacaagctacgggagccatggcttttgaaaagaagatagatgaatcacataacatgatcgattgttcttacaacgatcaaaatgtcaagttcgaagctctgaattcaaaaatcaaatatgtggagagaaaatttgcatcaatctctgctctgaagcatcctcagcaactaccaggaaaagcagtccagaatcctaaggactatgctactgctaatgctatcaccatccaccaagaagatgagtctccaccaagtaatcaaactctcaatactgaggacagtataattcaagaagggggggattcaactcaaattgttgcacctgccaccccacccagcaattcatctggaccataaagcacacacctttgctgaacactcaacattctgaaaaaatgtccaaaattgaaaaactcaagaaggatcagaatctagagatgattagcagtgcctccactcaggaaacatacaagaagaaagtcatccaagaaaagcttgacgctcccggttcattcgctctgccatgctctctaggaccattgacattcaataggtgcctttgtgatttaggagcatctgttagccttatgcctctctctacagctaaaaggctagggatcatggaattcaagttctgcaacttagccttactcttagctgacggttctgttgcacatcctcatggtctaatagaaaatatgcctatcaagattggaaatgttgagatacctacagattttgtggtattggacgtagatgaagaaggcaaggatcccctgatcctaggtagaccattcttagcttcagctggagcagtcatagatgtcaggaatggaaaaattaatctgaaccttgaaaaaggcatcaagatgaagtttgacatcagagaagcttcaaagaaatcaacaacaggaggtcagtgtttaggaattcaagatatggatgttgatgaagaaacagaagctggaaccccaccaagagttaactatacttctcaacttagcaagctgaagaggacttttgaccacaagaagagagcaacagaaaggctagcccagactgaagatcctacagaagatgactggtatgagatgagaaaaaatttaaatggcaaagcagagtcatagaaggattatcttcaagagtgatgaagctgaaaaatcaactatggatgtttgaaaaaagagttaaaaagttttcaaatggtattgacccagagaagacggaaactgcactagccatcaagggggacaaaaatttcacaacagaatggtttgcaccagaagatcagaaaggagttcacttagaggaaagaagcctagagagcaagttgttgagtgaggaggaaacccctactctgacatattctccaagagtgcttaaacagcccactaacccctctactgaagaagacacttgacacttggttctgttactgaagaacttctgggacacaggatagaatacaagctcaagaagataccattggggagctatcttaacagatgggaaggactgaccatnnnnnnnnnnnnnnnnnnnnnnnnnnnnnnnnnnnnnnnnnnnnnnnnnnnnnnnnnnnncctttacatttctaaagtaagtcccaagctatgcatacaaagataagatgtcatctacccagagtatatcaaatgaagctctaatggtaatcccatctccaatcccaatataagaacttaactctaccctttgcattcatgaatcttttaagcctttttctaatcattcttttcttttctcttaattctgggagaagctttctcaacactttgttacatctagcggatttggatttctttgatcctgtttttaacattttaaaaccgagggcttttgcccatcttcaatagctaacaagaactctttcttttctttacaaatctcaaaacctttactagactttttcttcttctttagcttacttcacctagagtcttttaccttttctcatcaatgaatcaacccttttttttttttttttaaacacatcccaaccaaaagtataagcgcccacctagtcctatctagtctgaaaaatgcgaactagaactacatgagacactatttctgtcgttacgaacctaacactttctaccaagcttaatcggaataagaccgcacaaacactcacaagtgatatagggcttgaaagaaagtctaggtttgggtttgggttaactgctctaataaggagagtcagctacttggattaacaagagtgatcaaaatgaataagaaaatccaagtattttatggtatccatgagttcaaatttgatgcagacatgataattaaagatcagattcaggttcaaatttatagggaatggtatcagatcatgacagtgtggtcgagtagagcaatctaggcatggttcaattttacttcaatttcattgactacgcaacagacaactagcaacgagggcactgagttaatccggtgaaccaaaatgcttacaaggctatctcattattatcccctatgcatatgcaacaatcctaaatgaaacactctagactcgatcctaaatgtaatgaactacatgaacactctgtttttgtgaaatcattttctgaaatttttcaaatttttttgtttttactatgccttagatgaatgtagactcaagaatatatacaatgcaacaaacacttcatgagccctcccccaaacttaaatcacacagtccattgtgtgaataaacttggaagagagtattgaggacaaatccaatcatagaaacaaaataaagaacaaatcacaagagatgatataatacagtggtgaagtgaggcgcttaccttagtcgaagaattaacggagttggtcgtcaatggctgcctgtgattgctctcaggccatagacgagccgccctgttctgtatcatctccagcaagtgggtacttgacttcatcagctctgtggcagccagtaccgctctgaggatactcgacctctcttcttctactgcggccagcaccgcggtcgcgtaaactacgaggctgcagaagtcgtctgctcctgctgctagatcgagtgagtctggtcctcctcttcctcccacattcacgaggctcgaatgatgaatgcctcgcagggacatgcggaatctcctcctctctaggctcaggcctgcgccgacttggctcaggcgcgtcatatctcctcgagggcatgtcctgagggagatgtccctgcggaatagctgtagtggaagaggagcagctgatctagtccttcagaaacttgatagccctgaggcacttggcgagtaacttatcttgtttcttgcaccacttctggaacttgttgttgttcctgtgagcttcgctcaaactcttgctttccctcgctggaggtatattctcactgaaatgatacatgctcgtgtcaatctctgcctcatcaattttatctgtctcatcaacatcttctgttgtaactccttcggtgtgactaatctcctcagttggtggacagccctcgaaatagagatcttcaagcgcaggcttgaagtcaatgttccttccctcgagaatcctagtagcgtcaatgcaggggagaagaatattggcgattctaatcgatgaatgctcgaacctgtagcgctggaagtcgccaaccatgtcatactctaagaactcacatcggcgccaatgatccaagtccatcatcctcggtgctaaacctggctccttgagcggtactccacaagcttccagaattggcgtcacaacgccacccacgcatagtgctcctctcaccttcttcttgccgtttgtcaatgcccacttcctgtatccacacaagtggataaccagaggcattactggtggtgcgttgttgatatcgcctctcaagacattctttccctttgtaagcggagaatccatgttagcgcggaatctatcatctccatgtccgtgttagacacagtgcctgtagactccctggagtaaaaaactttggcaaccgagcggtgaaagtagcggatcccaggactccggatttggttgctcttggaccgcgccgagtttagcggtaaattgttcccaatagtagcccacaaattcttaagctcttccctgtcaaacctgggtttggttccctttccactagggaaaccaaactgttcttccaatttcttaatcgaaagctgataccactgttcagccactgagaacgtcaagaaccctaaccccatggtatccagctcaaagtccgtgagatcctcatacatctccacttgcagtgtggaaagaaattcaattgtcttctccttacaggcagcgtaagggtaagacatgagtgtctccagatgacacttctcgaacagatgttgcacgtcctccagtaaccccaactaggttaaagtctaatagcagggatacctcgttccccagaagtcattcatctcaaagaatcggatatactcctccactgtaacctcgtcgggtttgttcagcagctttgtctccttgcgccatgactctggctcatactcagtttcgatgtcctcatcgatcatctcatatctactcgcacatcgctctctttcctctggcgatttcagctcttctctgattacgtcgtgctgcgaagcgttcaaattcatctctgaaactctcgtaaacgtgtttttctctctctgctctagtggaccaagactcagcttcatctacattataatcaggatccattgaggattctccactatagttactcatgatgaaacctgaaaacaaatgtaacttaaagataaacgttaatacgttagtcccaacaaaaccaaaaacacaaaccaacagagaaaactggtcgagtgtacaaaaaatatttttcttttatttttttatttttttctttgccagtttggtgaactcgaggtcaagtgattccttggttgtgtgaatggagtgtgcttgcgatcgagtgaccttgagaggcgaaagatagtgaagcggtttgaaagaggtcagtgatggtagatggtgtgtagacgcgatcaagtgaagaggcgatggtcgagtgatgaatggatttgggagatggcaccttggtcgagtggttatgagctagaagtggtgaaggcggcttgctgacagaggtcgagtgagtgaaatggcgaggtcgagttgtttccttgaagagagggagcaagcggtgatgatggagaggcgaagagagctatggtcgagtgatgtctcgaatgaagagatgatgagcttgcaggtgataagtgttcagcggtgaagagagcttgtgttgtagcaaatggtgaggtcgagtgaaacagagtgaggggcgagttcttgtttggtcgagtatgtgaggaagagagatggtgaggtcgagtttttgaagagagaaggcgatgagatcgagtgaagagataaggagagatcgagtggtgtagagaagaagaggatagattcttgtcttctggtcagctgcatggggaacataggcgtaagcagtgggtcccacatgtgtctccttgtttcttctctgtattctctgttcactggaaaaaacccacgaaatcctgcaatcttctgtaaacttgctaaaactccctggaagactttgtcgcttctgtttgtcgagtaaaatgatgatttaaaaaaaaaaatttgggttttaaacatcactcatactccaccaatgtactcgatctctaggccatctgtagagtaaaagttttgaatttttactctagcttcacgttattcctctattcctgagaaccacaaacacgactaaaacaaatcaaaattaacaagaaagtaaaaattatttacaaggataatcatgggacttcctcccaagtgagcttatttaaagtctctagcttgactcctcacacttatcaagaagaaannnnnnnnnnnnnnnnnnnnnnnnnnnnnnnnnnnnnnnnnnnnnnnnnnnnnnnnnnnnccaatatgtgaacttaactctaccctttgcattcatgaatcttttaagcccttttctaatcattcttttcttttcttttaactctaggagaagctttctcaacactttgatacatctagcagatttggatttctttaacaactaaggttcctgtttttaacattttaaaaccgagggcttttgccatcttcaatagctaacaagaactctttcttttcttcacaaatcccaaatttttcttcttctttagcttacttcacctagagtcttttaccttttctcatcaatgaatcaacccttttttttttttttttaaacacatcccaacccaaagtataagcgcccacctagtcctatatagtccgaaaaatacgaactagaactacatgagacactatctttgtcgttacgaacctaacactttctaccaagctaaatcggaataagacctcacaaacactcacaagtgatataggacttgaaagaaagtctaggtttgggtttgggttaactgctctaataaggagagtcagctacttggattaacaagagtgatcaaaatgaataagaaaatccaagtattttatggtatccatgagttcaaatttgatgcagacatgataattaaagatcagattcaggttcaaatttatagggaatggtatcagatcatgaccgtgtggtcgagtagagcaatctaggcatggttcagtttaatttcaaattcattgtctatgcaacacacaactagcaacgagggcactgagtttatccggtgaacaaaaatgcttacagggctatctcatcattatcccctatgcatatgcaacaatcctaaatgaaacactctagactcgatcccaaatgtaatgcaactacatgaacactctttttttttttttgtgaaatcattttctgaaatttttcaaatttttttggtttttctatgccttagatgaatgcagactcaagaatatatacaatgcaacacacacttcgtgagccctcccccaaacttaaatcacatagtcgactgtgtgaataaacttggaagagagtactcaggacaaatccaatcacagaaataaaatgaagaaacaaatcacaacagatgatataatataatggtgaagtgaggcgcttaccttagtagaagaatgaacgtagttgctcgtcaatggctgcctgtgattgctcccaggccatagaagaaccgccctgttctgtatcagctccagcaggtgggtactcgacctcatcagctttgtggcggccaacactgctctgaggatactcgacctctcttcttctactacggccagcaccgcggtcgagtgatctcttggcgtggataagctaaaacatggtcgagtatttttcattgctatgtggtcgagtatacagctgtacactcatagccaaaatccacttcactcagctctttatacttatctcctgaagacactaatcaaatgcatcaaaaacaacaaggaaatataaagatatgtacaaagatagacatgggatttcctcccaagtgtgcttgttttaagtctctaagcttgacttctcatactcattaggcttagggtgcgttgcagagagaaaatgaggtctcctctccttcttgagtagagtgatcaacatactcattagggtttcttgacaggtctgcaattggatacttagtgatcatgtcctcatagtaagcttcttttttatcaagatagtcttctcctctagaccattccaatgtgaatttacatccttctttgctgaccagaatagtggctccatcctcaggggcgtccttgatgttgagtggtatttggttggcttttccattgagctccttgatttgatccttcagctcttttacaatatgttttagctcatgtatggctttgtcctgccatttagatctctccttgagttctaaccaatcaattgacgtctgagtgcttgccttgagttgtttggtcgagcatgagctttcaggacaagttggaggcttcttcgagttgttggtggaatcagttggtcgagcatgtgttgaacttacttcattagctttcataacctttgtgtcagaccccatcaagcccttgtaaacctctgagtcaactgctgccttctgtgagtcaaatgacttcttagaactcaaagtttcactagggagatacccatctttaccattcttggtcaaaacagtttttgaatcatttgcttcttcaagttccactagcagtgcaccagctagctgatccacttccttaattaagaaggtatgttcttctattgtcggcttcttcatagcatcattgatatcaaacttcatttcaaaattcttccccagattaagatcaatctttccttgcttaacatctatgattgctccagctgtagccaaaaagggccttcttaatatcaagggatcttttggttcttcatccatgtttagcactacgaagtctgtaggcacctccacatttccaatctaataggcaaatcttctaataactcatgaggtagtctaacagacctatcagccaagatcaaggagatattgcagtatttttaatacttgttaaaacccaacctcttagctactgagagtggcatgagatttactgacgctcctaggtcacaaaggcatttattgaaagtcaatgaacctagggagtatggtagagtgaatgaaccagggtctcctagtttttctgagacatcgttctcatctatgatggcactgcactcatggctcataactgttgttttctaaacctcttgaattctctccatgatcaagtctttgaggaacttttgggaatccaggatacgcgttagagcatcagcgagacgtatccttaattccacttccttgatgtttttggcaaacatagctctgtacttatcttctaactctttcttgtgtcgaccaggaaatggaagtgggggcttgtaaggaggaggaatgaagaccttttctttgtttttgacagcaactagttttggagcagttggtgatgttgctcggaaggtcggtcgagtaaagtggtcgagtggctgctcgagtgactggtcgagtgactggttgagtggctgctcgagtgactggtcgagtgcctgctcgagttgtttgccagcttgatctttattgagactgaaatcctccccattttagtatgcactgtcctcagtgactgacttgggtctctctccagtagataactctcttccacttcttatggtgatagcatgaacattagcatactcctttggagtctgtattgactttccaggaagtcctgtaactttgggcgctgaggtagatgctgattgtccttccaagtatctgactttggtattcaatgcctccagtttggcgttcaggtcattgtagctgcagtccagcttatggtgcaattcaaataacttcttagcaatttccatggagctagatgtttgtccctgtagcagctgttgtaccatttatttcatttcagcatcatgagcagcaggaccttggttttgctgatgtgcacatccaggtggtggttgttgctggtagttcccttgaaattgctgcttgggaacaaaaccttgattgtagggaacaaaaggtttgttctgaccttgttgttgctgtggaggatacacttggtcttgtggattagcaacgttggtactacggtaggagaggttggtgttgttggtcttgaagttgttataccctttgtagccacccaggttgttgttgatgtagttaacttcttctaactggttaccctccccatcctggacctgatactgctcgtcatcaacaaggaagtacacatgcttctgctggctaaggagtattctgtccagcttgtcattccgcgctttgatctccttcatgtgtttgtcatcagagtcagctgtgcctatgacggtcctatcgcagtcctcgttgtaattaccatctgattgagcaaggttctcaaccaattcccagccttcttcaacatctttgttctggaagttcccattgctggcggtatccagaagcattctgatgcgtggcaaaacgcctctataaagagtgctgagcagagaggctttagtgaagccatgatgagggcattggttggtataacccttgaaacgctcccatgcttcatagaagctttcaccagccttctgtaaaaaaaccagagatctcatttctgagtcttgcagttctggtgttttagaagaactttgatagaaaaggcttcttgcaatcatcccaggtggtgattgagtcatggggcagattcttctcccagatgtgtgctttgtcacccaaggagaatgaaaaaaatggagcttgaatccgtcttcactgacaccattgatttttgttaggttgtagagcctatcaaattcatcaaggtggtcgagtggatcctccattggcagaccatggaatttgttcccctgaatcatcgagatgagaccactcttaatctcgaagttgttgttctggatagcaggaggtgcaattcctttccgctgacgctgatcacgtggtgcgtctccagcaccaatgttggcagggctattttgttcattctgttcgtcggccatttcgagtgattgttgtggtattaggttgactgtgtttctcctttctctgagttcgtgagctatgcggtcgatgttgtcgttgaaaaggaggttctgattgcctgttgatcgagtttgcatacagcagaggtgtacctggatcaagaagacaacaagaaaaatacacagttagcaaccaaattgaaaattgaaaaagaacttgatctaagcaagtatgaaatctcaaatgtaacaaacaaacacccaattggcaacgacgccaaattgataataggtttttaagatcaattaatcctaaaacactatcatgtcgttgtagtactgaaggttgtcaatccaaatgggtgtgatgctaacaatcaagatgtgatcagaagtcactaagtcaagccaagcaataacaggttttggtgtgttctagcagtcctaagtgaacatgcagaaaacagaaaatcaaacagatgcagtaaaacactcgaccaacacagctctttgcagagaagtgggtgaggtcgagtgacaggtcgagtaacagacagaaaatatatggaatgaatgggaatgagaatgagaatgaaagaaaaaaaaaaaaaaagagtaagagtttagagttctaagggggatacaaaagtgttaagtctagtaaagggtttggaattcaaagaagttaggcattgtgattcaaagaaaagggtaaatcgccctatgtgctaagattagaagaaaagccttaagtttgtcaaagtataaaaccgaacgcgctagactcttaaatcgtttcaaagagaaccccttagaacttgaacgaaaaagagagaaagaatgagaaaaagggtagagttaggacatctatgggactgggatcatcttctgagctatcatactatatcattgggtagatgggagtctgttcttgtatgtgtccattgacttttacctttagcattctactgaagctcatcttttctctgagagtcccctgttactcgaccaaacnnnnnnnnnnnnnnnnnnnnnnnnnnnnnnnnnnnnnnnnnnnnnnnnnnnnnnnnnnnngattatggttttgaacagcttcagcataacttttgcatcgttagtaggactaggcaatagcttcgactctatttgatacgtagtctacggcgaccagtatatacttgttaccgtatgaagatgggaatggacccataaaatcaatcccccatacatcaaagatatcaacttccaagattggattctgaggcatctcatttcttctactgatgttgccttttctctggcatgaatcaacttccaagtaattgacgtgatcagcataccatggagacccttcttcagcagcgttcagttggtggaactctttcccactatagctccttccgaagaaatctacaaccatgcgctgctctactggcattgaatcgtctatcgaaggggttcttcaattctcatccttgacagatggtcagctgcaccattttcaatgctttttttatctatgatagtaggatttttactcaattaatccctaaaacactatcttgtcgttgtagtattttaggatgtcaatccaatccggtgtgatgcaaacagatgagatatgatcagaaagccctaagtcaagccaagcagaaagttggttggttctaacagtcctagtatgcaatgacagaaatgaaatgaaactaaaagcagaaatgacaatagcagggaggtgaataacaaagcagaaatgataacaggcaatcgaatggataaacgattcctaaggatggggtaatcgaatagtgtggtctccttaatctattcaggcggttgacaaaacttcacagaagctatccctagacaacaagttcaacaacagattaattcactcccgtgatagaaatcctcaagcaaagctagacactgacctaaatccctttagcgatttctaactaagcaggcattatcgaatcaacatgttaaagtcaataccctctctacagcgaatcccttggggtagagtcagatatctctagaattaataggatccaacgcccattaaacgctttctgagcgctggacgtctrgactcatactccacattagccagtgaaataagcaataagcgcaactaatccagaagggattctagaattctaaactcaaccacctaaaacgaccaagtaaaccacaactattctatcccatcctcagaaatacagttcactactcagayataatcaaagacaataacaaagcaacaactgaaaacatgataacagaaatgacgaaagacttaaacgaaaactaaatatcaaatacttgaaaacgaaactacaaagtcgcaggagaaacactgcggctatcaaagttgtgaaaatgtaaaaacgagataaaaacggataatagcggataatagccgacgccctagggaaaaccctaagaggcagtttatataagcgagaaataaaacaaataaggaaactaaatatatagcgaatctttacgtcatgatcctgcgaccgaatatgtcattgatcaaactgggcttcaggggctccgtcttgcgatcgagtgaaatgcagtgaagtcgagatttaatggtccagcgaccttgtgatcgagtgcgatcgagtggatgtcatgagggtgtgatccagtggtttcttcggcttctcttctcttctttgttctaagcttgtctggttgagtgcagaatgagcagataggcttcctggtgatagagtggtgatcgagtggttctgatggggtgattcctccagcttcgcgattgagtgaaactgagctgcttgcttctccggggttgcgatagagtgatttgccctggcagggctctgaggctgcgagagagtacttttgctgaaggcgtcattgggcattctgacttcatgttctgtttttcctctgtttgaactccaaaagcatccaaagtacctgaaaacaaccaaatatgccatgcacatgcaatcctaatgaaaaatcgtcctaagtatgtaaaacacactaaaacgactcctaatgggatgaaatgtggatgaaacaatgacaaagtggtgaagaatgaatgcctaaatcatgcaaattatagacatataaatctactatctccatgtcaaacccttgcaataaaagtatccatctcaacagtcttggtttagtatctttcttggcatacagatgcctttgagctgcatggtctgtatagacagtgacctttgatccaaccaaatagcttctgaacttctcaaatgcgaatacaatagctagaagctccttctcagttgttgcatatcttccttgagcctcgtctaacgttcaactggcgtaatatatgacatgaagcttgttctctattttctggcctaaaacagctcctactgtgtaatctgaagcttcacacatgatctcaaatggatagtcccgattaggcgcttgaacaacaggagcaaataccaaagcacccttgatggtgtgaaaggatttgaggcagtcctcatcgaattcaaattcggtttccttgcacaatagtctggttaacggcctggctatcttggagaagtctttaataaatcttctgtagaaccctgcatgaccaaggaaacttctgatgtccttcaccgtttttggtggctgcaactgcatcatcacttcaatttttcctttgtcaacctctatacccttctctgatatcttgtgacccaacactatgccttcattcaccatgacatgacacttttcccaattgagaacaagatttgtctcttcgcacctggtcaataccctgcaaagattcaacaaacatgaggagaaagaggggccatagaccgaaaaatcgtccatgaaaacctccaccatctcctcgattaaatctgaaaatatagaggtcatacacctctgaaatgttgcaagagcattgcataaactaaatggtattctcttataagcaaaagttccatatggacatgtgaaagtggttttttcttgatcattagggtgaattggtatttgaaagaaaccactatatccatcaagaaagcaatagtatggatgattagctaaacgttcaagcatttggtcgatgaatggtaaaggaaaatgatctttcctatatgtagcatttaacttcctataatcaatgcacattctatgaccagttatagttctaatagggatcaattcatccttttcatttttgacaacagtcattccaccctttttagggatgcaagggatgcaatgcactggagaaacccaagtactatcagagatagggtagatgacaccagcatcaagtagtttcaaaatttcttttttcactacttctttcaaattggaatttaacctcctctatggttcaatgctaaaataggattcattttcaaggtggatcctatggttgcataaactaggtgaaattcctttaatgttggataatgaataaccaattgctctcctatactttctaagctcagataatagcaggttcacttcatcatcatttaactaagcattaatgatcatagggtaagtagagtttggaccaaggaatgcgtaccttagacctttaggaagtggtttcagatcaaccttcggtgccttcagttcagaccagtcatctgaagttgggatgatcggctccccaaattcgttggcagacaagatcgagtagctggtcgagtatgtgctcgagtgtgcaggttgaactcgtgttgacccttcttcgctcattaccattacctccgttgctggtccattaaattcctcaaagggttctgattcttccatcgctttatgggagtctaacagcttctggtatccctatgtttccaaatgcagaaacccatcttcaccacttttggttaaagcactgttaagatgatcttcttctgccagctcttccagtaactcatcagctaactgatccatttcttcgatccaaaagagttgcccttctatggtaggcttcttcatcgcgtctttgacatcaaaggtcatcctaaagtctttgccaaggattagatcaatcttccctttcttgacatcaatcatagctcctgcagttgctaagaaaggtctccctagaatcaaagggtccttgggttcttcatccatctccaggactacaaagtcagttggtatctccacagcttcgatcctgattggtaggtttttgagcaaaccatgagggatccttactgacctgtcagctaggatgagagatatattgcaggatttgtattgagtgaaccccaatcttttggcgatagagagcggcaagagactgactgatgctcctaaatcacattggcatctgttgaaagccaatggacctaaagagcatggtagagtgaatgaaccaggatcactaagcttcttaggaatgatcttcttctctatgatagcactgcattcatgactcaataccaccatcccttgcacttcttgaattctctccacgatcaagtctttcagaaacctgtgagagtctgggattggtgctagagcgtcaacaagaggtatccgcaactcaacctccttaatattcttggcaaacatagccctaaacttatctgccaacgctttcttgtgacggccaggaaatggaagttgtggtttgtaaggaggaggaacaaagaccttttctttgttcttgacagcaactggttttggagcagttggtgatgccgctgggaagattggtcgagttgttggtcgagtaacgtggtcgagtggcagcccgagtggttgctcgagtggatgctcgagtgatttttcagcttgatctttaccgagacttaaatcctccccatcttgatcttcactgtcctcagtgattgtctttggttcctccctagttggcagtgctcttccactacgcagggtgatagcgtgagcatattcttttgcattctgaactgctttgccttgtagttggcttatctgttttggagctgaagaggatgcagaatgtccctctaagtatcgtactttggtattcagtgtttccaccttgacattgagatcattgtagctacagtccagcttgttatgtaactcagatatcttctttgccatctccatggagctagaggcttgcccgtgaagcagctgttgtagcatttgtttcatgtcagcatcaggagcagcaggaccttggttttgctgaggtgcgaacctaggtggttgtggcggctggtagttctcctggaattgttgcttaggaacgaaaccttggttatagggaacaaaaggtttgttctgaccttgttgttgatgtggaggatacacctgatcatgaggattagcatcgttggtgctgcggtaggagaggttggggttgttggttttgaagttgttgtatcctttgtactcaccctggttgttgttgatgtagctgacttctaccaactggttaccctccccatcttggacttgaaactgctcgtcatcaacaaggaagtgcacatgcttcttctggctaagaagtatcctgtctagcttgtcattcagtgctttgatctccttcttgtgtttatcaacagagtcagttgtgcctctgacggtcctatcgcagtcctcgtttgtaattaccatctgattgagcaaggttctcaaccaattctcagccttcttcaacatctttgttctggaaatttccattgctggcggtatccagaagcattctgatgcgtggtaggactcctctgtaaagagtgttgagcagagaggctttagtaaagccatgatgagggcatgagcagagaggcttgaaacgctcccatgcttcacagaagctttcaccagtcttctgtgagaaaccataaatctcatttttgagtcttgcagttatggcgttggagaagaactttgttagaaaagccttcttgcaatcatcccaggtggtgattgaatcatggggcagattcttctcccagatgtgcgttttgtcgcccaaggagaatggaaacaaacggagcttgaatccgtcttcactgacaccattgatctttgttaggttatcgaattcatcaaggtggtcgagtggatcctccattggcagaccatggaatttgtttccctaaatcatcgagatgagaccactcttaatctcgaagttgttgttatggatagcaggagatgcaattcctttcctctgacggtgatcacgtggtgcatctccagcaccaatgttggcagggccatttgattgattctgttcgtcagccatatcgagtggttgctggggtacaaggttgactgtgtttctcctttctatgagttcacgagctatgcggtcaatgttgtcgttgaaaaggaggttctgattgtctgttgatcgagttcgcatacagcagaggtgtacctggatcaagaagacaacaagaaaaacacacagttagcaaccaaattgaaaattgaaaaagaacttgatctaagcaagtctgaaatcttaaaagtaacaaacaaacacccaatcggcaacggcgccaaattgataataggtttttaagatcaataaatcctaaaacactatcatgtcgttgtagtactaaaggttgtcaatccaaatgtgggtgatgctaacaatcaagatgtgatcaaaagtcactaagtcaagccaagcaataacaggttttggtgtgttctagcagtcctaagtgaacatgcagaaaacagaaattcaaacagaaacagtaaaacacgcgaccaacatagctctttgcagagcactgagtgaggtcgagtgacaggtcgagtaacaaacacaaagtataacatagatactcgactgtacagtttgttgccagacaactgggtggttgagtatgaggtcgagtaacaagaaagaattgcagaaattaagcatcagatgataagatgcagtaaacaacagtagactaaacaaagaattcaatcagataaagaattcccgaggatggggtaattgagtagttttgtttccttagtttataggtgattgacatgcttaataaattatctctagacaacaagttcattaaccaaatctaagtgccaccgcaacagagaccctcaagttaacctagtcccagactcaatcaccattgacgagagctaacctaacaggcattacgaatcaacaagttaaagccaaaacgctctctgcaaccgattccttggtacagggccacgaatctctagaattagtggttcagacatttcatcgaacaccttttgggcgcggaaatatctgggctcaaattccaattgatcagaaagcaataggcattaaaaacaactaatccagaagggatctatcaatcaatactcaaccacctagcatagtgacaattctacactactctaacccatcctcagaaacctattcgctactcagacatcatagcagaaagcataaacgttgaacaggatgaaaacatgataacaacagtgtaacagcaggatgataacaggatgaataacagtaaacgaaatcaagaacaaatactgaatactgaatactgaatagataaagagaaatccggattacaaagatctagaacacagtgtctgcggaataaagctagataaaaacttgtttgcgaaaatgtgaagtacatgctacttatagccaaatattccgaaactctaatacttaaaacgacgcagtattgggacggattaagaactgtactcgacccaggtggtcgagtgggaggtcgagtgaatagttggggtcttcttttcttccttgtgctcgagtgtctggttgagtgcggaatgaagaaggctctgaagcttgccatcgagtatgtagtcgacactcgacctcggggtcaggtggtggggatgtagacactcgacctcggggtcgagtggtgaggtgaagtggtggtgtcttctactcgaccagggggtcgagtggtctgctgaggttgtgaatcgtctactcgacctgggggtcgagtggttttgcatgatcaggtccgcttcttccaattagctcgtcaacagctctggatcacatgaaaacaacacaaatatgcaacatgcatgcaaaactatcttaaacatgcaaagtgatgacaaatgatgagaaatggtataaaacagtgatgatatgatgctaaagtgatgacaaatggatgctcaaaacatgcaaaatacacacttatcaacgggaggagaagtcccgacacagatgaagtggataacagatgtggatcacttgtatattatccaccaaaccggaggtaatcattggatgacccttcacgtgaacttgcttacgtctcacttcgattgctatgattgcatcgtcggagagcatacagaagaaagcgattaaaaaatgctggaagcttgtaggccgttcacgaggatgatcccatagatgatgaacgaactgatttcttctgaagtccgtatcccgcattacgaccaattttcattccggcagagggacaagaaaaaggtcctgcaaaatactcagaggggactgcggcgtttacgcgttaaagattcttgaatgtttattgcttggtgtttcttttaatggcattactgatgcaaatatccaggccctacgggtgaagattgcagcagagatctttgatgaagcaccggaaaggatccctgcacggtttctagagacgtgattagctttttcgaacatatgtctgtgtcttttgggatttttagcatgtgattatagtaaatattgacactttaggattgataaccagaattatgtctgtatgaatctattatgttaattattggttaaatcgatgtaatggctgacttatcatcgctcaattcgtgttacggctgagttatgctaacgtaagggctgacttatcatcgctcaaatcgtgctatggctgagttctgatatcgtgacggctgagttatcgtagtttaattcgatgtttaactgagttatttctaaggtggtggctgacttgtcatcgcacaaatcgtgtgatggctgaattattttaacataacgactgacatatagtagattattcgatgttacggctgagttatgctatcgtggtggttgacttgtcatacccaaacttcgctgtaatcaaagaacccaaacgtcactagaggactataatacaccggttgacctccttataaatataactaaatagtcaagaacctaaacgttgttagaggactatatatacactggttctctcttgtcttttgataacactgtattttactcattttaggtgtatgtttatcatgatttagctttgcatttgctcattgtatcatataattttgcaccattttagcttgttttgcatacttaggcatctaggatcatcttgcattcgcattgcatgttttggtatgttttcaggtgcaaaaggagcttaaaaggactctactcgatccattcactcaatctgggcagctacagaagaggcatcattctactcgacctctttactcgatccaggatgctacaaaggatgttgcagtttacttgaccctcttactcgatcgaccaacctcagaagaaagcagcagactaatctactcgcccctcctactcgatccactactcgatccatttactcgaccaagggtgaccatctctacaagatttgttgagctatcaaagcgtcttcggatcctcctcattccccactcaaccagacatctgagcatatggataggagaggataaagcatctactcgaccaattgatcactcggagcatagacaaaaaggcgcaaactttgcagcaccctctttactcgatccccaagatcgagcattcgcccaaagcgcctcaagtctcttgtcttctagtgaatctagggtttccaacattttagtataaatagatcgttttggggtttgtccaaaagatctatgttttatctttcagtttttctttgtgtttatgaatcttgaaactttaattactcttaatctatttcgtttttgcatttcattgtttaagtaaagttgtttagcttgtttagatctatattttggtatgattttagtaatttcttggtttgtgttcttgagaatgttgcatgagtagtgattagggttcttgaggatggattagattagggtaatctctaggttagttaggtggttagtgtttagatttatacccttctggattcgcttggcccctatgcggttttcgccggctaatgtggagattcgatcatagacgtccagcgtccaaaagacgttcaaatggatatcttacctacgaattccagagatttgtagactcgaccaagggattggcttgtctgcctattggctttggtagattgtttcttaaacccttctctgctatgtttcatcaacgagagctgagattaggaagtggtagagttatgggggtctctgtcacggcagtggattgacccagtttttgaatctatcgtcatgggtatctatctttcgcctattagccatttgataaaccctagagttgcccttatcaatggatccatccttagaaattctattagatttatttatatcccctgttgattacacttttatttacctgttatttgtatcccctatttgtatcccctgttgattgcatttaggtttcttaattttgtcacctgttggttctactcgatccagtgatcgagtagggctctaaagttctcatttttacttgtttgaatcctgacctaggattattagtagaaacccatcatcattataatctggcttgacttagttgtttctgtacacatcttgattgctagcaatacagtggactggattgacaccttctataactgcatcgacatgtttgtgttttaggggaattgaactgaaatcacactcttcagcacataagtagacctcgaaaannnnnnnnnnnnnnnnnnnnnnnnnnnnnnnnnnnnnnnnnnnnnnnnnnnnnnnnnnnnttatcaacaaagaagtgcacatgcttctgctggctaagaagaatcatgtccagcttgtcattcagcgctttgatctccttcctgtgtttgtcatcagagtctgctgtgcttctgacggtcctatcgcagtcctcgttgtaattaccatctgattgagcaaggttctcaaccaattcccagccttcttcaacatctttgttctggaaattcccattgccagcggtatccagaagcattctgatgcgtggtagaactcctctataaagagtgctaagtagagaggctttcgtgaagccatgatgaaggcattggttggtataacccttgaaacgctctcatgcttcacagaagctttcaccagtcttctatgaaaagccagagatctcatttctgagtcttgcagttctggcgttggagaagaactttgataaaaaagccttcttgcaatcatcccaggtggtgattgagtcatggggcagattcttctcccagatgtgtggtttgtcgcccaaggagaatggaaacaaacggagcttgaatctgtcttcactgacaccattgatttttgttaggttgcaaagcctatcgaattcatcaaggtggtcgagtggatcctcgattggtagaccatgtaattggttcccctgaatcatcgagatgagaccactcttaatctcgaagttgttgttctcgatagcaggaggtgcaattcctttcctctgacgatggtcccttggtgcatctccatcactacgttcttaagtaagacatgcttacactatttgtgtattttaactttcttttattatttgttagcaaaaaattgttggacactgggttagacgaggttgatttctacggagttatcatgaccgaaagaaagttctgactagattcagattatggatggctgggtgatgaagtaagttattgttacaatctgtctgagtttgtctactttatggctgagttatcgtgttgttcaggctgagttaaataaattatagctggtttattctggtgttcagactgagttgtagttggttatgtctgagttatggtattgttctgcctgagttaaagtagataatggctgatttatttaggtgttgaagctgagttttacttggttacggctgaattaatgttgtgttttgtctgggtaggttttattttatataaaagtcctcaccctgaggcaccagcgagatccatgcccataccacaacaaacgcgtcataattctagacccgtggttcacgacttattgggttatagattacaaacagttcaagatcaaaccgaagaggtttcctttcaaacacactgcgtatgaacaatggattaacggtacgggtgataataggtttttaagatcaattaatcctaaagcactatcatgtcgttgtagtactgaaggttgtcaatccaaatgggtgtgatgctaacaatcaagatgtgatcagaagtcactaagtccagccaagcaataacaggttttggtgtgttctagcagtcctaagtgaacatgcagaaaacagaaaatcaaacagaaacagtaaaacactcgaccaacacagctctttgcagagcactaggtgaggtcgaatgacaggtcgagtaacagacagtaaataaaacaaagatactcgactgcacagtctgttgtcagacaactggtggttgagtatcaggtcgagtgacaagaaagaattgcataaactaagcaatagatgacatgacgcaataaacaacaatagagtaaacaataaaatcaatcagataaagaattcccgaggatggggtaattgagtagtttcgtttcctcagtttacaggtgattgacatgcacaataaattatccctagacaacaagttcattaaccaaatctaagtgccaccgcaaaagagaccctcatgttaacctagtcccagactcaatcactattgacgagagctaacctaacaggcattacgaatcaacaagttaaagccaaaacgctccctgcaaccaataccttggtacagggacacgaatctgtggaattagtggttcacacatttcatcgaacaccttttgggcgcggaaatatttgtgctcaaattccagttgatcagaaagcaataggcattaagaacaactaatcaagaagggatctatcaatcaatactcaaccatctagcatactgagaattctacactactctaaaaccacctagcatactgagaattctacactactctaacccatcctcataaacctattcactactcagacatcatagcagaaagcataaacgttgaacatgatgaaaacatgataacaacagtgtaacaacaggatgataatagatgaacaacagtaaacgaaatcaagaacaaatactgaatactgaatagataaagagaaatccggattacaaaggtctagaacacagtgtctccggaataaaactagataaaaacttgtttgcgaaaatatgaagacttgctacttatagccaaatattccaaaaccctaatacttaaaacgacgcagtattgggacggattaaaaactgtactcgacccaggtggtcgagtgggaggtcgagtgaatagttggggtcttcttttcttccttatgctcgagtgtctggttgagtgcggaatgaagaagattctgaagcttgccatcgagtatgtagtcgagtggtggtgatggtgatactcgacttcctggtagagtgatgtggtcgagtgatgatcaggtaatggaggtgaagacactcgacctcggggtcgagtgatctgatcgagtgatggtcaggtggtggggatgaagacactcgacctcggggtcgagtggtgaggtgaagtggtggtgtcctctactcgaccagggggtcgagtggtctgctgaggttgtgaatcgtctactcgacctggaggtcgagtggttttgcatgatcaggtccgcttcttccaattagctcgtcaacaactttgaatcacctgaaaacaacacaaatatgcaacatgcatgccaaactatcctaaacatgctaaagtgatgacaaatgatcagaaatggtatgaaacagtgatgatatgatgctaaagtgatgacaaatggatgctcaaaacaggcaaagtgcacacttatcaactcttccaaacttagtatttgcttgccctcaagcaaacaattaagaacaagccggaggtgaggtttgaaggcgaggactcagagccaaagcactagataaaccagatgaaatcaatgtccaagttgaaagttctaagctgcgatatgatcgaattctactcaaaaacgttagccatgcctggttatcaatcaatccgactcatatgctcgacctacacatgttttcaaatctaccaatccctttaacattcattagctttggagcgtgaatcaagcaatgcatcatcaatgaactcatttggctaaggtaaaaggtcaagagacaaagatggtcccttacagaataggcttcagtaacaggggatctctcaaaaaaaatgattaagctttgtagaatggtaaaggtaagtcccaagctatgcatacagagataagatcccatctacccagagtatatcaaatgaagctctaatggtaatcccatctccaatcccaatataagaacttaactctaccctttgcattcatgaatcttttaagccctttttctaatcattttttttttctcttatctctaggagaagctttctcaacactttgatatatctagcggatttggatttctttacaactaaggttcctgtttttaacattttaaaacgaagggcttttgcccatctccaatagctaacaagaactctttcttttctttacaaattccaaacctttactagactttttctgcttctttagcttacttcacctagagtcttttaccttttctcatcaatgaatcaacccccttttttttcttttaaacacatcccaacccaaagtataagcgcccacctaatcctatctagtccaaaaaatgcaaactagaactacatgagacactatctctgtcgttacgaacataacactttctactaagcttaatcggaataagacctcacaaacactcacaagtgatatagggcttaaaagaaagtctaggtttgggtttgggttaactgctctaataaggagagtcagctacttggattaacaagagtgatcaaaatgaataagaaaatccaagtattttagggtatctatgagttcaaatttgatgcagacatgataattaaagatcagattcaggttcaatttgatagggaatggtataagatcatgacagtgtggtcgagtagagcaatctaggcatggttcagttttatttcaaattcattgactacgcaacagacaactagcaacgagggcactgagtttatccggtgaaccaaagtgcttacaaggctatctcatcattatcccctgtgcatatgcaataatcctaaatgaaacactctagactcgatcctaaatgtaatgcaactacatgaacactcttttttttttttgtgaaatcattttctgaaatttttcaaatttttttggtttttttatgtcttagatgaatgcagactcaagaatatatacaatgcaacacacacttcctgagcccacccccaaacttaaatcacacagtcaactgtgtgaataaacttggaagagagtactcaggacaaatccaatcacagaaacaaaatgaagaaacaaatcacaacagatgatataatacaatggtgaagtgaggcacttacctcagttgaagaatgaacttagttgctcgtcaatggctccctgtgatttctcccaggccatagacgaaccgacttattccgtatcagctccaccaggtggttactcgacctcatcagctctatggcggccagcaccgctctgggaatctcgacctcccttcttttgttgtggacagcaccgcggtcgagtgatctcctcgagtgaatgaggcgtgatctgctgctagatcgagtgagtatagccttccttcttctcttgtgctctcgcgactcaaatgacgaatgcctagcccggacatgtgaaactctctgctcgctaagctcaggcctgtgctaaggctcatcaaatctcctcgatggcatctccataggaggttgtccctgtggaatagcagtagtggaggaggaacaactcagcttatctgtcaggaacttgatagtcttaaaacacttggcaagcagcttgtcttgattcttgcaccacttttgcagtttactattattcctatgagcttcactcaagctcttgctctctcttgctggaggcacatgttcaccaaagtgatacatgctagtgtcgaactccactgctctgtcttcatccatcccatcctcagcaacctcttctagaagatcatcttcatccaatggaggagcgttctcatagtagaggcgtccaacctcaggccgaaaattaatgttatctccctctattagccgtataacctcagggctagggagaaggatgctagctctcttatctgtagagtgctcaaacctgaacctgtgcaagtcgttaaccattgcgaactccaggaattcacagtgacgtaggtgctcgatatccattgctcgcggctcgagtccattaaaagtgattgagactccacaagcgatcaaaatcggtgtcagaacaccgcctatgcacagaacgcctcgtgctctcttgtggttattgctgacggcccagctcttgtatccacacagatggatcagaagaagtacagagaaaggtgtgtcattgatttcaccttgcagagacatgccattcttagtttggcgaagagttcccttgagagccattgcgatcatctccatatcagaattagtaacagtccctgtgatctctcgggagtagagtacattggctatagcacgctggaagtacctgatgatagggctgcgtatctgattgctctttgacctggaagaattcagcggtacagagctgccaatagtgatccacaagtctttcaactcttctctgtcatacttgggcttagttcccattccactggggaagccaaacaatccttctaaacgcttgattgataacctatactcatgaccatacacagagaatcgcaagaatcccaatccttcacaatccaactcatcagaggtcataccttggtagagctccactagcagcgtggagaggaattgaattgtctcatcttcatatgctacatacggataagccatcagagtgtgcagatgacaactctggtacaggtgctgaacatcttccaacaatccgagttgtgcaagtgtggtcgagcaaggatacctcgtgctacagaactcattcagcttgcagagcctaatatattcctcaccaggcaatacatcgggtttgttcttccctcgggctatctcagcttttcttctgaagctatcatattctctctgttctctctctggccttgaagatgatgactctgtttcatccatgttgtagtcgggatcaacagaagaactgccactgtaattgctcatgattcccctgtagaaatttagaactcaaagctcaaatgtcaataggctttgttgaattcaagaacaagaagtcgagttactgttgcaggggtcgagtgaattctcgaggtcgaacgagtgcttgtggtcgagttccgttgtcgtaatcgagtagactctgagacttcgacggtgaaagaggaggagtactcgattgcggcaagcgcagggatggtcgagtgattctcggaggtcgagtgagctacgagacagggaatctaagtcgagtaacttcttttataagagacggcggttgatgtggatgaattggtcgagtattgggacggaatcgagtgaagtggtctggatcgagtagatctttggacggcgattcgtggtgtagagaaattggagtgtcggtgttgaggtgaagtgatgataggtcgagtggattctgtgaagtcgagtgaagtttcaaaaagagtggctgaggttgagttttagattctctctccagcttatcctcagcgcgtggtccacactctgttgactgagaaaacttgtagaaaatctactataaactgcaggaaatccgtgcaagtctctgtagctcctgttggtcgagtacagtgatgttttaaaaaattttggattttaaacatcacgtatactcgactgatgtacttgaattccgggtctccagatgcaacataaaactttcaaaattttgtactccaccaggctatacactcgatctccaggtcttctgtagagtaaaagttttgaatttttattctatctccacgttgttcccttgtctctgagaaccacaaacacaactaagacaaatcaaaaataacaagaaaagaaaaatttatttacagagatagtcttagggtttcctcccaagtgagcttgtttaaagtcattagctcgactcttttactcctttaatcatcaagaagttcctggagatgaaccgatgtcacgtctggaaggatttgatctgctaagtatttcttgagcctttgaccatttactgtgaagtctccactcttaccagctagagtgactgctccataaggacggacctcagtgatacagaaggggccagaccatctggatttaagttttcctggaaagaatttcaagagagagttgaacagcagcacctgatcaccaacctggaaatccttagtgatgatcttcttgtcatggaaaagcttggttctctccttgtagattttagagctctcataagcttctagacggatctcatcgaggtcactgagttggatcaatcgcttctcctcagtagtttttatgtcaaagttcagaagttttaccgcccacattgctttgtactcgagctcaacaggtaggtgacatgattttccatagagaagattgaaaagagttgtaccaatgggggtcttgaaggctgtcctattatcccataatgcatcatctagctttgcagaccagtctttccttgtagtcccaacagtcttttccagaattgtttttatctccctattggagatttcaacctgctcgctcgtctgtggatgatagggagtggtgaccttgtgctttactccatacttcttcaagaggttctcaaaaaccttgttgatgaaatgcttcccaccatcactgattactaccctgagaactccaaatttcgggaagattatggttttgaacnnnnnnnnnnnnnnnnnnnnnnnnnnnnnnnnnnnnnnnnnnnnnnnnnnnnnnnnnnnnggcatactacggtgtcactcaaattgtcaagtgtatagaatttacatcgttctgtgggatttttttgaaaaaatttcatgtaatattccctacctcggttccagtagttttacatttcaatcgatctcccttctgcaaatgtagtcctgggggttcggttaaccaatcggttatcggttctattcgattttggttattttgggtttagatttttatatccatttcggttcggtttggtccggttccggtctttcggttttaaaattagtatccattcgggtattatgcttcgggtatttttggatatttcggttatttttgagtattttcagatatttttggatattttctgttattttcgagtagttttagtattttatatatatattcaagtattttggattatttggtctataaataggtaatattttaaaatatataattgtatttcggatattttcaagtactcaaaatatttcggatcagtatcgattcgtttttgttttttttggttatagaatttagtatccatttaactatttttaaattttcggtttggtttaattctattcaatttgttttacttcaattatggtttggtgtatttggtttggtttatttgaccaggcctacgcaaatatgttttctttcgtctttcgaagtcacatgtgaatcgatgcaattttctacacctaacggctactaacaaagaataaggtaaaagaactttagtttgtgaaacctatgattttacttgccgtatcttggttcttcatcattctttactttggtaattatagtacgtactttaaaaagttgaaaatctatctagcatatggttttctcaagtaaaaacattttatgaaataggatttgatggagtttgtatgtaatgttggtttgtaaatcatagtctttcattgatttaactatttatatcactttcaagttgtatcgttcccacattcaaatcggagtcacacccatatccgagtgccattcaaagcctaattcttagctttgttgtctttgagaattcattgcctagataatgtgctgaataaattagaaaagtagtttggtagttgacataatagtttctctaatttttatgaggctgaaaaaaatctgaaaattacatgaatttatgtatattaaattattgaattggtcatatttaaactgttagcaagtttggatgaatttttattccaagtatcaatgatttattagccgacattaaaaaaaaaagtcaacaacacaatgaatctgtagttacaattttgtagtatttatttttgaattcaaacatattttgaaaataaatcaatgctaagttctgggcgttcggttatccattcgattttggtttgtatccattcggatatcgattttttggttttaaagtttagtatccattcggttatcgattttttggttctaaagtttagtatccattcgattattttgaaagttcggttcagttccggattttttttgttttaaaatttagtatctattcgattattttgctttgaatatttttggatatttcagttattttggatattttagatatttttcggtcttctttggatattttcagatatttttttgtgttccagtatttttactattttatatatatatatatatatcaagtatttttaattatttaatctagaaataactaatactttgaaaatatatttatatttaggatattttcggttactcaaaatatgtcgattcaataccgattcagttttggttcttttgattatagaatctagtatccattcgattatttttcaattttcactttgattcgattcggtacatttagtttggtttatttgtccagtagcttcaagtcttcaactatattgggcttggatccgataatataatctatactattaagagagaatgagagacaataaaattacaagccgtttaataaaaacatgttacaagaaataggaaaaaaaaataaaggataaaaccgtcattatctgtgctcttcgcagccgacttgagtcgcgcccgtaactgacctgttaaacagacgcggagatcctgtttctatctaatggggctcgattctatttcttatttggcgttttgatcacagttggcccatttgcacgtcagtaaccactctttcttaacatttcttgctcaatattttgcctcctttccaagatattcactgtttcttgaagatatctgcaaatcacaaccaattaaggaagattcctatattctattgagatagtatatttagttatgatttcatgtataaaaaaatccggtgttgctctagggtttaagaaccaaatcctaaccgtataaatactcaagcaatatcatcaattctaaagcatcacttttctttctcatctatacacataatcaatgacattaccgttaggtttaacgtatcttagtgatgtcaagcctttcaaaacgaataggcgtgtccgagtcaagattcttcatctgtggaggcaaaccatggatgcatcaggagaaacgttagatatcattatatgtgatgaaaatgtatgagagaatgtgttgtggtcgaattcccccacaagcaagaccgagccaaacagtctaagagtaacaatcacctcatggttaaacatatgattggcctctagcctagaagaaagcacctcgggactttattcaatcaaccgtctcggagagagttcgtaaaatggctcgggtgttaatcctataaacacagtccgagccaatcgtgagaacgctgcggaaaacaactatatcgcctcgggagacagccaactgagcttaatggacagtcatcaagcgcgccccgaaccggtacataccgtttgcctgaagccacctctcaaacgaccaccgagccgtgaaaagagccgaggcaaagacttgtaaaaaccattcattctcaatggatcatttccggtaaaataggatcttttatgggactttcggaaatgataaagtagaatctttgaagataatgtcgaatcaggaaatcttcccaaagcctctgaagaataaggaaaatatctttaggacgattatcctctagaaccgacttaaagataaatggaaatcttccaagaatatcgatagagatgcggtttaaggatcctatataaagcgcctcaaggacttctcaaaggagacaattaaatactcaaaaagacacaattttatacccaaagaaacctacgaatggcttgatcccttcacagggtacgtaggcaatccatcacggatgcaactataccttctaataccctaattctttctttgttcttgagcaaaaccctaatgtatttcataagagactagaacctcttttgtaatagagtcttggatggaatatctaatgaagagaaattactagatttgttttcctccttaaacaaatatattgtgtgaatccttgattcaacaattggcgccgtctgtggggacgaaaaagaactctcttcgcatatcattcatccaagtattcgatgtacgctcatcaagccccgacaatcagatccgtctacttgtggggaggccacctgtcaaggttcaatgaaccaggtgacgtataacctgtccacggattgccccggagatcagagttccagggaatctaactgtagctcgatcggatatctctgctcagagttatcgccgtttttctgaagtcgatgctgtctgtttcttcacagatctgtatgaatagaccagtctgcctcgggaccgatttcccgtcaaacgtactatgaaccaggtgacttataacctgttcacggattgccccggatatcagctttctagggagtctaacggtagctcaatcggatatcttctctcagagttatcgccttttttctgaagtcgatgttgtctgtttctttacagatccgtcggaatagaccagtctgcctcgggaccgatttcccaaccagtcacaatgaatctcgcaactagtaatatgttcacggattgccccagatattagctttccatagaatcgaaccacgtctcaatcagagacctcttatgagagttatctccggtttctgtgtcagatgtagtctgttaaactacaatccgtctgtatagtccagctcgcctcggggccgatttcccgacatatcacagaaaatctcatgaggcgtaatatatcaacggatcgcccacagagtcatatttttggaaaagtcgaccttgccttaatctaagatataggctgagagatataaacgtttatctcaagcaagtgcagtctgtcacaagacccaactctataaaaccagtcagcttcaggatcgttttcctggaaactcctgatgaaataagctacgatatacttatctacagatttctccaagattcagatttccaaagaagcctacctcgtctcgatccgacctgtctactaggagttatcatcgcttctcttcctcggatgcaatctttttgtcaaaatcgccgctgtcagaacaaccaactttaaaacgaaattcctggtgatctagaaagcataacgaggtgttttacctatcaatctgaagataagaggcttgtccttccaacacaatcaacctcaccaatatcggagctgtgtactaagcgttagcactgtttccacgcaacatatgacatctctaaaaatcgcagactcgaactgcgagaacaattggggtagaagatagattcccagcgattaaaaacacatcaagagcccatctacatatcgttctgaagctaagagacttatcttgccataaagatgtactttgcctaattctatgctgttttccgggagttataggcgtttctctcaagcatgtgtatttatcagaccacatatccgccagctttcagatcgatttcccggcttatcattatgaagctacaaggcttatctttctaaagaacccgactttgcctcttttgttgcagtctagtaagaattctcactgtttttccgcgacgagcgcatcctggccgaaaccatagagcggagttccactgttatcagatcagccgcttttgagatggatttcttgtcgatctggaaagatatgagaatcaaccttcacatcatcctgaaaccccaaggcttatatttctatagagaccaatctcgtctctattgttgaactccttttaggttgggaaacctattacatcatcattgctaccatgcttcgatcgcgtcattgttattctcactttagatcaccagctcagagttcaacactatcaactcaagagttcaccacactagacgggtcgtcaaatgcacttaagatcaagaagttattcatcttgcttcctgtccaagaaccaactgaaacagtctttaatccatgcaaagtctgaaacaggattcggtgtgcagctacagcttttgcgagacattttcccgacgcatcagaaagagttaagaaatcaggaaacaatgactctgtcggagcaacttcagaggataatggaagatacatacgacgtccgatctagctagaactttatagagtgattgttgacgcttctagataatgatttaccggtgggatcaagaaatcaaggatgcataataaagttatcaatgcatctccgaatcagccaaaagaagaaaaaatcaccttgtcacaacaacttcatgaaaacgtggaagctttatacaatatccgatctgactaaaatttggagaaaaccttcacggaattagcagctagatactcaatggtgggatcgaaaacttaacggttgaaacgatagttatcagttcttatacgaatcatcaaaagaggtacattacaccaataagtggcaatggaacatcactaccaatcgctcaaggattccaatcatttatcaatgaagcgatctccaattccgtctccgcctcataaaagataagttcaactactttcttacatattaattaagcttgattgacatactcgcttnnnnnnnnnnnnnnnnnnnnnnnnnnnnnnnnnnnnnnnnnnnnnnnnnnnnnnnnnnnngcttcaggggctcagtcttgcgatcgagtgaaatgcagtgaagtcgagatttaatggtccagcgactttgtgatcgagtgcgatcgagtggatgtcatgagggtgtgatccagtggtttcttcggcttctcttctcttctttgttctcagcttgtctggttgagtgcagaatgagcagataggcttcctggtgatagagtggtgatcgagtggttctgatggggtgattcctccggcttcgcgattgagtgaaactgagctgcttgcttctccggggttgcgatagagtgatttgccctggcaggactccgaggctgcgatagagtactctaatgcaaaatcgtcctaagtatgtaaaacacactaaaacgactcctaatgggatgaaatgtggatgaaacaatgacaaagtggtgaagaatgaatgcctaaatcatgcaaattatagacatatcaactcccccaaacttagtctttgtttgccctcaagcaaacaagaagacataagcagaaggagaggtttgaagttggggattcagaaccaaagcatgagatatgacaattaagatcaatgtgccagctaacagttctaatatgcgaggtgatcggtttctactcaaaaactttagccatgctctgttatgatccaaacctacactcaaatgcacaatgcgtcaagatcaaccaatccctttaacattcattaagttcaaaaacatgaatcaagatatgcatcgctagtgaactcatttggctaatgacaggttatgagacaaagatggtccctttttagtggttcagattttagtagcaggggactctcaatgaaaaaggactgagctttagaagaatgctaaaggtaagtgccaacctatgcatacaagaatagcaccccatctacccaatgacataaaccgtgaataacaagtagatggtcctatctctaaacccaatgatgatcctaagtctacccttttgcactaaaggcatatttcgattttttcttggatcaatgtttccttttcttttctttggctcttgttcttaaggagaagcttttcttaaactctatgagtctagtctagtgaattgggtttttcttgaactcttatggctcttatcatttatttatttttctttttctgtttttgttgccatctattttttagagcatatcttaacaattctatgcttcccatacattcactagaccacaatatgattttcagcttccttctcctaaagactctaacccattttttttctttctttttcttttcacactcaatctcaatccccaaataagttcccacctagtcctaccaagtccgaaaatgcggattggaactacatgagatactactcttgtcgactcaaacctaacacgttctaccaagctcaatcctgaaaataggcctcacatgctctcacaaaataacatggcttgaaagaagggttggttaagggtgggggaactactctaataatagaagcagctacttggattaacaagagtggtgaataagtgaaagaaaatccaaatatgtattctatccacgagttcaaaaacgatgcaaacatgataattataagtcagattcaagttcaaattgacagggaaaggtgtcatgacatgcatcgagtggtttctatagaacatggtgcggttttacttcaaagtcattcaaatgcctcagagaactaataactcattttagtgaatcatcatgcttacaaggctatttcctcattatcccctatgcataggcaacaatcctatatgaaaaactctagactcgattctaaatgtaatgcaactaaatgatcattctgtttttgaggaattcattttcaaaaaatttcaaattttttttgtttttttctatgacttagatgatatgcagactcaaatgatattcacaaaaaacaagtcaaatacgtcttgaaccctcccccaaacttaaattacacagtcccttgtgtaatcaaaatttgtgaaagaattcaagataaacacagaaacaaaaacaaaagcggtatttacaaagggttttgatgtgttactcagtagaatgtcctggagatgtagtcatccatatctgcttgagtgtactcagcaggcatgaccggttcttgatgtggctccgccatctcctcgtcattgtgctcgatcgcaaccccagcaggttgtgcagcacgacgttcatgtgttctctagcccgatattatccagcctttgcttgatgaatgtacagttctaacactcttcctcctcttgtttccataggctcatgagacggggaacttgcagaacggtgttgtccctatgtttataggtgaattgccttggcggagcaatgtcatggtggctggatgacatgtcttcaggcgggttgtcattgaagtcatgtcgggcgttttcacttctctttgagattgagtggtttgggcaattccactaggagaccacttgatcacaccattgccatgttgcgatcgagtggtatgacattgtcgttgacaaagatgttgtcccaaaaccactagatcgcacactcgagcttttactctcgtcttgcgatagagtgattcatcaaaaatttgaaattttttatttgaacacttggttgcatccctgttgttgctccagctgttattcatttcctgagaatcaaaaacaaaaccaaaacaaatcaaaagtaacaaaaataaaaactatatacaaggataggcatgggacttccttccaagtgagcttgttttaagtctctagcttgactcctcacactcattaggctcaaggagggtgatagagtagaattgacgtctcctctccttccttagtagatacaacatcaaattcagtgacaagtctgtaattgagtactcaatgaccctttcttggtaagctcctttttcatcatctggatagtcgtcttttctagactgttttgatgtgaattcacatccttcttttctaaccataggactaacttcatcatttgggacgtccttgatgtcgagtggagcttggttggctttcccatggagctctttgacttgatccttcggctctttcacagtgtgtgttagctctcttatagccctgtcgtgccattttgcctctccttgagttctaaccaatcatttgatgccctcacgcttgactttagctgtttggttgagcattctagtcgagtatcagttgagccttcctcgttcaatgtaacatcctctgtttctgacgcaatgacacctttaaagatctttaatcctggtacttcgttgtgttagtctaatgacatctcattgctcaaggtctcactggagagaaatctagcttcactacttttggttaaagtagtttgaaggtgatctctgtgaacaatctcctctagcagttcattacctagctgatccatttcctcaactaagaaggtttgtccttctattgttggcttcttcgtagcgtccctgatgtcaaacttcattttgacatcctctcccagattaagattaatatttccttccttaacatctattactgctccaactgaagccaagaaaggtcttcctaagatcagaggatccttagattcttcattcatctcaagcacaacaaaagcagtaggcacctctactccattaattattactgacacatcctctaaaaggccaaaaggtctctttgaagtcctatcagcaagaatcaaggttagatcacaaggcttgtattgaacgaatcccagcttctttacaacagagagtggcattaagctgactgaggctcctagatcacatagacaattgttgaaagtcaattgcctaatggagcatggtagagtaaaagatcctggatcttccaacttttgttgaacaatcttcttctgagtgattgctctgcactcatgacttaacaccaccattccttggacttctttgatcctttctgtaatcaggtttttcacgtacttgtgctcatcaggtattagcgcgagacagtccactaaagggatatcttttatgtgtttttccaggagggctctgtattttgcaaccagaactttcttgaaacgaccagggaatggaagtagaggtttgtaaggcggtggcacgaagactgtgtctttggtctttgcagcttccggtttttcaacaaagggagtagctgggggagcttgtggtcgagtgggttgactggtgagtatgggctcttcgattgggttgttgttgatgtggtgtgaaaccagatggtggttgctgttgttgatatcctccttgaatctgctgctttggaacgaacccttggctttggttgtaaggaacaaacggtttggattggttctgttgctgctgctgctgagggtagacttggtcctgagggttggcgacattggtgcttctgtatgataattttgggttgggtctgtagttattgtaccccttgttgtagccaccttgattatgaacatatctgatttcagcacactgatcgttctccccctcttgtacttggaatggttcatcttcagagatgaagtgaacatgtttctgttgcatttggatgattttgtctagtttgtcattgagagctttcatctctctgtggtgcttgtcatcagtgtcaaaactcgtgcagatgcttctatcatagtcttcattgtaattgccatccgattgagcaaagttttcaactagctcccatccttcttcaacatccttcttcagaaaattcccatttgaagcggtataaaggagcatacgtatcttaggcaggacgcctctgtaaagtgtgttaagaagagaaacttccttaaatccgtgatgagggtatttggtttgataacccttaaagcgctcccaagcttcacaaaagctttcattttgcttctgagtgaatccggatatctcgttccggagtcttgcagttctggagttggagaagaattttgccaagaaagcctttttgcagtcatcccaggtcgtgattgatccctggggtagcgtcttttcccacagatgggctttatctccaagtgaaaatggaaacaagcgaagcttaaaaccatcttcactaactccattgattttagtaaggccacagagcctttcgaattcgtcaagatgatctaacggatcctccattggcaggccatgaaacttgttcccctgaaccattgcaatgagaccgcttttgatctcaaagttgttgttctgtactggaggtggaacaattccatgacgctggttgtggttgtgagggaagtcaccagcaccaatgttggtaggttgctcttgctcatctacaacgtcacccattgtgtcggtttctgtctgttctcttagttggcgagcaatacggtcgacgttatcgttgaataggaggttatgatttccttgtgaccatgtatgcatgcaacagatagcagcggggctataacagacgaatcaaagatgcgtccggaaagaaggttgcaaggtacctgaaacacaaagacagaaaaggcacaatgttagtaacttgagtaacaaaaacgaacttgatcttaacgtttctaatgatctcaaatatagcaaacaaacaccaaactggcaacggcgccaaattgatagtaggatttttactcaattaatccctaaaacactatcttgtcgttgtagtattttaggatgtcaatccaatccggtgtgatgcaaacagatgagatatgatcagaaagctctaagtcaagccaagcagaaagttggttggttctaacagtcctagtatgcaatgacagaaatgaaatgaaactaaaggaagaaatgacaatagcagggaggtgaataacaaagcagaaatgataacaggcaatcgaatggataaactattcctaaggatggggtaatcgaatagtgtggtctccttaatctattcaggcggttgacaaaacttcacagaagctatccctagacaacaagttcaacannnnnnnnnnnnnnnnnnnnnnnnnnnnnnnnnnnnnnnnnnnnnnnnnnnnnnnnnnnnaaacaagctttcgagaactttaggcttgttaacatgtgaagcagacttcgaagaatctaaggaattatcgaaggtaaagcaggagaagagatagaagagaacttatcacagagggccgcaagaggtgtgggctaaaggcaatgtgcagaatcctttgttttgtgaatcccgagggtgtcgatcgacatgagggatggtatggatcgacatcgttgctctgcaactctcattggcgagctgagctggtgggagcgttatgtgtggctctgtctggggattctaaggggtctgaggatgtgtgtctatgctagaggcaatactactaatagtctaagtaaactctgaaccatccatgccaaactctgtctccaaatcacaaactttaagagagatcctacctcccttcacatcaatcctaccaccagctgtagctatgaatgctcttccaagaataagaggatccttgggttccttcttatagtccaggaccacaaaattagcagggattagggagttatcaaccttaacatgaatatcctcaagaattccttcagggattcgtttggaacgatccgcgaagagaagagtgattctagtcagttgtgcacttagcagcatgaatctcctccttaaaacgacgtgtcctcggataagggacaagaagagtgtaagaagactcgggcttcatcgagattcgcgcctcatatggtgcagtccggacccagtgtcgatcgacactagaggtgtatcgatcgacaccctcgtgaggaagtgtttttgaaaataatgttcgatacggtgtcgatcgacactggttggtgtcggtcgaaaccaactctgcagcagcgagctccaacttgtcttcagtgtccaattcttcccaaacatcatctccttctctgatcaagatggcattacagctcttccttgggttagcatcaggattaccaggaagaaagccctcttgtctcgtaatggattgtgcagttgagctacctgtacatctagcttcttcaagtgagagatccaattgttgatcttcccattaagatctatgtagacaacatcaaacttgccattaaactccgtaacgagctttgtttggctctcaagaatctgctcaagcatggattctattctggtctctgatgagggtggatggggggcttggtaaactgaattaccataggttctctggaagttgctctaaggaaatgtcttctagaaagcaggctttggagtgtagtttgaggaactctagttccttgtaaacctgttgccactcaagttgccctatggctgtccaaacttcttgtagccctgagcatctatgtagaagactcccttttctaactcagtctcaggctcaatggtctcatcctcagctgcaaggtggacatgcttcttccctgtaagcaggttgtgaaccgaatacagcttagcatgtacctctgccatttgattacctgaaacagttccaacaatctttttcctctcaaagtcagcattcttggtgctcttactacaagctaggttctctatcagagcagtagcatcaactggatatctcgtgttgaagttaccattgctcgctgcatctagagccatttggtatctctaatcaactccattgaaaaaggtaccaagaagttgtacctcattgaagccatgatgtgggcagtcccgttgatactccttgaatctaacccatgcggctttgaagtcctcaactggaccttgtgtgaaggtagacaacttgtttctcagcttctcagacttagcatcatcatagaaattgttcaaaaaggctatcttgatgcttctcaaactcttgagggaacctattttgagttgtttcagccacgaagcagaatctccagcaagtgaataagggaagagcttgcacagtaggtagtcctctgagactccattaactttgatgctcagaacaaagtcttcaaaatgctcgatatggtccattggctgctcatgagacaagccatggaaaggatgctggcttactaaagtaaagtagccaggcttcagctcgtaattgttcctctcgaagggtggggatacgatcgctgatcgattagcatataacaggtgaggcctgttgaaacccccaagaatacgacgtggttccacagctggaggaatagctgcagaaatctgtggttggtgttgatcgacccctctgttgtgtcgatctacaccgatcacgtctgcattctgctcctgaaggtgtcgatcgacacctagttggtgtcgctcgacaccgagccctgctgcgtctctagcagctaattgcgcattgaggcgcgccagatcctcattggcgtcctcaggtaggatgagtgtatgatcatccaatttctgaccagcctcattgtaggcttgcccatcctcatctctcaaaactcgttctgcatcagctcggatgactctttcagccattgctaaccaaatatcactagtatatatataattttaatataatttttaaataggtatttaaagtaataaactttttaatataatactaattaaagatctaaattttataacattttcaacaagcaatctccattcttcatataactaatatattttatatattaacaaataaaattaaaattttctatttcatgactcaattacacacatgtatatatatgaggtctattagctgacaaaaaattattaatatatgatgaaattgaattaataataagtattattattatttatatatggacttttatgttttgtacgtatggattaagataaacaaaatttataatgtatgagaatataaaatatataatataacatatagtttttctttataatatttctattaaccaaattgtaagagctatatatatatatataatacggttcaaattatcctaagaactactccctcaaataagagatcaattgtagtatttaaggatcgatttccacaaagttcttttgttcacacaatgaattcaatgtcgagattaagctagcaggataaaattgaaagtaaaagaatacaaagtaaaaagacagcagattgattggttgtaaacgatgaaataaagagataggaacagggtattcttaggaaactattggttagtagatctaatgaaagctaggttgttatcgaacaattcttaaactcaaactctaattatgcaataaccgatggtgttccgcgaaactccctatgcctatagctaagaataactggagaagccgagagatctttaacctaaacatgcattctaaacgagttcagttgttcaccttagtagataggccaatttttattacacacctataaaccaggctcatcaaataatagatccaactacaaatacctatggtgggcatatctatttttctgtattcaagatctagttaattagatctagcattaagaataatcaaagatgaagaattatacagataacctaacaggggggcgatctacgaaaccatatgaatccctaatgagaaacctattcctaataagtaaactacccagacatattgaatgaaacaaacaacatatttgatatagaaagcataaacacagcaaataagataaaggaaaaaagagatctcttcactgtctttaaaactgaatgaatctctgaagaacaagggatgaatagcttatgtctctaaaaaaaaagggttttgcaaagaacttgataaaagaaaatttaggtctaaaaataatataatacccctataaaacgtccacggactaataatgaaaatggggaagtcttcaggggcaaatttcctcttctgtaaacttggaagcgtcatggactttgctgggtcaaaactggtgtcgatcgacaccaggagtgtgtcgatcgacactcctctgaatctggaactgaaaatcgtccttagcttcatttcccttagcttttgctccaaaatttcttcttatctccattgttgtctcactgcatagaatacctgaaataacactaaaaagactcgagaaataacataaagactcaaaatcctaatcctaaatcatagataaaatcagtaaaaatagggatatatcaatatatatttatttttttgatagaaagactttttaattaattattttaaattcaattttattatatatatataaataatttaccttgattgtggtattgacatatctcccgttgagacaatatctctaatataactagtttgaaaatttcattccggttcaactgcttgaaatgtattatctttggcttgatcttagtattggtgtctgttggagctggatttccctccaggaatccacctgcgaaaatagcaagccagcccacaaaagcccaccaagcccaccaagtagaggacctacgcaactaatgagcccacatacgcgaatgggtacttgggccagataaacccaatcacctgatgaagggagataagcgaataacaacctaggaactgatgaggagatattcgcggagcggacctgatatctcggaactgacctgccgaatatccaggacgatctccgcagatcccggacggagctaccacgtgcgtagacctatataagggagcaaggacaacttggaagacacattcaattctgcttatattcacacacatacttttacacttgtaatctcctttcacattatcaatacaaaaagtccattcgttcttagcaatataactctcaaggtttctgtgaagatctagccctcctttctcataatctcaattacaaatctctagtgtggatttcagaacccacatttggcgccgtctgtggggacagaaatagatcattccaacaccgtaactaacacatcaattgtgaccaacgatcatggatcccaattcatccaattcatcgggatctggcttaccagttcagatcccaaacgatgacgttacggacgggcacctcccaacggatctccctctccgaaccagggttgatgctgtccataacgctgatgcggaggacatctcccaaaactcgaattcttctggatctgaccaaatcactccccctccgcaaacaaggggcggagaacaaaacgtcacgatacaacctccaaatggagataacccggtcaacccgtctaatcaggtccctccgcgacctgccagcgaattggctgagctccgcgcaatgatcatgaacttgatcaacttaaccaaaaaccaagaaattgcgcatcgcaacctcgccgcaattgtgggtcagcaaagatgcgactccactcgcttgggacatgaggtagagcgcgataccgcgggtaaggaagttcccaccccgcgaaactaggattcctgcccagttcccatagatttgacaggtaccgtctccccgaccgatcctactccaaagactcgtctagacttcgcctcgatagacgtcacacctcctaacaactggcaggtcgctttcttaaaacaggattctgtacttatcgaacaaaggacgtctgaagccgatctctggagtctcactctacttcaaaacgaatcccatcgatcttacgttgaaaaattcaaagcaattaaatcgaagattgcgaacctaaacgaggaggtagccatagcagcccttcgtaacggtctgtggttttcctctagattccgtgaggaactcactgttaggcaaccaatctctttagacgatgcccttcacaaagctctccacttcgccaaaggcgaagaggagctcgctgtgctggccttaaagttcaaagaatctaaaacgcaaaatgctcctcttgcaattaaaacccccttcaaaaaggaaaaccaaacgcaagggcagcataccttattcgcaatagaagaggcagctgaggacgagagtccagaacttgacctcggaaaatattgcaagtaccacaacaaaagaggacattccaccgaggagtgtcgcgccgtaaaaaaattaatcgcagctgggggcaaaactaaaaaaggttcaaaccctaaagttgaaacccctcctcccgacgaacaggaggaggagcaaactcccaaacaaaagaaacgggaacgaacactggagggaggtgactctcccccacccgctaggagagaacgcatagacctagtctttacggaactcgatctaggtggcaagacaggaaggtcagtcaccacacctccctccgccccgcataagaaaaacatgaggtttccattacgcctctcaaaattctgcagaagcgcaactgagcacctctccccgaaacgcatcgatttcatcatgggagggtctcagctctgcaacgactcaatcaattcgatcaaaactcatcagaggaaggcagattcctacacaaaaggcaagagcctgatgatgggacctgaccacaagatcacattatgggaaagcgaaaccaccgacctcgataaacctcacgatgacgctattgttattcgaatcgatgtaggcaactacaaactctctcgtataatgatcgacacaggcagctcagttgacgtactcttttacgacgccttcaaaaaaatggggcacctcgattccgagctgcaaggcagaaaaacgccacttaccgggttttcttgtagtcgacaagaaagctcctttcaacgcaatactgggaagaccatggctacacgccatgaaagccgtcccatcaacctaccaccaatgcattaaattcccctcggaaaaggggatagcagtcatatacggcagccaacgcagctcccgaagatgctatatgggcagctacgagcttatcaaaaaagctgaactcgtagtactaatgatagaagacaaactcgcggaaatgaaaacagtcagatcctctgatccttctcaatgcggacctcaaaaatcatcgataacgcaggtctacatagacgaatcagatcccaaacaatgtgttggggtaggtcaagacctcgacccagcgatacgagaggatttcataacctttctcaaagaaaacaaagacagcttcgcctggtcaagtgcgaacctccaaggaataagcctcgaggtaacctcacacgaactcaacgtcgatccgacctaccgacctataaagcagaaacgtcgcaagctaggtcccgaaagggctaaagctgtgcaggatgaggtcgatcgtttgctcaagatcggatcgataagagaagtaaaataccctgactggctcgccaacccggtcgtcgttaaaaacaaaaacgggaagtggagagtatgcatcgactttatggacctgaataaggcatgtcctaaagacagtttcccactaccacatattgaccgactggtcaaagccaccgcgggacacgaactattgtccttcatggatgcattctccgggtacaaccaaatacttatgcgcccagatgaccaagaaaaaacagcttttattactgactgttataaagtaatgccctttggtttaaaaaacactggagctacttaccaaagattggtgaacagaatgttcgctgaccaactaggtaaaacgatggagctctatatcgacgacatgctggtcaagtcagctcacgaaaaagaccacctcccgcaattaagagaatgcttcaaaatcctaaacaaattcgagatgaagctaaacccagagaaatgctctttcggagttccctcaggagaattcctcggatacctagtaacccaaagaggcatcgaggccaatcctaagcagattgcagccttcatcgacatgccatcgccaaaaatggcacgggaccggccgtatcgccgccctcaacaggttatttatcgcgcacctccaggtctaccgataaatgcgtctttttctatcagctcctccgaaaggataaaaagttcgattggaatgaggactgcgagcaagccttcaaacaattgaaagcatacctgtctgaaccacccattctcgcaaaacccgaagaaggagaaccgttgtacctgtacacggcagtctcctgaaccgcgataagcggtatcctggtgagagaagatcacgaaggacagaaaccgatctattacgttagtaaaacgttgatagacgctgaaacccattatcgagcaatggaaaaactagcactggccgtagtcatgtcagctcgaaaactgagacaatatcttcaatcacatcccatcgtagtgatgacgtctcaaccaatcagaactattctgcacagtacaactcaatcaagtcgactagcaaaatgggccatagaactaagtgagtacgatatagaatatcgcaccagaactagctttaaagcacaagtcctagccgactttgtaattgagctcccgttagcggacctggatggaaccaactccaataagaaatggctcctccacgtcgatggctcctccaaccgacagggatctggagaaggaatacaactcacctcccccactggggaagtcatcgaacaatcgttccgactcggattcaacgcatcaaacaacgagtctgagtatgaagccctcattgatggcattaagctagctcaaggaatgcggatccgcgatatacacgcccatagcgactcccaactcgtcaccagccagttccacggggaatatgaagctaaagacgagcgcatggaagcgtacctcgaactagtcaaaaccttgacccaacagttcgaatcattcgaactgaccaggatccccagaggagaaaacacctctacagacgccttggcagctctcgcctccacgttagatcctttcgtcaaaagaattatcccggtcgaaggaatagaacacccgagcatcgacctaacagtcaaacacgctgggatggaaacctcggcaacttgcaactttacgcgagtaacccgaagcaccaccgccgcggctagagccctcgcagcagccgcagaggcaggtgcagcggaggaagaggccaagctcagaacccctgaacaacttgcctcgtacgaacctgaaccgtacaacgactggagaatcccaatcatcgattacatcgaacgagggatcacacctcccgacaagtgggagaccagaaaactcaaagcccagagcgcaaggtactgcatcatggaagggagacttatgaaacgcagcgtcgcaggtccctatatggtgtgtacctacgggcaacaaacaaaggacctcatgaaaagcatgcacgaggggcaatgtggtagccactatagtggacgtaccctccgctgcataatgctagccgattgcatagctcattcactcaggtgcgataaatgccaacgacatgcacctactcttcatcaacctcccgaggaaatgtcctcgatatcttctccttacccatttatgaagtggtccatggatgtcgtacgtcccatggaagcctccggtgggaagaagagactaaaaaacctgctggtcctcaccgactactctaccaaatggattgagggtaaagccttccaacaggtaaccgagaaacaagtcgaggtcttcctattggaaaatatcgtataccgacatggcataccttatgagatcgtcaccgataacggactaacctcacctcgggaaaaatcaaagcattttgcgacaagtggaagatccgccttaccacatccaccccccctgttacccacaaggtaacggacaggcagaagccgccaacaaagctatacttagcaacatcaagaaaagacttgattccaaaaaatcaatgtcatccgacatgctccacagagttctctgggcctaccgaactacaccttgcaaatcaacgcaagaaacaccgttctctctcgcctatggtttagaagcagtaatccttgtcgaaaccatagtaccaagcgtgagaaggacgccagtcctgctaacaccggaacacgcaaatgttagaggacaacagagacttcatcgatgaacgcagagatcacgcaatgatccaagttcaaaactatcaacaacctgccgtccgctactataactccaatatcaaaattcggagattcgaagtaggagagctcgttttacgaaaagtgttcagcaacacgagagagctaaacgctggaaaactgggaactaactgggaaggtccctatcgaatcaccgaggtggtacgtgacggcatctataagctcgtaaaagttttcaacggagtacctgagttacggccttggaatgccatgcatctcaagaaataccatggataggtactcaaaaacaatcaaactacgataaggcttgatcccttggcagggtacgtaggcagctcccccaagagcgcagccatcacttcaatcgaattacaaaagggcttaatcccctaaccaggtatgcaggcagttccctccgcaaacgcaattaccatctcaacctttccatttgaaagacgaaacttcaataagaaaaacatacatcacatcttccatcaacgaagatcagctgctcacctgacagttcaatcacccttcggtatcgagcagggacctgctcgatgatcaaacgccagatcgtcgcttgctttacctctttttgtacttaacaatttcgagagaagaataaaagaaaattttgatactcattatcatgtttcgcaaaacaatcatttacactatgatttaaaactcattcgtaatcttacgatacccaaagcccaacacccgaatgttggcggatccattttgtgatctcgcttctaaaacgtcgatagtgaactagacttataaaaacacatcactttggcttcatcggagctcacctactacaaccatatctaactctttcgctatcaacacataacatagtaaacaaggaagaaacgaaggtttcattcgcgacttggcgataccaaaagcccagctcccaaaatctggcaggtcccttgtgtgacctcacttcaacaggttcccgagacaaaacaactcaaacttactcaaagctttaaccttcgaagaacatatcatatcacatccgaaataacttggactcgaaacaagtccaattattatctggaacatggacaaagcaaggtgatcatacaccaaaattaacgaagtgtcaacactcgaatggaaaaccaaaaaatacttgctaaaaaggataaaagccttggcatccaagtacttaaacgaacaaaggataaaagccttcccaggcaccaagttcaaaaagcaaaaaacgaaaggataaaagccttccaggcattaattctgaaacaaaacacaaaatcctaaaacaaacaaggagcgaaagtgatcactccctcgattctccggctgacgtagcgaagacagtaccagaaccctccgcgagacctcccggaaaagcgtctttgttgctcccgaactcatccaagccaattggcgtcccttgctcgtcgacgtccatcggacgtaccaccgaaatctctaaaacctgcgggagatccaacttgcttagagtaaagtctgatacctccttcgatttgtaccgcgcctctaggtcatccagctctgcttgcagccgaggtttctccacggtcagatcgatagcagcctttgtgatctggtcgatcaaagccaggttcgactccacctcggccgcttgcccctccagcaccgtgtactcctttttggcgacccacttctccttgatcccagccagcagcttcgaatacgcagtagccagctcaaccttagcatcgtgaaccgccttcttcgcaccttgtgcagtcgaagtcaggtccatcacctttttggagagctcctccctcctctgctccaagcgatgaatctgcctccggaatagcagccgcaggttccatcttctcctctctgagggaggcgaccccctggtcgctcacgacaaactcagccgccagatgcacctccggctgggtccgagctctcttcggagaggacggtgcaccatcaaaatgaacaactgcagatggcccagacacatgagcgacctgattgttatctgactgacctgctgcagtagaggtcccggtattgatcttaagaaacgagggatgagacactgaggcagatgcgttggagacggctagagtgtttcagccgcggacaccatggctgacagatcaccagtacgagcaggagccccgacgttggctcgttgaacacgaagacttggacgcctcattcttctaatgagcgggagttctgaagtggagctggagtcaggaggaattgaacagacaaagcacaacatgtgttagttagcagctcgaattgcgcagctgtctcgataactcgtacattttaaaaaaaataacagaactcgtacctatgggcagattagcctcggggctcggttcaatccgcgggacctctttgatcggatctagctgtgctgcaggaaggacgattgcatgaactgctagagctacgggagctgctggaactacggcaagagcagctacgatgcgatctctgctaaaagtggcccagttagtctaatcacgtcggagaagggttaacagctcgagttccgtcttagagagagtaacttccttggtccttgctgcaaaccattaaaaaaaacattagtttcagtactaactttcagcaaaagcaatcaaggattcgacacaaacaacaacaaaaaaactcaagaggctcaggtctccatctgacccaggttggtagaccaggtcctcgttattctcgcaggatcaaagctgtcgattgaatgacgatctactctgaagaagaagtacttggatcgccaattggtgtctcgacaagccttcaaactacctaggaccaggaatccgggacgaccactgatgtagtacgtcccctggtcgctcctagcattggtcttgacctggcagagctgaagaaggtcatggcagctgaattatcccgagcccaggtgaataacgccagtacatggcggacgaagttcgggcacatctggggaaaggcgaggccgagacagtagagcatctcgaagatacacgccggaatcgggaaaaataggccacatttatcgaagaaattagcataagcgcagcaccacccgaccgacacgttctcaggatgcagcggcggccttgggagtatcatagttagcccccccggaacctggcatctcctccggaggtcgaccaggtcgctgttcgtcatcggcgtgcctcctccttgcttggcagcctttttcttcttcggctaatcggctctggttgatggcggacgaattggacccatttcgcctagggttatgacacgtctttgtactgtggttgcttttattctgggaatcttcgaagtcgctcatcgttgggtttcgacagaaaaggacgagagagatgaaagaaaagagcaaaagagggcagatcgagaaagaggggagtactagtagagaaacgaaggagatagcaaaagaaaaaagacgagatttttctatctttacaaaacgaaacacagtaaataataaaggaggagagaagttaccttgacagtcgtgtgagttgttgtgacgtcaagtggagagatgggaagttatttaaagccgtcatcaccatgattttcgagattgcagagatctcttctccgcgcctgatctagaccgtcaaatgcggtgcgctgaagagacgctccatctcagtcgttcacatcagcaacgacttatctcgcgtatctcctcgaaatctttcggttaaggaatctgaaatcaaatcgttttgttgagtttatcctcaaaaccgactgatcttatcacatctatcatctcatcaagaatattttcgcaatcttacctgacctatatgtccgctcatcgagttcgcctactcactcaatgggctggggggcaaatgttggagctggatttccctccaggaatccacctgcaaaaataccaagccaacccacaaaagcccaccaagcccaccaagtagaggacctacgcagctaatgagctcacatacgcgaatgggtacttgggccagataagcccagtcacctgatgaagggagataagcgaataacaacctaggaactgatgaggagatattcacggagcggacctgatatctcggaactgacctgccgaatatccaggacgatctccgcagatcccggacggaggtaccacgtgcgtagacctatataagggaacaaggacgacttggaagattcattcaattctgtttatattcacacacatactcttacacttgtaatctcctttcacattgtaaaatctttgtcattatcaatacaaaaagtccattcgttcttagcaatataactctcaaggtttctgtgaagaactagcgctcctttctcgtaatctctattacaaatctctagtgtgaatttcagaacccatagtgtcaatgctcaaactcctcattgtgagctgtccaaacataaaagttgggttgaaaccctctattatacgaatgtttagatacggtagctatagaaataagttctctatttgtacattttcgacatggacaccatattcgacccccatcatataatcgatagtttgcaaattccatgaattgacttaacccggcttcatattcgtcggatacacgtctagtgcgtggattaatacgattatatatccactttcttacgatttatatattattgcttgaagacattttttgttacaaagaagaagataatagaatagaattaaaggaaaaaaagagatggtttactcaaatgcaaaattttagaatgaatatgaaagaattttttattttttgctagatatgaagaagagagaaaacgaagccaaagattcgaatgaatatataacaaagaaagaatgaggcagcgtaacgatctgggcactgtctcggagagaggctcggtgaaatagacatgtctgtgaagatgcggactaccagcacctggacagaaagaccctctgaagcttcactgtccctgggattggctttgggattggctttgggcttttcctgcgcagcttaggtggaaggcaaagaaggaagccaaaaattaagcaacaacttggtggaagatcgacaagacacctatcaatttgctagaataagactgccacaaaagatgtggccttgtaatcaacttgctacaattacactgtcacaacagtagtggttttggtgaccaatttgctaccgcagaaagagtggcctttggtcagagatagggtcagtcacaagttgtcataattgctacgaaagaaattgtgagtctccacttcgtttctagttgcgaccgacacaattgttacaaagtttaaacaatagtaataatcttattttgtcacaaaagcttgtggcgaaacctatttttgtgaaaaattacaacaacaattttgatactaatcaactttgttgatatcctttattgtcatcaatcgtcgctaatagctacaaattgactagttgataatagtcgtaaaacgttaattgatattctattcaactatttttacaaaatcggcgacgaattttgttttgtggaactttgcaacaaaattttaaacacatttggtaacaaatttgttacagaaaaatttgtctcgcaatatgtagctaatttgctacgggttgtaacacattagctacattgtttattaaatcgcattctgttcttagtcgttaaaaatgtagctatatggtctaggaagaaaactcgtttgtttattcatgtatatatgtaaatttattatcgattttaatccttctgcattcaatctatttcatggtggaagaagataagcgtgatgtttttggttcacatgatattagtattcaatcgtgattaaatatatattcatctaatctaaaatagttgaaagtatatttgtgatccaaatcaaacaatagcgaagaagaaatttgtagaagcccaaacagaaaatttcattaaaactaatcatgaagaaatcaatattcattcgaaagaaatctaatctaaaatgtttgaaaagctatttgaaagtcgcaattttttttaaaaaagttcgccctagctatttctctctctagcacaaccttcgaggagtcatgttccgacggggtcagctcttgccggcgttgctagatctagatttttgttttgtttttgtcacccatatctaatgatcttgctcgtctcgtattatgtgctcatcggagattcacccctgagatctttctccttcgtatccatcattttgtttgctcctcatagtgtcgtcaatgttgctttctcttcttccgtcaagtttcagaccttgccgacgaagaccctttggatttggatcttgtcagagacttcttctgtgaagaccatctgctaccttgctctcggcgtgaactctttgggtacgttaggcttggttccgcctttcttgtccccaagtgacacgtacgtagccttccgtactacggtatgcagctcctgttctagtcttgtcttggtttacacttgtacaaggtaccacgataagactgaccaacaacagcttgccgtgacgtccctctccgacaagttcgtgtccttccaagagcaatgcaacggccagctcgcagggttggcggcgaaccattctaaaatcagatcagccaacaacgcgtacgcggagcgagtcaattcactttctgcaggaaccacgcggactactggagctcgaacgcgactcaattttcagggcaccatcagcccgagtgtccaaaattcaaaggaagcctctgaccagcagactccgccgccctcggttgaagtcgggacgacatcgactcagaatccaaccacctcgtcttcaccagcaggatttgccgcagtttcaaatgagacaatagctcggacgctagttccacttgatcctgccatcagactaccaatctccgatcctcgacaagagccaagcgcagtcaattcggagcttcaaagccttcaagatcaaatctgggccatgaacgcaaaagtccatcaggccactacttcggctcccgaagtggaaaaggttattgaggcaacgaggagaacaccttttaccccaaggatctctaagttgcgtatccgtgagttccgagatttcaagcttcccgtttataatggaaaaggagatccgaatgagcatttgacttccttccaagtcatcgttcgacgggtccccctagagccatacgaagaagatgctgggctttgcaagttgttctcggaaaatttgtcaggacccgctctcacctggtttacccaactggaagaaggctcgattgacaatttcaagcaactctctactgcgttcattaagcagtacggatacttcattaagagtgacatcactgaagcccatctttggaatctttctcaatccgcagatgacccacttcggacgtatattattgtgttcaaagagatcatggttcaaatacctagcttatctgactcaactgctcaattcgcgctaaaaaatggtctttggcatgagtcacgcttccgcgagtctttgacagtaaaccggcctgagacgattcaagatgcacttcattgagcaacgaactggataaacgcagaagaagaacgagcttttctagccaaaaagttcagtgcttcaaatgttgcaccaaaggcgcctcaacccgtaaccaccaaaaaacccgccgagccctgaaaacctacagcaggaactttttccgttgagaaagaatcatcgaagtcctctcctaaagctt

SEQ ID NO: 1180 - DNA, 91299 bp, Arabidopsis thaliana
gaattcttagggatgggataaagtagttgtggaattcgtagtctgtagaatggttaagttttagaattgattgaatccctttaggactagttgcgtttactgcttatttctttctgatcaactggaattcgatcccaagcattcccgcacccagaaggtgttcgatggaatgcttgatccactagttcctgagatatgcgtctctatcccaagggattggctgtttagagcgtttattgactttatcagtctgttcttattgcctacatagttagattccgttaatgggaattagtctgggctagctttgcttgaggatttctatcacgggagtgaattgatctgttgttgaacctgttgtctagggatagcttgattgcgcttgttaaccattcgaataggctaggataccactctactcgattaccccatccttaggaatttctcgtctatcttatttctctgttttatcgttatcgcttaatcgttctcattgcctgcttcttagtatttacaatcactcgaccaacttactcgaccacacccagtgtctggcaacagactgtgcagtcgagtaagattgtcttgtttcctgtctgttactcgtccagtatactcgaccacacccagtgtctggcaacagactgtgtagtcgagtatagctgtttcatatcctgtctgttactcgacctgttactcgaccacatcctacttctggcatcagcctgttgtggtcgagtgaatttagtaattctgttattgcttctgttttctgcatgttcgcttaggactgttagaaaccccaaaactgttattgcttggcttgacttaatgacttctgatcacatctcatctgtttgcatcacacccatttggattgacacctaaaatactacaatgacatgaattgtgttttaggataattgattaaaaatttattatcaatttggcgccgttgccaattgggtgtttgtttgctatatttgagatttcagaattgttaagatcaagttcgtttttgttataagagatactaacattgtgtcttttcagaatttgtatttcaggtacttagcaacacactttattcgtctgttatagtcaggttgatacatgtcatacacggtcacaagggaattagaacttcctattcaacgataacatcgaccgtattgctcgccaactgaaagaacggacagcaacagacacaatggctgacattgtagatgcgcaagagcaacctaacaacattggtgctagtgacttccctcacaaccacaaccagcgtcatggcattgttccacctccagtacaaaacaacaactttgagatcaaaagcagtctcattgcaatggtgcaggggaacaagtttcatggcttgccaatggaggatccactcgatcatctagacgagtttgaaaggctctgtagccttactaaaatcaatggagttagtgaagatggtttcaagcttcgcttgtttccattctcacttggagacaaagcccatctgtgggaaaaaacgctaccccagggatcaatcacgacctgggatgactgcaaaaaagctttcttggcaaaattcttctcctactccagaactgcaagactccggaatgagatatccggattcactcagaaacaaagtgaaagtttctgtgaagcttgggaacgctttaagggttatcaaacaaaatgccctcatcacggatttaagcaagcttctcttctcagcacactctatagaggcgtcttgcctaagataaggatgctacttgacaccgcttcaaaggggaatttcttaaagaaggatgttgaagaagggtgggagctagttgaaaactttgctcagtcggatggcaattataatgaagattatgacagaagcatccgcaccagttctgactctgatgacaagcaccgtagagacatgaaagttctcaatgacaaactagacaaaatcctccaagtgcagcagaaacatgttcacctcatctctcaagatgaaccattccaagtacaagagggggagaatgatcagtgtgcttacagctatgttcagaatcaaggtggctacaacaaggggtacaacaattacagacccaacccaaatctgtcatacagaagcaccaatatcgccaaccctcatgaccaagtctaccctcagcaacagcaaaaccaacccaaaccctttattccttacaaccaaagccaaggattcgtcccaaagatgcagtttcaaggaggatatcaacaacagcaaccaccacctggtttcacaccacatcaacaacagccagttgcgcctcagaattcagacataatgactatgctccagctgctcattcaaggacaagccacaggagcaatggaaatcgctaagaagttggataaattaaataacaaagtcgaccgacaaagcgtcgaacttaacagcaagttcgaagcactgagcactaggatgagatatgtggaaggcatcctcgctacaccatctgttaacaacaacccaggccagcttccagggagagcaatccagaatcctaaggagtacgccactgctcacgccatcaatatctgccatgatcgagagctgccaactcgacatgcctctacctccatcactagggacagtgaagttcaagaaggggaggattttgttcagaatgaaattcaagctaaaatagcattagaggagcccatactcgatcacagtactcgatcccaagctcaagtagtactttcttcagttaaaaagcctgcatctgctaaaaccaaagataaagtctttgttcctccaccctacaagcctccattaccatttccagggagatttaagaagcaactgataaagaagtatgaagctctcttggaaaaaaaattgaaggaccttgaaatcacaatgcctctagtagactgtcttgcgctaataccgaactcacacaaacgtgtgaaggacatgattacagagaggatcaaagaagttcaaggaacagtggcgttacctcacgagtttagtgcaatcatctagaagaacattattcaagaaaagttggaagatccgggatcttgtactctaccatgctctattaggcaactgactttcagcaactgtctatgtgatctaggagcttcagtcagcgtaatgccactttctgtggcaaggaagctgggatttttcaaatataagccatacgacctatccttgatccttgctgataggaccttaagaaaaccttatggcctactagaagatatgcctatcaagattaatggagtacaagtgcctacagattttgttgtgcttgagatggatgaagaacctaaggatcctctcatcctaggaagacgtttcttggccttagttggagcagtgatagacgtcaaagatggaaagattgaaatcaatcttgggaaggatatcaggttacagtttgacatcaacaaaactccaagaagatcaaccatagagggacagacctttggggtccaaggagtggttacagaagaaagatttgaaactgaaagagtaaaggaaccgagtttagctccaacacgaccttcaagctcaaccacatagtctagtacgctctctatagttgattggctagaacttaaaaggaattctgatctcaaagaagaaaccatccagaagctagcttgcactgttgaagaagttagggatacagtgagtcagatgcaaagggaagctattcaacctcaactcggcattgaagttataccaaagaagaagttcgtttcagaatggtgtgaagaagaagactacccacaagaaatttaagaagcttataaggaaagggccattgagtgctcaattacagacatgtcaagagagcaagctaagtccgatgttgtatctgctaaggaagaagagaagatttcaattcttctctatcaccctccttaagtcttatgagtgtgaggagtcaagctagagacttaaaacaagctcacttgggaggaagtcccatgtctatcttcgtaaatatcttttatttttccttgttatttttaatacattctgttagagttttcaggagataagaatgaagagctgagggaaatggattctggctttgagggaacaacaatacactcgaccacagagcaatcaaagacactcgacattgttctggcttctccacgctaggaaatcactcgaccacaccctacagggagcgaatgaagatgtgatcgagtatagcgaatgatgcaatcacgacttccccatgtcagtaattcactcgaccgcggtgctggctgcagcagaagaagagaggtcgagtacccccaaggggaagctgagacacaacagggagattcgtcgatggcctgggagtaatcacaggcagctattgacgaccaactccgctccttcttccactgaggtatgcacctcactccaccattgtaatataccatctcttgtttttattttgtttttgtgatgtgttttgtcctgagtactctcttccaaatttggtcacacagtggactgtgtgatttaagtttgggggagggctcaggaagtgtgtgttgcattgtatataatcttgagtctgcattcatctaaggcatagaaaaacaaaaaaaaaatgaaaaattttagaaaatgatttcacaaaaatagagtgctcatgtagttgcattgcatttaggatcgagtctagagtgtttcgtttaggattgttgcatatgcataggggataatgaagagatagccttgtaagcattttagttcaccagataagctcagtgccctcgttgttagttgtttgatgcgttgtcattgaaattgaagtaaaactgcaccatgcctagattgctctactcgaccacactgttaggatctgatatcattccctatcaatttgaacttgaatctgatttagaattatcatgtcttggcatcgaatttgaactcatggataccctaaaatacttggattttcttactcattttaaccactcttgttgatccaagtagctgactctccttattagagcagttaacccatacccaaatctgaactttctttcaagccctatatcacttgtgagagtttgtgaggtcttatttcgattgagtttggtagaaagtgttaggttcgtaacgacagagatagtgtctcatgtagttctagttcgcgttcttcggactggataggactaggtgggcgcttatatcatgggttgggatgtgtttaaaagaaaagagggaattcattgttgatgaggaaagggaaagaattctaggggaagtaagctaaagaagttagaaaaaaaaatctagtaaaggttttgggaatgttaaagaaaagaatgaggttcttgttagctaaagaagaagggttaaaagcctttggttttaaagataaaaaaaaacaggaaccttagttgttaaagaaatccaaacccgctagatgtatcagagcgttgagaaagcttctcttagagttaagagaaaagaaaagaatgatatgaaaaagagtttgaaagattcatgagtgcaaagggtagagtttagttgggacaggagttgggattaccattagaacttcattgttatactctgggtagatgggatcttatctatgtatgcataacttgggacttacctttagcattctactaaagctcaatcattcttgagggatcccctgttacttaagcctattttgtaagggaccatctttgtctcttgaccttcaccttagccaaatgagttcattgatgatgcactgcttgattcacgttccagaactaatgaatgttaaagagattggtagatttgaaagcatgtgtaggtcgagtataagagacagattgattgataacaaggcatagctaacgtttttcagtagaattcaatcatatcgcatcttagaactaccaacttggacattgattttatttgctctatcatatgctttggttctgagtccccgccttcactcctctccttcaactatgtcttcttatttgcttgagggcaaacaaagactaagtttgggggagttgatatgtctataatttgcatattttcagtgtccattcatcatcgttttgagtccagtttcgtatcattcatcactgttttatatcatttctcatcatgcttgcatactttgcatgattaggatagctttgcatacatattgcatttctgagttgttttcaggtgatttggagctgtttgcaagcaaattggaagaaacgagccagaaccagaagacatactcgacccccaggtcgagtgactttggagccattcttcccacatactcgacccccaggtcgagtaacctcagctcaggccactcgatgacactactcgaccccctggtcgagtatcacttcgccacaccacctgataacactcgaccaatcactctaccaagttactcgaccccctggtcgagtatcatcactcaccaccatcagcatcactcgaccggacactcgatcacatcttcacagtctactcaaatccgcactcaaccagaaaagctgagcacaagggagggaagaggagaagacaaagtgtttggaagcggcctggacctccatcggatcacgaagcccatctcggcccattatctctctatgggccgagcgattaggttattggcccgtctactatcattttatttcgttttgtacaaatagatgtcttagggttctgtcctgggacatccagtcgacattgaatttttgcttcagttttattttctattttactctactgcgccgtttttgcttctgcaacctgtaattcgagatttttccaagttattcagattccgcatttgatttcatctgtcatcttgtttctctactctttatctctttacttatgcaatattatcgtttatctgcgtttatatctttgagcatgttgtctgagtagtgacttagaattcttagggatgggataaagtagttgtggaattcgtagtctgtagaatggttaagttttagaattgattgaatccctttaggactagttgcgtttactgcttatttctttctgatcaactggaattcgatcccaagcattcccgcacccagaaggtgttcgatggaatgcttgatccactagttcctgagatatgcgtctctatcccaagggattggctgtttagagcgtttattgactttatcagtatgttcttattgcctacatagttagattccgttaatgggaattagtctgggctagctttgcttgaggatttctatcacgggagtgaattgatctgttgttgaacctgttgtctagggatagcttgattgcgcttgttaaccattcgaataggctaggataccactctactcgattaccccatccttaggaatttctcgtctatcttatttctctgttttatcgttatcgcttaatcgttctcattgcctgcttcttagtatttacaatcactcgaccaacttactcgaccacacccagtgtctggcaacagactgtgcagtcgagtaagattgtcttgtttcctgtctgttactcgtccagtatactcgaccacacccagtgtctggcaacagactgtgcagtcgagtatagctgtttcatatcctgtctgttactcgacctgttactcgaccacatcctacttctggcatcagcctgttgtggtcgagtgaatttagtaattctgttattgcttctgttttctgcatgttcgcttaggactcttagaaaccccaaaactggtattgcttggcttgacttaatgacttctgatcacatctcatctgtttgcatcacacccatttggattgacacctaaaatattacaatgacatgaattgtgttttaggataattgattaaaaatttattatcaatttggcgccgttgccaattgggtgtttgtttgctatatttgagatttcagaattgttaagatcaagttcgtttttgttataagagatactaacattgtgtcttttcagaatttgtatttcaggtacttagcaacacactttattcgtctgttatagtcaggttgatacatgtcgtacacggtcacaagggaattagaacttcctattcaacgataacatcgaccgtattgctcgccaactgaaagaacggacagcaacagacacaatggctgacattgtagatgcgcaagagcaacctaacaacattggtgctagtgacttccctcacaaccacaaccagcgtcatggcattgttccacctccagtacaaaacaacaactttgagatcaaaagcagtctcattgcaatggtgcaggggaacaagtttcatggcttgccaatggaggatccactcgatcatctagacgagtttgaaaggctctgtagccttactaaaatcaatggagttagtgaagatggtttcaagcttcgcttgtttccattctcacttggagacaaagcccatctgtgggaaaagacgctaccccagggatcaatcacgacctgggatgactgcaaaaaagctttcttggcaaaattcttctcctactccagaactgcaagactccggaatgagatatccggattcactcagaaacaaagtgaaagtttctatgaagcttgggaacgctttaagggttatcaaacaaaatgccctcatcacggatttaagcaagcttctcttctcagcacactctatagaggcgtcttgcctaagataaggatgctacttgacaccgcttcaaaggggaatttcttaaagaaggatgttgaagaagggtgggagctagttgaaaactttgctcagtcggatggcaattataatgaagattatgacagaagcatccgcaccagttctgactctgatgacaagcaccgtagagacatgaaagttctcaatgacaaactagacaaaatcctccaagtgcagcagaaacatgttcacctcatctctcaagatgaaccattccaagtacaagagggggagaatgatcagtgtgcttacagctatgttcagaatcaaggtggctacaacaaggggtacaacaattacagacccaacccaaatctgtcatacagaagcaccaatatcgccaaccctcatgaccaagtctaccctcagcaacagcaaaaccaacccaaaccctttattccttacaaccaaagccaaggattcgtcccaaagatgcagtttcaaggaggatatcaacaacagcaaccaccacctggtttcacaccacatcaacaacagccagttgcgcctcagaattcagacataatgactatgctccagctgctcattcaaggacaagccacaggagcaatggaaatcgctaagaagttgggtaaattaaataacaaagtcgaccgacaaagcgtcgaacttaacagcaagttcgaagcactgagcactaggatgagatatgtggaaggcatcctcgctacaccatctgttaacaacaacccaggccagcttccagggagagcaatccagaatcctaaggagtacgccactgctcacgccatcaatatctgccatgatcgagagctgccaactcgacatgcctctacctccatcactagggacagtgaagttcaagaaggggaggattttgttcagaatgaaattcaagctaaaatagcattagaggagcccatactcgatcacagtactcgatcccaagctcaagtagtactttcttcagttaaaaagcctgcatctgctaaaaccaaagataaagtctttgttcctccaccctacaagcctccattaccatttccagggagatttaagaagcaactgataaagaagtatgaagctctcttggaaaaaaaattgaaggaccttgaaatcacaatgcctctagtagactgtcttgcgctaatactgaactcacacaaacgtgtgaaggacatgattacagagaggatcaaagaagttcaaggaacagtggcgttacctcacgagtttagtgcaatcatctagaagaacattattcaagaaaagttggaagatccgggatcttgtactctaccatgctctattaggcaactgactttcagcaactgtctatgtgatctaggagcttcagtcagcgtaatgccactttctgtggcaaggaagctgggatttttcaaatataagccatacgacctatccttgatccttgctgataggaccttaagaaaaccttatggcctactagaagatatgcctatcaagattaatggagtacaagtgcctacagattttgttgtgcttgagatggatgaagaacctaaggatcctctcatcctaggaagacgtttcttggccttagttggagcagtgatagacgtcaaagatggaaagattgaaatcaatcttgggaaggatatcaggttacagtttgacatcaacaaaactccaagaagatcaaccatagagggacagacctttggggtccaaggagtggttacagaagaaagatttgaaactgaaagagtaaaggaaccgagtttagctccaacacgaccttcaagctcaaccactcagtctagtacgctctctatagttgattggctagaacttaaaaggaattctgatctcaaagaagaaaccatccagaagctagcttgcactgttgaagaagttagggatacagtgagtcagatgcaaagggaagctattcaacctcaactcggcattgaagttataccaaagaagaagttcgtttcagaatggtgtgaagaagaagactacccacaagaaatttaagaagcttacaaagaaagggccattgagtgctcaattacagacatgtcaagagagcaagctaagtccgatgttgtatctgcaaaggaagaagagaagatttcaattcttctctatcaccctccttaagtcttatgagtgtgaggagtcaagctagagacttaaaacaagctcacttgggaggaagtcccatgtccattttcgtaaatatcttttatttttccttgttatttttaatacattctgttagagttttcaggagataagaatgaagagctgagggaaatggattctggctttgagggaacaacaatacactcgaccacagagcaatcaaagacactcgacattgttctggcttctccacgctaggaaatcactcgaccacaccctacagggagcgaatgaagatgtgatcgagtatagcgaatgatgcaatcacgacttccccatgtcagtaattcactcgaccgcggtgctggctgcagcagaagaagagaggtcgagtacccccaaggggaagctgagacacaacagggagattcgtcgatggcctgggagcaatcacaggaagctattggcgaccaactccgctccttcttccactgaggtatgcacctcactccaccattgtaatataccatctcttgtttttattttgtttttgtgatgtgttttgtcctgagtactctcttccaaatttggtcgcacagtggactgtgtgatttaagtttgggggagggctcaggaagtgtgtgttgcattgtatataatcttgagtctgcattcatctaaggcatagaaaaacaaaaaaaaaaatgaaaaattttagaaaatgatttcacaaaaatagagtgctcatgtagttgcattgcatttaggatcgagtctagagtgtttcgtttaggattgttgcatatgcataggggataatgaagagatagccttgtaagcattttagttcaccagataagctcagtgccctcgttgttagttgtttgatgcgttgtcattgaaattgaagtaaaactgcaccatgcctagattgctctactcgaccacactgttaggatctgatatcattccctatcaatttgaacttgaatctgatttagaattatcatgtcttggcatcgaatttgaactcatggataccctaaaatacttggattttcttactcattttaaccactcttgttgatccaagtagctgactctccttattagagcagttaacccatacccaaacctgaactttctttcaagccctatatcacttgtgagagtttgtgaggtcttatttcgattgagtttggtagaaagtgttaggttcgtaacgacagagatagtgtctcatgtagttctagttcgcgttcttcggactggataggactaggtgggcgcttatatcatgggttgggatgtgtttaaaagaaaagagggaattcattgttgatgaggaaagggaaagaattctaggggaagtaagctaaagaagttagaaaaaaaaaatctagtaaaggttttgggaatgttaaagaaaagaatgaggttcttgttagctaaagaagaagggttaaaagcctttggttttaaagataaaaaaaaacaggaaccttagttgttaaagaaatccaaccccgctagatgtatcagagcgttgagaaagcttctcctagagttaagagaaaagaaaagaatgatatgaaaaagagtttgaaagattcatgagtgcaaagggtagagttaagttgggacaggagttgggattaccattagaacttcattgttatactctgggtagatgggatcttatctatgtatgcataacttgggacttacctttagcattctactaaagctcaatcattcttgagggatcccctgttacttaagcctattttgtaagggaccatctttgtctcttgaccttcaccttagccaaatgagttcattgatgatgcactgcttgattcacgttccagaactaatgaatgttaaagagattggtagatttgaaagcatgtgtaggtcgagtataagagacagattgattgataacaaggcatagctaacgtttttcagtagaattcaatcatatcgcatcttagaactaccaacttggacattgattttatttgctctatcatatgctttggttctgagtccccgccttcactcctctccttcaactatgtcttcttatttgcttgagggcaaacaaagactaagtttgggggagttgatatgtctataatttgcatattttcagtgtccattcatcatcgttttgagtccagtttcgtatcattcatcactgttttatatcatttctcatcatgcttgcatactttgcatgattaggatagctttgcatacatattgcatttctgagttgttttcaggtgatttggagctgtttgcaagcaaattggaagaaacgagccagaaccagaagacatactcgacccccaggtcgagtgactttggagccattcttcccacatactcgacccccaggtcgagtaacctcagctcaggccactcgatgacactactcgaccccctggtcgagtatcacttcgccacaccacctgataacactcgaccaatcactctaccaagttactcgaccccctggtcgagtatcatcactcaccaccatcagcatcactcgaccggacactcgatcacatcttcacagtctactcaaatccgcactcaaccagaaaagctgagcacaagggagggaagaggagaagacaaagtgtttggaagcggcctggacctccatcggatcacgaagcccatctcggcccattatctctctatgggccgagcgattaggttattggcccgtctactatcattttatttcgttttgtacaaatagatgtcttagggttctgtcctgggacatccagtcgacattgaatttttgcttcagttttattttctattttactctactgcgccgtttttgcttctgcaacctgtaattcgagatttttccaagttattcagattccgcatttgatttcatctgtcatcttgtttctctactctttatctctttacttatgcaatattatcgtttatctgcgtttatatctttgagcatgttgtctgagtagtgacttagaattcttagggatgggataaagtagttgtggaattcgtagtctgtagaatggttaagttttagaattgattgaatccctttaggactagttgcgtttactgcttatttctttctgatcaactggaattcgatcccaagcattcccgcacccagaaggtgttcgatggaatgcttgatccactagttcctgagatatgcgtctctatcccaagggattggctgtttagagcgtttattgactttatcagtctgttcttattgcctacatagttagattccgttaatgggaattagtctgggctagctttgcttgaggatttctatcacgggagtgaattgatctgttgttgaacctgttgtctagggatagcttgattgcgcttgttaaccattcgaataggctaggataccactctactcgattaccccatccttaggaatttctcgtctatcttatttctctgttttatcgttatcgcttaatcgttctcattgcctgcttcttagtatttacaatcactcgaccaacttactcgaccacacccagtgtctggcaacagactgtgcagtcgagtaagattgtcttgtttcctgtctgttactcgtccagtatactcgaccacacccagtgtctggcaacagactgtgcagtcgagtatagctgtttcatatcctgtctgttactcgacctgttactcgaccacatcctacttctggcatcagcctgttgtggtcgagtgaatttagtaattctgttattgcttctgttttctgcatgttcgcttaggactgttagaaaccccaaaactgttattgcttggcttgacttaatgacttctgatcacatctcatctgtttgcatcacacccatttggattgacacctaaaatactacaatgacatgaattgtgttttaggataattgattaaaaatttattatcaatttggcgccgttgccaattgggtgtttgtttgctatatttgagatttcagaattgttaagatcaagttcgtttttgttataagagatactaacattgtgtcttttcagaatttgtatttcaggtacttagcaacacactttattcgtctgttatagtcaggttgatacatgtcatacacggtcacaagggaattagaacttcctattcaacgataacatcgaccgtattgctcgccaactgaaagaacggacagcaacagacacaatggctgacattgtagatgcgcaagagcaacctaacaacattggtgctagtgacttccctcacaaccacaaccagcgtcatggcattgttccacctccagtacaaaacaacaattttgagatcaaaagcagtctcattgcaatggtgcaggggaacaagtttcatggcttgccaatggaggatccactcgatcatctagacgagtttgaaaggctctgtagccttactaaaatcaatggagttagtgaagatggtttcaagcttcgcttgtttccattctcacttggagacaaagcccatctgtgggaaaagacgctaccccaaggatcaatcacgacctgggatgactgcaaaaaagctttcttggcaaaattcttctcctactccagaactgcaagactccggaatgagatatccggattcactcagaaacaaagtgaaagtttctatgaagcttgggaacgctttaagggttatcaaacaaaatgccctcatcacggatttaagcaagcttctcttctcagcacactctatagaggcgtcttgcctaagataaggatgctacttgacaccgcttcaaaggggaatttcttaaagaaggatgttgaagaagggtgggagctagttgaaaactttgctcagtcggatggcaattataatgaagattatgacagaagcatccgcaccagttctgactctgatgacaagcaccgtagagacatgaaagttctcaatgacaaactagacaaaatcctccaagtgcagcagaaacatgttcacctcatctctcaagatgaaccattccaagtacaagagggggagaatgatcagtgtgcttacagctatgttcagaatcaaggtggctacaacaaggggtacaacaattacagacccaacccaaatctgtcatacagaagcaccaatatcgccaaccctcatgaccaagtctaccctcagcaacagcaaaaccaacccaaaccctttattccttacaaccaaagccaaggattcgtcccaaagatgcagtttcaaggaggatatcaacaacagcaaccaccacctggtttcacaccacatcaacaacagccagttgcgcctcagaattcagacataatgactatgctccagctgctcattcaaggacaagccacaggagcaatggaaatcgctaagaagttgggtaaattaaataacaaagtcgaccgacaaagcgtcgaacttaacagcaagttcgaagcactgagcactaggatgagatatgtggaaggcatcctcgctacaccatctgttaacaacaacccaggccagcttccagggagagcaatccagaatcctaaggagtacgccactgctcacgccatcaatatctgccatgatcgagagctgccaactcgacatgcctctacctccatcactagggacagtgaagttcaagaaggggaggattttgttcagaatgaaattcaagctaaaatagcattagaggagcccatactcgatcacagtactcgatcccaagctcaagtagtactttcttcagttaaaaagcctgcatctgctaaaaccaaagataaagtctttgttcctccaccctacaagcctccattaccatttccagggagatttaagaagcaactgataaagaagtatgaagctctcttggaaaaaaaattgaaggaccttgaaatcacaatgcctctagtagactgtcttgcgctaataccgaactcacacaaacgtgtgaaggacatgattacagagaggatcaaagaagttcaaggaacagtggcgttacctcacgagtttagtgcaatcatctagaagaacattattcaagaaaagttggaagatccgggatcttgtactctaccatgctctattaggcaactgactttcagcaactgtctatgtgatctaggagcttcagtcagcgtaatgccactttctgtggcaaggaagctgggatttttcaaatataagccatacgacctatccttgatccttgctgataggaccttaagaaaaccttatggcctactagaagatatgcctatcaagattaatggagtacaagtgcctacagattttgttgtgcttgagatggatgaagaacctaaggatcctctcatcctaggaagacgtttcttggccttagttggagcagtgatagacgtcaaagatggaaagattgaaatcaatcttgggaaggatatcaggttacagtttgacatcaacaaaactccaagaagatcaaccatagagggacagacctttggggtccaaggagtggttacagaagaaagatttgaaactgaaagagtaaaggaaccgagtttagctccaacacgaccttcaagctcaaccactcagtctagtacgctctctatagttgattggctagaacttaaaaggaattctgatctcaaagaagaaaccatccagaagctagcttgcactgttgaagaagttagggatacagtgagtcagatgcaaagggaagctattcaacctcaactcggcattgaagttataccaaagaagaagttcgtttcagaatggtgtgaagaagaagactacccacaagaaatttaagaagcttacaaagaaagggccattgagtgctcaattacagacatgtcaagagagcaagctaagtccgatgttgtatctgcaaaggaagaagagaagatttcaattcttctctatcaccctccttaagtcttatgagtgtgaggagtcaagctagagacttaaaacaagctcacttgggaggaagtcccatgtctattttcgtaaatatcttttatttttccttgttatttttaatacattctgttagagttttcaggagataagaatgaagagctgagggaaatggattctggctttgagggaacaacaatacactcgaccacagagcaatcaaagacactcgacattgttctggcttctccacgctaggaaatcactcgaccacaccctacagggagcgaatgaagatgtgatcgagtatagcgaatgatgcaatcacgacttccccatgtcagtaattcactcgaccgcggtgctggctgcagcagaagaagagaggtcgagtacccccaaggggaagctgagacacaacagggagattcgtcgatggcctgggagcaatcacaggaagctattggcgaccaactccgctccttcttccactgaggtatgcacctcactccaccattgtaatataccatctcttgtttttattttgtttttgtgatgtgttttgtcctgagtactctcttccaaatttggtcacacagtggactgtgtgatttaagtttgggggagggctcaggaagtgtgtgttgcattgtatataatcttgagtctgcattcatctaaggcatagaaaaaccaaaaaaaatgaaaatttttagaaaatgatttcacaaaaatagagtgttcatgtagttgcattgcatttaggatcgagtctagagtgtttcgtttaggattgttgcatatgcataggggataatgaagagatagccttgtaagcattttagttcaccagataagctcagtgccctcgttgttagttgtttgatgcgttgtcattgaaattgaagtaaaactgcaccatgcctagattgctctactcgaccacactgttaggatctgatatcattccctatcaatttgaacttgaatctgatttagaattatcatgtcttggcatcgaatttgaactcatggataccctaaaatacttggattttcttactcattttaaccactcttgttgatccaagtagctgactctccttattacagcagttaacccatacccaaacctgaactttctttcaagccctatatcacttgtgagtgtttgtgaggtcttatttcgattgagcttggtagaaagtgttaggttcgtaacgacagagatagtgtctcatgtagttctagttcgcgttcttcggactggataggactaggtgggcgcttatatcatgggttgggatgtgtttaaaagaaaagagggaattcattgttgatgaggaaagggaaagaattctaggggaagtaagctaaagaagttagaaaaaaaaaatctagtaaaggttttgggaatgttaaagaaaagaatgaggttcttgttagctaaagaagaagggttaaaagcctttggttttaaagataaaaaaaaacaggaaccttagttgttaaagaaatccaaacccgctagatgtatgagagcgttgagaaagcttctcctagagttaagagaaaagaaaagaatgatatgaaaaagagtttgaaagattcatgagtgcaaagggtagagttaagttgggacaggagttgggattaccattagaacttcattgttatactctgggtagatgggatcttatctctatatgcataacttgggacttacctttagcattctactaaagctcaatcattcttgaggtatcccctgttacttaagcctattgtgtaagggaccatctttgtctcttgaccttcaccttagccaaatgagttcattgatgatgcactgcttgattcacgttccagaactaatgaatgttaaagggattggtagatttgaaagcatgtgtaggtcgagtataagagacggattgattgataacaaggcagggctaacgtttttgagtagaattcaatcatatcgcatcttagaactaccaacttggacattaattttatttgctctatcatatgctttggttctgagtccccgccttcactcctctccttcaactatgtcttcttatttgcttgagggcaagcaaagactaagtttgggagagttgatatgtctataatttgcatgttttcagtgtccattcatcatcgttttgagtccagtttcgtatcattcatcactgttttatatcatttctcatcattcttgcatactttgcatgattaggatagctttgcatacatattgcatttctgagttgttttcaggtgatttggagctgtttgcaagcaaattggaagaaacgagccagaaccagaagacatactcgacccccaggtcgagtgactttggagccattcttcccacatactcgacccccaggtcgagtgactttgtagccattcttcccatccactcgaccaccgggtcgagtaacctcagctcaggcgactcgatgacactactcgaccccctggtcgagtatcacttcgccacaccacctgacaacactcgaccaatcactctaccaagttactcgaccccctggtcgagtatcatcactcaccaccatcagcatcactcgaccggacactcgatcacgtcttcacagtctactcaaatccgcactcaaccagacaagctgagcacaaggaggagaagaggagaagacaaagtgtttggaagcgcctggacctccatcggatcacgaagtccatctcggcccattatctctctatgggccgagcgattaggttattggcccgtctactatcattttatttcgttttgtataaatagatgtcttagggttctgtcctgggacatccagtcgacattgaatttttccttcagttttattttctgttttactctgttgcgccgtttttgcttctgcaacctgtaattcgagatttttccaagttattcagattccgcatttgatttcatctgtcatcttgtttctctactctttatctctttacttatgcaatattatcgtttatctgcgtttatatctttgagcatgttgtctgagtagtgacttagaattcttagggatgggataaagtagttgtggaattcgtagtctgtagaatggttaagttttagaattaattgaatccctttaggactagttgcgtttactggttaattctttctgatcaactggaattcgatcccaagcattcccgcacccagaaggtgttcgatggaatgcttgatccactagttcctgagatatgcgtctctatcccaagggattggctgtttagagcgtttattgactttatcagtatgttcttattgcctgcatagttagattccgttaatgggaattagtctgggttagctttgcttgaggatttctatcacgggagtgaattgatctgttgttgaacctgttgtctagtgatagcttgattgcgcttgttaaccattcgaataggctaggataccactctactcgattaccccatccttaggaatttctcgtctatcttatttctctgttttatcgttatcgcttaatcgttctcattgcctgtttcttagtttttacaatcactcgaccaacttactcgaccacacccagtgtctggcaacagactgtgcagtcgagtaagattgtcttgtttcctgtctgttactcgtccagtatactcgaccacacccagtgtctggcaacagactgtgcagtcgagtatagctgtttcatatcctgtctgttactcgacctgttactcgaccacatcctacttctggcatcagcctgttgtggtcgagtgattttagtaattctgttattgcttctgttttctgcatgttcgcttaggactgttagaaaccccaaaactgttattgcttggcttgacttagtgacttctgatcacatctcatctgtttgcatcacacccatttggattgacacctaaaatactacaatgacatgaattgtgttttaggataattgattaaaaatttattatcaatatggcgccgttgccaattgggtgtttgtttgctatatttgagatttcaaaattgttaagatcaagttcgtttttgttataagagatactaacattgtgtcttttcagaatttgtatttcaggtacttagcaacacactttattcgtctgttatagtcaggttgatacatgtcatacacggtcacaagggaattagaacttcctattcaacgataacatcaaccgtattgctcgccaactgaaagaacggacagcaacagacacaatggctgacattgtagatgcgcaagagcaacctaacaacattggtgctagtgacttccctcacaaccacaaccagcgtcatggcattgttccacctccagtacaaaacaacaactttgagatcaaaagcagtctcattgcaatggtgcaggggaacaagtttcatggcttgccaatggaggatccactcgatcatctagacgagtttgaaaggctctgtagccttactaaaatcaatggagttagtgaagatggtttcaagcttcgcttgtttccattctcacttggagacaaagcccatctgtgggaaaagacgctaccccaaggatcaatcacgacctgggatgactgcaaaaaagctttcttggcaaaattcttctcctactccagaactgcaagactccggaatgagatatccggattcactcagaaacaaagtgaaagtttctgtgaagcttgggaacgctttaagggttatcaaacaaaatgccctcatcacggatttaagcaagcttctcttctcagcacactctacagaggcgtcttgcctaagataaggatgctacttgacaccgcttcaaatgggaatttcttaaagaaggatgttgaagaagggtgggagctagttgaaaaatttgctcagtcggatggcaattataatgaagattatgacagaagcatccgcaccagttctgactctgatgacaagcaccgtagagacatgaaagctctcaatgataaactagacaaaatcctccaagtgcagcagaaacatgttcacctcatctctgaagatgaaccattccaagtacaagagggggagaatgatcagtgtgcttacagctatgttcagaatcaaggaggctacgacaaggggtacaacaattacagacccaacccaaatctgtcatatagaagcaccaatatcgccaaccctcatgaccaagtctaccctcagcaacagcaaaaccaacctaaaccctttattccttacaaccaaagccaaggattcgtcccaaagatgcagtttcaaggaggatatcaacaacagcaaccaccacctggtataaaacatgcaaagtatgcaataatgatgagaaatgatataaaacagtgatgaatgatacgaaactaaactcaaaacgatgatgaatggatactgaaaacatgcaaattatagatatatcaattcccccaaacttagtttttgcttgccctcaagcaaataagaagacatagttgaaggagaggtttgaaggtggggactcagaaccaaagcatcaggtagagcaaataaaatcaatgtccaagttggtagttctaagatgcgatatgatagaattttactcaaaaacgttagtcatgccttgttatcaatcaatccgtctcttatactcgacctacacatgctttcaaatctaccaatccctttaacattcattagttctggaacgtgaatcaagcaatgcatcatcaatgaaatcatttggctaaggtgaaggtcaagagacagagatggtcccttacagaataggcttaagtaacaggggatctctcaagaatgattgagctttagtagaatgctaaaggtaagtcccaagttatgcatacagagataaatctcatctacccagagtataacaatgaagctctaatggtaatcccaactccagtcccaatacaagaacttaactctaccctttgcactcatgaatctttcaaactctttttcatatcattcgtttcttttctcttaactctaggagaagctttctcaacactctgatacatcaagcggatttggatttctttaacaactaaggttcctgtttttaatatttaaaacaaaaggcttttaacccttcttctttagctaacaagaacctcattcttttctttaacattcccaaaacctttactagattttttttttctaacttctttagcttacttcccctagaattctttccctttccttatcaacaatgaattcacccttttcttttaaacacatcccaacccatgatataagcgcccaccaatcctatcctgtccgaaaaacgcgaactagaactacatgagacactatctctctcgttacgaacctaacactttctaccaagctcaatggaaataagacctcacaaacactcacaagtgatatagggcttgaaagagagtttaggtttgggttcgggttaactgctctaataaggagagtcaactacttggattaacaagagtggttaaaatgagtaagaaaatccaagtattttagggtatccatgtgttcaaattcaatgccaagacatgataattctaaatcagattcaagttcaaattgatagggaatggtattagatcctaacagtgtggtcgagtagagcaatctaggcatggtgcagttttacttcaatttcattgactacgcatcaaacaactaacaacgagggcactgagcttatctggtgaaccaaaatgcttacaaggctatctcatcattatcccctatgcatatgcaacaatcctaaacgaaatactctacactcgatcctaaatgcaatgcaactacatgaacactctatttttgtgaaatcattttctgaaatttttcaatttttttggttttttctatgcctcagatgaatgcagactcaagattatatacaatgaaacacacacttcctgagtcctcccccaaacttaaatcacacagtccactgtgtgatcaaatttggaaaagagtactcaggacaaaacacatcatagaaacaaaataaaaacaggagatggtatattacaatggtggagtgaggtgcttacctcagtggaagaaggagcaaatttggtcgtcaatagctgcctgtgattgctcccaggccatcgaagaatctccctgttgtgtctcagcttccgcctgggggtattcaacctctgctccttcgtcacggccagcaccgctctgatgatactcgacctctcttcttctgctgcggccagcaccgcggtcgagtgatttactgacatggagaagttttgattgcataactcgctatactcgatcacatcgtcattcggtccctgtagggtgtggtcgagtgatttcctggggtggggaaaccagaacaatgtcgagtgtccttgataactccgtggtcgagtgtatctttgttccctcaaagccagaatctatttcccttagctcttcatacttatctcctgaaaacactaacaagatgcatcaaaaacaacaaggaaaattaaagatatgtacaaagataggcatgagacttcctcccaagtgagcttgttttaggtctctaacttgactcctcatactcattaagcgtttataggctcctccaaaggaacagaagctccttctggaataaactgatctatcatgtatttcttgagccgctagccattgactgtgaagtctccattctttccagctagagtgatagcaccataaggtcagactgcagtaacagagaaaggaccagactatctagacttgagcttgcttggaaaaagccttaggcgagagttgaacagcaacacttgatcaccaaccttaaaatctcttgagactatcttcttgtcatggaaagacttggttcgctccttgtagattttggaactctcataagcttctaagcgaatctcgttgagatcgttcagttagatcaaccgcttctcctcgacggttttaatgtcaaagttcaggagtttaactgcccacatggctttatactcgagttcaacaggcaaatgacaggattttccatagaggaggttgaaaggagtcgtgccaataggggttttgaaggctgttctgtaagcccatagtgcgtcatcgagtttagaagaccaatctctccttgtaattcccactgttttctctagaattgcttgtatctccctgtctgagatttccacctgcccgctcgtctgtggatgataaggagtggctaccttgtcctttactccatgcttctttaaaaggttctcaaaaaccttgttgataaaatgtttccctccgtcactgattacaactctcgggactccaaatctagggaagataattgtcttgaacagctttaacacaactctagcatcattggtggggctagctatggcttccacccattttgatacatagtctactgcgaccagtatgtacttgttcccgtaagaagaaggaaatagacccataaaatcaattccccaaacgtcaaagatctcaacttctaggatcggattctgaggcatctcattccttctgcttatgttccctcttctctgacatgagtcacatttcgagataaattcttgagcatccttaaacattgtcggccaccaaaaaccagcttgaaggatttttgacactgtcttgaacgttgcaaagtggccaccataggcagacccatggcagtgcagtaggatgccttcgatttcgtcttctgagacacatctcttgtagatcttatttttgcagagtgtgtagagataaggttcgtcccagtaaaaatggttaatgtccttgaagaacttcttcttctcatagctcgaaagatttgggggctcttcaccactaaccaggtaattgacgtgatcagcataccacagaagcttttcttcaattgcacatacttgatcgagtgatttccgaatttgaccactttctttaagttgctgaattgccattagctgttcttctggcatggagtcgtcaatagggacctcgtcttcaattctcattctagacagatgatcagctacaccgttttcaattcccttcttatcaacgatctccatgtcaaactcttggagcaataagatccatctcaacatcctaggtttggtatccttcttcgcatatatatgcctcagagcagcatgatcagtgtagactatcacctaagagcccaccaggtagcttctaaatttcttgaatgcaaataccacagctagcagttccttctctgtggtggcataccttacttgtgcatcatccatcgttctactcgcgtagtagatcacatgcagctttttatcaatccgctggcccagaactgctcctactgcataatctgaagcatctcacatgatctcgaatgggaagtcccagtttggagcttggactattggggcagtgaccaaagcttccttgattaacttaaaggctgtcaaacattcttcatcaaatgcgaactcggtttccttgcacagcagtctggtgagcggtcttgccaacttggagaaatccttgatgaatcttctgtaaaatcctgcatgtccaagaaaactcctgatgtccaagaaaactcctgatgtccttgaaagtatttggtggctgtaactgcatcatcacgtcaaccttagccttatcaacctctattccctcctcagaaattttgtgccccaaaacgatgccttctttaaccataaaatggcatttctccaagttcagcaccaggtttgtctcttcacatcttttgagtaccctgcataggttcgacaaacacgaggagaagaaagagccatacacagaaaaatcatccatgaatacctccaccatctcctctatcaaatctgagaaaatggaagtcatacaccgctgaaaagtagcaggtgcattacagagaccgaaaggcatacgcttgtaagcaaaggtcccataaggacaagtaaaagtagttttctcttggtcatttgggtgaatagggatttgaaaaaatctgctatagccatccaagaagcaatagtaaggatggtttgctaatctttctagcatctgatcaatgaagggcaatgggaaatggtcttttctagaggcagcatttaacttcctataatcaatacacatcctatgtctagttatagtcctagtgggtatcagttcatctttataatttttaataactggcatacctccttttttaggagcgcagtgaactggagataccgaagtgctatcagagatagggtaagtatctcctttttcacaacctctttcaagtttgggtttaatctcctttgaggtttaatgctagagtaggattcattttcaagatggattatatgggtgcataaggtgggtgaaatccccttaatatcatctaacgagtatcctatagctctcctatacttcttgagctcagttatcagcaggtttacttgatcagtagttagctcgtcattcactatgacaggataagtagagtttagtccaagaaaaacgtaccttagcccttttggtagcgttttcaaatctactttgggtgccttgagttcagaccagtcatcggatactaagttggcttcagaggaggggttgtgatcgagtagttcggtcgagtacactgaatggtctattggtcgagtgatgtggtcgagtatattgataagtgtgtattttacatgttttgagcatccatttgtcatcaatttagcatcatatcatcaatgtttcataccatttctcatcatttgtcatcactttacatgtttaggatagatttgcatgcatgttgcatatttgcgttgatttcaggtgatttggagttgttgacgagctatctggaagaagcgggcctgatcatgacaaaccactcgaccccaaggtcgagtaggagcttcaagatctcaacagatcacttgaccccgcggtcgagtagaggacatcactacttcaccacatcactcgaccccgaggtcgagtgtcttcatcccatcacctgaccatcacttgatcacatcactcgaccccgaggtcgagtgtcttcaccttcattgccagaccactactcgaccttttcactctacctggaagtcgaatatcaccatcaccaccactcgactgcatactcgatgataagcttcagagccttcttcattccacactcaatcagacactcgagcacaaggaagaaaagaagactccagttattcactcgacctcccactcgacctccggctattagggtttcggaatatttggctataagtagcatgtacttcacattttcgcagaccagttttcatctagttttattccgcagaccttgtgttctagatcttttgtaattcagatttctctatatctattcggtattcagtattcagcttttgttcttgatttcatttactgttgttcattctgttatcatcctgctgttacactgttgttatcatgttttcaacttgttcaacgtttatgctttctgttatgatgtctgagtagtgaataggtttcttaggatgggttagagtagtgtagaattctcagtatgctaggtgattgagtattgattgatagatcccttctggattagttgttcttaatgcctattgctttatgatcaactgaaatttgagcacagacatttccgcgcccaaaaggtgttcgatgaaatgtctgaaccaaggtattggttgcagggagcgttttggctttaacttgttgattcgtaatgcctgttagattagctttcgtcaatggtgattgagtctgggactaggttaacttgagggtctctgttacggtagcacttagatttggttaatgaacttgttgtctagggttaatttattgagcatgtcaatcacctgtgaacttgttgttgaggaaacgaaactactcaattaccccatcctcgggaattctttgtttactctactgttgtttactgcatcttgttatctgtcgcttaatttctgcaattctttcttattactcgacctcatactcgaccacccagttgtctggcaatagactgtgcagtcgagtatctgtgttatactttctgtctgttactcgacctgtcactcgacctcacccagtgctggcaatagagctgtgttggtcgagtgttttactgtttctgtttgattttctgttttctgcatgatcacttaggactgctagaacacaccaaaatttgttattgcttagcttgacttagtgacttctgatcacatcttgattgttagcatcacacccatttggattgacaacctaaaatactataacgacatgattggtgttttgggataattgactaaaaacctattatcaatttggcgttgttgccaattgggtgtttgtttgttacatttgagatttcagacttgcttagatcaagttcttgttcaattttcttttctgttactaactgtgtgtttttcttgttgtcttcttgatccaggtacacctctactgtatgcaaactcgatcaacaggcaatcagaacctccttttcaacgacaacatcgaccgcatagctcgcgaactcagagaaaggaaaaacacagtcaaccttgtaccttagcaaccactcgaaatggctgacgaacagaatcaacaaaatggccctaccaacattggtgctggagatgcaccacgttatcaccgtcagaggaaaggaatagcacctcctgctatccagaacaacaacttcgagattaagagtggtctcatctcgatgatttaggggaacaaattccatggactgccaatgcaggatccactcgaccaccttgatgaattcgataggctctacaacctgacaaagatcaatggtgtcagtgaagacggattcaagctccgtttgtttccattctccttgggcgaaaaagcacacatctgggagaagaatttgccccatgactcaatcaccacctgggatgattgtaagaaggcttttctatcaaagttcttctccaatgccagaactgcaagactgagaaatgagatttctggttttacacagaagactggtgaaagcttatgtgaagcatgggagcgtttcaagggttacaccaaccaatgccctcatcatggctttactaaagcctttctactcagcactctttacagaggagtcctaccacgcatcaaaatgcttctgcataccgccagcaatgggaatttccagaacaaggatgttgaagaaggctgggaattggttgagaacctcgctcaatcagatggcaattacaacgaggactgtgataggaccgtcagaggaacagctaactctgatgacaaacacaggaaggagatcaaagcgctgaatgacaagctggacaggattcttcttagccagcagaagcatgtgcacttccttgttgatgacgagcagtatcaagtccaagatggggagggtaaccagttggaagaagtcaactacatcaacaacaaccagagtggctacaaagggtataacaacttcaaaaccaacaaccccaacctctcctaccgcagcaccaacgttgctaatcctcaggatctagtctatcctccacagcaacaacaaggtcagaacaaaccttttgttccctacaatcaaggtttcgttcctaagcagcaatttctggggaactaccagccgccaccaccacctgggtttacacatcagcaaaaccaaggttctgctgctcctgaggctgatatgaaacaaatgctacaacagctgcttcacgggcaagcctctagctccatggagatggcaaagaagatatctgagttacataacaagctggactgtagctacaatgatctcaatgtcaagatggaaacactgaataccaaagtccgatacttagagggacattctgcatcttcttcagctccaaaacagacaagccaactaccatgcaaagcagttcagaatccaaaaaaatatgctcatgctatcacactgcgtagtggaaaagcacttccaactagggaggaaccaaagacggtcactgaggacagtgaagatcaagatggggaggatttaagtctcgagaaagatcaagctgacaaaccactcgagcaaccactcgatctgccactcgacaactttactcaaccaacaactcgacctatcttcccagcagcatcaacaactgctccaaaacaagttgctgtcaaaaacaaagaaaaggtctttgtccctcctccctacaaaccacagcttccatttcctggccgtcacaagaaagctttggcagataaatatagagctctgtttgccaagaatattaaggaggttgagttgcggatacctcttgttgacgctctagcgctaatcccagactctcacaagtttctgaaagacttgattgtggagagaattcaagaagtgcaagggatggtggtattgagtcatgaatgcagtgctatcatacaaaagaagatcattcctaagaagcttagtgatcctggttcattcactctaccatgctctttaggtccattggctttcaatagatgcctatgcgatttaggagcatcagtcagtctcatgccgctctctgtcgccaaaagattggggttcactcaatacaagtcctgcaatatatccctcatcctagctgacagatcagtaaggatccctcatggtttgcttgaaaacctcccaatcaggatcggtgttgtggacataccaactgactttgtagtcgtggagatggatgaagagcccaaggaccctttgattctagggagacctttcttagccactgcaggagctatgattgatgtcaagaaagggaagattaatctaaatcttggcaaagactttaggataacctttgatgtcaaagacgcgatgaagaagcctaccatagaagggcaactcttttggatcaaagaaatagatcagttagccgatgaattactggaagagctggcagaagaagatcatcttaacagtgctttaaccaaaagtggtgaagatggttttctgcatttggaaacattgggatactagaagctgttagactcccataaagcgatggaaaaatcagaacgctttgaggaattgaatggaccagcaacggaggtaatggtaatgagcgaagaagggtcaactcgagttcaacctgcactctcgaggacgtactcgaccagccactcgaccttgtctgccaacgaatctggggagccgatcattccaactttagatgactggtctgaacttaaggcactgaaggttgatctcaaaccacttcctaaaggtctaaggtacgcattccttggtccaaactctacttaccctgtgatcattaatgctgagttaaatagtgatgaagtgaacctgctattatcttagcttagaaagtataggagagcgattggttattcattatccgacattaagggaatttcacctagtttatgcaaccataggatccatcttgaaaacgaattctattctagcattgaaccacaaaggaggttaaatcccaatttgaaagaagtagtgaaaaaataaattttgaaactgcttgatgctggtgtcatctaccctatctctgatagtacatgggtttctccagtgcattgcgtccctaaaaagggtggaatgatgttgtcaaaaatgaaaaagatgaactgatccctactagaactataactggtcatagaatgtgcattgattataggaagttgaatgctccatataggaaagatcattttcctttaccattcattgaccaaatgcttgaacgtttagctaatcatccatactattgctttcttgatggatacagtggtttctttcaaataccaattcaccctaatgatcaagaaaaaaacactttcacatgtccttatggaacttttgcttataagagaatgccatttggtttatgcaatgctcctgcaacatttcagaggtgtatgacctctatattttcagacttaatcgaggagatggtggaggttttcatggatgatttttcggtctatggcccctctttctcgtcatgtttgttgaatcttggcagggtattgactaggtgcgaagagacgaatcttgttctcaattgggaaaagtgtcatttcatggtgaaggaaggcatagtgctggatcacaagatatcagagaagggtatagaggttgacaaaggaaaagttgaagtgatgatgcagttgcagccaccaaaaacggtgaaggacatcagaagtttccttggtcatgctgggttctacagaagatttattaaagacttctccaagatagccaggccgttaactagactattgtgcaaggaaacagaatttgaattcgatgaggacagcctcaaatcctttcaaaccatcaaggatgctttggtatctgctccggttgttcgagcgccaaattgggactatccatttgagatcatgtgtgatgcatcagattacgcaataggagctgttttaggccagaaaatagacaagaagcttcatgtcatatattacgccagccgaacgttggatgacgctcagggaagatatgcaacaactgagaaggagcttctagctgttgtatttgcatttgagaagttcagaagctatttggttggatcaaaggtaactgtctatacagacctttgaggcatctgtatgccaagaaggatactaaaccaagactgttgagatggatacttttattgcaagagtttgacatggagatagtagataagaaaggcattgaaaatggtgcagctgaccatctgtcaaggatgagaattgaaaaaccccttcccatagacgattcaatgccacaagagcagctcatggttgtagagttcttcggaaggagctacagtgggaaagagttccaccaactgaatgctgttgaaggagaatctccatggtatgctgatcatatcaattacttggcgtgcagagtagagcctcccaacctgacaagttatgaaaggaagaagtttttcagagacatacaccattactactaggatgagccttatctttacactctctgtaaagataagatctacaggagatgtgtcttagaagatgaagtggaaggtatcctgctgcattgccatggctcagcatatggtggtcacttcgcgacgttcaagacagtgtccaagattcttcaagcaggcttttggtggccaacaatgtttaaggacgctcaggagtttgttttaaagtgtgattcatgccagagaaaaggcaacatcagcagaagaaatgagatctttgatgtatgggattgattttatgggtccattctcatcttcatacggtaataaatatatactggtcgccgtaaactacgtatcaaaatgggtcgaagctattgctagtcctaccaacgatgcaaaagttgtgctgaagctgttcaagaccataatcttcccaagatttggagttcccagggtagtaatcagtgatggcgggaagtatttcatcaacaaggtttttgagaacctcttgaagaagcatggagtaaagcacaaggtcgccactccctatcatccacagacaagcgggcaggttgagatctccaatagggagataaaaacaattctggaaaagactgttgggattacaaggaaagactggtctgcaaagctagatgatgcattatgggcttactgaacagccttcaagacccccattggtacaactcctttcaatcttctctatggaaaatcatgtcacctacctgtagagctcgagtacaaggcaatgtgggcggtaaaacttctgaactttgacataaaaactgctgaggagaagtgattaatccaactcagtgacctcgatgagatccgtctagaagcttatgagagctctaaaatctacaaggagagaaccaagcttttccatgacaagaagatcatcactaaggatttccaggctggagatcaggtgctgctgttcaactctcgcttgaaactctttccaggaaaactcaaatccagatggtctggccccttctgtatgactaaggtccgtctttatggagcagtcactctagctggtaaaagtagagacttcacagtaaatggtcaaagactcaagaaatacttaacagatcaaatccttccagaggtgacatcggttcatctccaggaacttcttgatgattaaaggagtaaaggagtcaagcttatgactttaaacaagctcacttgggaggaagtcccatgactatctctgtaaatatttttttttattttcttgttatttttgatttgtcttggttgtgtttgtgattctcaggaacgaaggaacaatgtggagatagagtaaaaattcaaaacttttactatatagaagacctggagatcgagtgtataacccgttggagtacaaaattttgaaaatcttctattgcacctagtgaccttacactcgagtacgttggtcgagtatgtgtgatgtttaaaacgcaaaaaacttttaaatcatcattttacttgacccacaaaagctacagagacttgtagggatttcctgcagtctaaagtgggttttctgcaaaattttcccagtcaacagagtgtggaccacgcactgaggataagatggagagagaatctcaaactcaatctcagccattcctttttacatttcactcgaccttgctatcttctgttatccaccactcgatcaaaacaaattactcgacctaataatccttagccactctcgacctccgccgcttcagcagaattcaaggaaccactcgaccaatcgatctacttgacccccgggaatcactcgacctccgccgccgtcatcatttcgttctatccgtcactcgactagactagatcaatcgattccttttggctatagtcgaccaattcacccgtctctttcaaaagaagctactcgacctcgttacccagtctcctagccgcactcgaccgacgccgcctcagccgatttcaacaattgactccaccgccgtgaatcactcgacctttccagccgagtactcctcctcgttctccgtcgaattctcagggttcaagatttcactcgacctcgagttttaactcgacctctacaactgcaactcgacttcttgaaatcaacagagccctgaagcactgtaatagaggttactcgacctgaagacttcaccggcagaactcgacatccacaactcactcgacctccaggaacagctcaggttactcgagtacagaattgtactcgatcaattcaatctatttcattgcctattgataacaattttggtttcattgctatctttgagactaacctattgacatttgagctttgagttctaaatttctaccggagaatcatgaggaattacagtggcagttcttctggttatcctgactacaacatggatgagacagagtcgtcatcttcaaggccagagagagaacagagagaatatgaaagcttcagaaggaaagctgagatagcccgagggaagagagcgatgacatagaggtatgagcttatagacgaagatctggaagacgagtacatgcctgaacagactagcagagctaccaaacttctgcacaagccaaacgtattgcctgctgaggaatatgttaggcttttctagctgaatgagttatgtagcacgaggtatccttgctcgacctcacttgcacaactcggtttattggaagatgtttagcacctgtaccaaagttgtcatctggacactctaatggcttattcgtatgtagcgtatgaagatgagacaatacaattcctctccatgctgcaagtagagctctaccaaggtatgacctctgaagagttggattgtgaaggattgggattcttgcgattctctgagtatggtcatgagtataggttatcaatcaagcgcttggaaggattgtttggcttccccagtggaacgggatctaagcccaagtatgatagagaagagttgaaagacttgtggatcaccattggcagctctgtaccgctgaattcttccaggtcaaagagcaatcatatacgcagccctgtcatcaggtacttccagcgttctatagccaatgtactctagtcccaagagatcacagggactgttactaactctgatatggagttgatcgcaatggccctcaaggtaactcttcgccaaactaagaatggcatgtctctccaaggtgaaatcaatgacacacctctctctgtacttcttctgatccatctgtgtggatacaagagcagggctgtcagcaataaccacaagagagcacgaggtgctctgtgcataggtggtgttgtgacaccgattctgatagcttgtggagtcccaatcatttctgctggactcgagccgcgagcaatggatatcgagcccctacgtcactgcgaattcctggagtttgcaatggttgacgacttccaaaggttcaggtttgagcactctacagacaggagagctagcatccttctccctagccctgaggttacacggataatagagggtgataacattgattttcggcctgaggttggacgcctctactatgagaacgctccgccattggatgatgatgatcttcgagaagaagttgcttcggatgggatggatgaagatagaggagtggagttcgacactagcatgtatcactttggtgaatatgtacctccagcgaggcagagcaagagcttgactgaagctcataagaacaacagtaaattgcagaagtggtgcaagaagcaggacaagctgctcgccaagtgtttcaaggctatcaagcttctgacagataagctgagttgttcctcctgcaccactgctattccacagaaacagcctcctctggagatgccatcgaggagatttgatgagcctgcgcacaggcctgagcttagcgagtagagagtctcacatgtcccggctaggcattagtcattcgagtcccgggagcacaagagaagaaggaaggctacactcactcgatctagcagcagatcatgcctcattcactcgaggagatcactcgaccgcggtgctggccgcagcagaaggagagaggtcgagtatcctcagagcggtgctggccgccacagagctgatgaggtcgagtacccacctgctggagctgatacagaacaaggtggttcatctatggcctgggagcaatcacatgcagccattgacgagcaactacgttcattcttcgactgaggtaagtgccacacttcaccaatgtattatatcatctgttgtgatttgtttttatttcattttgtttctatgattggatttgtcctgagtactctctttcaagtttattcgcacagtggactgtgtgatttaagtttgggggagggctcaggaagtgtgtgttgcattgtatatattcttgagtctgcattcatctaaggcatagaaaaaccaaaaagatttgaaaaatttcagaaaatgatttcacaaaaaaaaaaaagagtgttcatgtagttgcattacatttaggatcgagtctagagtgtttcatttaggattgttgcatatgcataggggatgatgatgagatagccttgtaagcattttgatgggattaccattagagcttcatttgatgtactctgggtagatgggatcttatctctatatgcatagcttgggacttacctttagcattctactaaagcttaatcattttttgagagatcccctgttactgaagcctattctgtaagggaccatctttgtctcttgaccttttaccttagtcaaatgagttctttgatgatgcattgcttgattcacgttccagaactaatgaatgttaaagggattggtagatttgaaaacttgtgtaggtcgagcatatgagtcggattgattgatgatgaggcatggctaacgtttttaagaagaattcggtcttgcagcttagaactttcaacttggacattgatttcatctggtttatctggtgctttggctctgagtccccgctttcaaacctcacctccagcttgttcttgattgtttgcttgagggcaagcaaagactaagtttgggggagttgataagtgtgtattttgcatgttttgagcatccatttgtcatcattttagcatcatatcatcactgtttcataccatttctcatcatttgtcatcactttacatgtttaggatagatttgcatgcatgttgcatatttgcgttgatttaaggtaatttagagctgttgacgagctatctggaagaagcgggcatgatcatgttaaaccactcgaccccgcggtcgagtagaggacatcactacttcaccacatcactcgaccccgaggtcgagtgtcttcatcccatcacctgacaatcactcgatcacatcactcaaccccgaggtcgagtgtcttcaccttcattgccagaccactactcgacctcttcactctacctggaagtcgagtatcaccatcaccaccactcgactgcatactcgatgacaagcttcagacccttcttcattccgcactcaaccagacactcgagcacaaggaagaaaaaaagactccagctattcactcgacctcccactcgaccacatgggtcgagtacagttcttaatctgtcccaatacttcgtcgttttaagtattagggtttcagaatatttggctataagtagcatgtacttcacattttcgcaaacaagtttttatctaattttattccgcagaccttgtgttctagaccttttgtaatccggatttctctatatctattcagtatttagtattcagcttttgttcttgatttcgtttactgttgttcattctgttatcatcctgctgttacactgttgttatcatgttttcaacttgttcaacgtttatgctttctgttatgatgtctaagtagtgaacaggtttctgaggatgggttagagtaatgtagaattctaagtatgctaggtgattgagtattgattgatagatcctttctggattagttgttcttaatgcctattgctttctgatcaactggaatttgagcccagacatttctgcgcttaaaaggtgttcgatgaaatgtctgaaccactaattccagagtttcgtgatcctgtaccaaggtattggttccagggagcgttttggctttaacttgttgattcgtaatgcctgttaggttagctctcgtcaatggtgattgagtctaggactaggttaacttgagggtctctgttgcggtggcacttagatttggttaatgaacttgttgtcgagggttaatttattgagcatgtcaatcacttgtaaactgagaaaacgaaactactcaattaccccatcctcgggaattctttatctgattgaattctatgtttactttactgttgtttactgtatcttgttaactgtcgtttaatttctgcagttctttcttgttactcgacctcatactcgaccacccagttgtttggaaacagactgtgcagtcgagtatctgtgttatactttctgtttgattttctgttttctgcatgatcacttaggactgctagaacacaccaaaacctgttattgcttggcttgacttagtgacttctgatcacatcttgattgttagcatcacacctatttggattgacaacctaaaatactacaacgacatgattggtgttttaggataattgactaaaaacttattatcatatatattccccccttgctctttcacccaaatcttcatattctcctggattctcaactgctttgtgttcatctaaaagcttctggtaccccaaagtctccaaatgtaaatctccttctttgctatcctttgttaaagcactctgtagatgatctgtttctcctagctcttctagcattttgtcagcgaacatatccatctcttcaatccagaaaacatttccttctattgtaggcttcttcatggtattagtgatatcgaaggtcatcttgagatctctcccgaggttaagatcaatctttcccttcttaacatcaatgatagctccagctgtagctaaaaatggtcttcccagtatcaaagggtctttgggtttttcatccatttctaaaaccacaaagtctgtaggtacttcgaccacacctatcatgactggtaagtcttgcagcagaccatggagaattctaacagatctgtcagctaggatcaaggatatattgcagggtttgtacttgttgaagcccagtttctttgccacagagaggggcatgagactcatagatgcacctagatcacagaggcacttgctgaaggctaaaggaccaagagcgcaaggcaaggtgaacgaaccaggatctcctaatttttttggaatgatcttctgctgaatgatcgcactacattcgtgacttagcaccaccattccttggacttctttgatcctctatgtaatcatgtgtttcacatatttgttagagtctggtataagtgcaagacagtcgacaagaggcattgtgacttcaagatttttcaattgtttctccaagagagctttgtacttctatatcatgaccttcttgaatcgaccaggaaatggaagtgggggcttgtaaggtgggggaacgaagacgttgtctttggttttggcggcagctggttttttaacaagaggggatgctgcaggagctagtggtcgagtaggttggtcgagtataggctcttctattgctttttcagcagaatcttcattctgacagaaatcctccccatctcactccacactgtcctcagtgttctgtttcagactcttttttgtgggtaattctttaccgcttctaagcgtgatagcatgagcatactcctttgaatttggcattgattttccggaaggtcctgtaaatttgggtgctgaggtcgacccattttggccttctatgtatctaatcttagatgtcagtgcttcaaccttgatattgatatcattgtaactacagtcaacctttttatgaatttctgccatccttttggacaaatccattgctcctgttgcttgcccttggagaatctgctataacatgttcttcaagtctgaatctggagttgttgaaacaagttgttggtgcttctgtgcaaactcaggtggtggaagttgctgctgatagttgccctggtactgctgcttaggaacatacccctgaccttggttgtatggaacaaaggacttgggttgattctgctgctgtgaagggtagacttggtcctgcgggtttgcaacatttgtacttttatcagacagattgggatgcttctgcttgaagtttttgaaacctttattgtaacctctttggttctgcacatagctggcctcttctgactgcagagtcttcccatcctgaacttggaatgtctcatcatcacccagaaaatgaatgtgcttctgttgcacaaggagtagcttgttcagtttgtcattcatagctttcatttccctacggtgcttctcatcagaatcagagctggtgtcgatgcttctgtcataatcttcatgatagttgccatccaactgagccaagttctctaccagctcccatccttcttcaacatctttattgaggaagttcccgttagaagcggtatcaagaagcatcctgatcttgggaaggacacctctatagagagtgctgagaagtgaagctttggagaaaccatgatgaggacattgcgtctgataacctttgaagcgctcccatgcttcacagaaagtctccttatttgtttgtgtgaaaccggagatatcattccttagtctcgtagtcctgaagtttgagaaaaactttgccaagaaggctttcttgcagtcattccaggatgtgatagagccttgaggaagcgacttttcccactgataggctttgtctccaagagagaatggaaacaatctgagcttgaagccatcctcactagctccattgatctttgttaggctgcagagcctatcaaactcgtccagatgatcgagtggatcctccatagggaggccgtggaacttgttgctctgaaccatggcattgagaccgctcttgatctcaaagttgttgttctgcactggtggaggcacgatgccattacgctgattgtggttgcgtggtgcatcgcctgcacctatgttgtttggttgcacttgctcatctacaactgcagccgttttgtctgtttctgtctgtgttctgagttggcgtgcaatacgatcgatgttatcgttgaacaggagattctgatttccttgtgatcgtctttgcatacaacgagtaccaactggtgaagctggtgattcgcagtacctgaatcaaaacagacaaacagaaaaaacaaagttattaactttcagaaaaaatgaaaaagaacttgatcttaaatattctgaaatctcaaatatagcaaacaaacacccaattggcaacggcgccaaattgataataggttttagttcaagtaatcctaaaccactatcatgtcgttgtagtacttagggtgtcaatccaaatgggtgtgatgcaaacagatgagatgtgatcagaagtcactaagtcaagccaagcaataacagttttggggtttctaacagtctacgcgaacatgcagaaaacagaaataataacagaattactaaagtcactcgaccacaacaggctgatgccagaagtaggatgtggtcgagtaacaggtcgagtaacagacaggatatgaaacagatatactcgactgcacagtcttttgccagacactgggtgtggttaagtaagttgatcgagtaattgcaaaaacgaagaaacaagcaatgagaacgatttagcgataacgataaaacagagaaatcagatagacgagaaattcctaaggatggggtaatcgaatagagtggtatcctagcctattcgaatggttaacaagcgcaatcaagctatccctagacaacaggttcaacaacagatcaattcactcccttgatagaaatcctcaagcaaagctagcccaaactaatttccattaacggaatctaactatgcaggcaataagaacagactgataaagtcaataaatgctctaaacggccaatcccttgggatagagatgaatatctcaggaactagtggatcaagcattccatcgaacaccttctgggtgcaggaatgctttggatcgaattccagttgatcagaaagaaataagcagtaaacacaactagtcctaaaggggttcaatcaattctaaacttaaccattctacagactacggattccacaactactctatccaatccttaagaactctatgtcactactcagacaacacgctcaaagacataaacgcagataaatgataatattgcataagtaaagagataaagagtagagaaacaagatgacagatgaaatcaaatgcggaatctaaataacttggaaaaatctcgaattacaggttgtagaagcaaaagcggcgcagcagagtaaaacagaaaataaaactgaagcaaaaactcaatgtcgactggatgtctcaggacagaatcctaagacatctatttatacaaaacgaaataaaatgatagtaaacgaaataaaatgataatgggccgagatgggcttcgtgatccgatggaggtccaggccgcttccaaacacttcgtcttctccttttctcttccttgtgcccagcttgtctggttgagtgcggatttgagtagactatgaagttgtgatccagtgtctggtcgagtgatggtgttggtggtgagtgacgatactcgactagggggtcgagtaaggtggtagagtgaacggccgagtgtggtcaggtggtgtggcaaagttatactccaccagggggtcgagtggcgtcatcaagtggcctgagctgaggttactcgacctgggggtcgagtagatgggaagaatggctccaaagtcactcgaccagggggtcgagtatggtgatggatgcacgcgacctggtggtcgagtatgtcttctggttcaggctcgtttcttccaaattgctcgcaaacagctccaaattacctgaaaacaactctgaaatgcaatatgtatgcaaaactatcctaatcatgcaaagtatgcaataatgatgagaaatgatatcaaacagtgatgaatgatacaaaactaaactcaaaatgatgatgaatggacactgaaaacatgcaaataatagacatatcaataacacaacagaaattaaaaacaaagtttgaaattcaaaagtaacccttcaacttcaaaggccacaaaattgtctctttattttagtgggcttgggccttgaatcatcaaaatggattatatgaagtgaaaacataagcctcattaaaaaccttcctttggaaaacccattgagacaaaattaaatgtagggaaaaagggcactcatgaatcacttatccatcttgatgaggtccttgagcttgaatcaaaaccaaagaggtagtgacttcgctcaagtcctttggtcagtctcaaatgtggttaagcatccctccaatggcttggttgaatagcttaactctagaacgagtcattggaaagtccggtgtgacaagaacatcctctgctacaagcttctcttcagctacaagctcatcctcagctacaagcttagctccttcctcggctacaagctcacgttcaagctccggttcatgctccatatccttaatgttgtccatgatcatatcttcccctccctcttgaaaagaatttgacctcaaatccatttcatctgcaataaaaggtaccaaatcataaacattaaagttagaactcacattatacttaccttgtagatcgagttggtaggcattgttgttgatccgtttgattatcttgaaaggaccgtctattcttggcatgtgtttggacttcctttgagctggaaacctctcctttcttaagtaaatccacaccatatctccaactttgaaactttgttcttgtctccctttattagcttgcttagcatagagtttggttctttcttctacgtttctcctcgcattctcatggatctgttgcactagctcagccttctttttaccatcaatacttactctttcactcaaaggcaaagggatccaaaggtgagatgaggttgaacccataaacaatttgaaaaggagaatacttagaagcagaatgcacgacatgattatatgcaaattcaatatgtggtaagcattcttcccaagttttaagtttatttttaatcaatgcacgcaagagagtacctaatgttctgttaaccacttaagtttgaccattagtttgcggatgacatgtagtagagaataacaacttagttcctaacttagaccacaaagtatccaaaagtaactaagaaacttattatctctatccggaactacggacctaggcatccaatgcatacaaactatctctttaaagaatagattagctacatccaatgcatcatcagttttatgacaagcaatgaaatgagccatcttagaaaatctatcaaccacaacaaagatagaatcctttcctgttctagtcctaagcaatcccatcacaaaatccattgaaatatcattccaatggtgagtaggaataggtaaaggagtatacaaaccgttgcgctgaaccttagatttggcttgcttacaagtattacatcttccacaaattctttcaacatcacgtttcatgtgtggccaatgaaaatgttctttcatgacttccaacgtcttagcaatgccaaagtgtcccattagtccacctccatgagcttccctgacaaataaatctcgtagagagcagttaggaacacacaaacggttctcatagaagagaaacccgtcttgtctaaaatagtgacctgaagcaaacttctcacaagctttataaacctcttgaaaatcatggtcagtttcataaagttcttttatttgttcaaaatccataagcttaacattaagagtagagagtagggtgtacctcagggataatgcatcgacaactacattatccttaccttttttgtacttgatgacgtagggaaatgtctcaataaactcaacccacctcgcatgtctcttgttaagtttctgttggcccttcaagtgttttagcgattcatgatcagtgtaaatgacgaactccttaggccataagtagtgttgccacgtttgaagagctcggaccaaggcgtacaactccttgtcataggttgggtagtttagcgtacctcctccaagtttctaattgaaaaaggcaataggcttttgatcttgcattagaacagctccaatacctatacctgatgcatcacactcaatctaaaacgttttaagaaagtcaggtaatatcaaaacaggtgcattagttagtttatccttgagagactgaaacgcttcttattgtgcttcctcccacttgaatcgtacatccttcttgataatctcggtgagtggtgcggcaatggtactaaagtccttgacaaatcgcctataaattccagcaaggccatggaaactccttacttctcccacagtctttggactcggccaatctctactagccttaactttctcttcgtcaaccttaactccctctatactcacaacaaagcctaaaaacacaagattatccgtgcaaaaggtgcatttctttaggctggcatagagtttttcctttctaaggacattcaaaacagaatctaaatactctatatactctcttaagcttttgctgtaaactaagatgtcatcaaagtatactacaacaaatattcaatgaatactcttagaacatgattcattaacctcatgaatatactaagtgcattagttaatctaaatggcatgactaaccactcatataacccatgttaagatcaaataatcctaaagcactatcatgtcgttgtagtactgaaggttgtcaatccaaatgggtgtgatgctaacaatcaagatgcaatcagaattcacagagtcaagccaagcaataacatgttttggtgtgttctagcattcctaagtgaacatgtagaaaatagaaaatcaggcagaaacaataaaacactcgaccaacacagctcgttgcagagcactgtgtgtggtcgagtgactcgtcaagtaacaggcagtaaatgaaacaaagatactcgactgcacagtctgttgccagacaactgggtggtcgagtatcacgtcgagaaaaaggaaagaattgcaaaaagtaagcaacatgtgacaagatgcagtaaacaacaacagagtaaacaaagaaatcaattagataaagaaaatcccgaggatggggtaatttaatagttttgttttctcagtttacatgtgatcgacatgctcaataaattatccctagacaacaagttcattaaccaaatctaagtgccaccgcaacagagacccttaagttaaactagtctcagactcaatcaccattgacgagagctaacctaacaggcattacgaatcaacaagttaaagccaaaacgctccctacaacaaataccttagtacagggccacgaatctctggaattagtggttcggacatttcatcgaacaccttttgggcgcggaaatgtctaggctcaaattccagttgatcagaaagcaataggcattaagaacaactaatccagaagggatctataaatcaaactcaaccgcctagcatactgagaattctaaactaccctaacccatcctcagaaacctagtcactactcatacatcattgtagaaagcataaacgatgataagaatgaaaccatgatatcagtagagtaataacaagatgataacaggatgaacaacattaaacaaaatcaaaagcaaatactgaatagattaagagaaatctggattacaaaaacgtcaagaacacagtgtctgcggaataaaactttgattatcgaaaatgtaaagtacgtgctacttatagcaaaatatttcgaaaccctaatactcaaaatgacacagtattgggacggattaagaactatactcgacctaggtggtcgagtgagtggtcgagtgataagtacggactcttatgctcgacctacacatgttttcaaatctaccaatccctttaaacattcattagttctggaacgttaatcaagcaatgcatcatcaatgaactcattgggctaaggtacagatcaagagacaaagatggtcccttacaggataggcttcagtaacaggggatctctcaaaaaatgactaagctttagtagaatgctaaaggtaagtcccaagctatgcatacagagataagatcctatctacccaaagtatatcaaatgaagctctaatggtaatcccatctccaatcccaatataagaacctaactctactctttgcattcatgaatcttttaagccctttttctaatcattcttttcttttctcttaactctaggagaagctttctcaacattttgatacttctagaagatttgggtatccatgagttcaaatttgatgcaaacatgataattaaagatcaaattcaggttcaaattgataggaaatggtatcagatcatgacaatgtggtcgagtagagcaatctaggcatggttccgttttactttaatttcattgactacgcaacagacaactagcaacgagggcactgcgtttatctagtaaaccaaaatgcttacaaggctatctcatcattatcccatatgcatatgcaacaatcctaaatgaaacactctagactggatcctaaatgtaatgcaactacatgaatactctgtttttgtgaaatcattttctgaaatttttcacatttttgttttttttgtttttctatgccttagatgaatgctgactcaagagtataaacaatgcaacacacacttcctgagccttcccccaaacttaaatcacatagtccactgtgtgactaaacttggaagagagtatacaagacaaatccaatcacataaacaaaataaagaacaaatcacaagagatgatatagtacaatagtgaagtgaggtgcttacctctgtcgaagaatgaacggagttggtcgtcaatggctgcctatgattgctcccaggccatagacgagccgccctgttctgtgtcagctccaccatgtgggtactcaacctcatcagctctgtggcggccagcaccgctttgaagatactcgacctctcttcttctactacaaccagcatcgcggtcacgtaaactacgagactgcaaaagtcgtctgctcctgctgctagatcgagtgagtgtggttctcctctttctcccagattcacgagactcaaatgatgaatgcctcgctaggacatgcggaatctctcgcagggataaactccctttaagactatgtatcttctgttggtcgagtaaaatgatgatttaaatttttttgggttttaaacatcactcatactcgaccgatatactcgagtgcaaggtctccaggtgcaacagaaagttttaaaattttttcactcctctgtactttgtactcgatctctatgccatctgtagagaaaaagttttaaattttcactctaccttcacgttattcctttattcgtgagaaccacaaacacaactaaaacaaatcaaaaataacaagaaaagaaaaacctattcacatagatagtcatgggacttcctcccaagtgagcttgtttaaagtctctagcttgactcctcacacttatcaagaagaaaatgaatgatagagagggtctgcatagttctctctaatatcattctcatactcagtgtcctccctggagaggtctacttcagaatactcaattcccctctcttcaaaataggcttctttctcttctggagggtaatctatctcttcaaaacatcttgaagtgaacttctttcttgagatagtgtcaatcccgcctttagattgagcttccttctgcatctgattcagcttactcctatgttcctcaacagtgtgggctagcctttctatagtttcttcttgtttatcagacctctttttaagctcttttacattttcagtctcatatccttctcctgggatcactctatcgtctccagagggtttttcatcttttgttgactcttgtggagttttgttgatgtcaaactgcaacttgatgtgctttccaaggttgagactttttttccctttcctgacatctatcactgctcccactgaggctaagaaaggtcttcccatgattaggggatccttatgctcttcttccatatccagcaccacgaagtctgtaggcacttccactccattaatcatgactggtagatctttcaccatgccaaagggttttcttgaagacctatccgcaaggatcagagttaggtcacaaggcgtatactgaacaaattccaaccttcttgccacagagagtggcattaagctgacagaggctctgagatcgcacaagcaatcgctgaaagctaattccccaatggaacatggtagagtaaaagatcctgaatctcctaacttttcttgaagaatcctcttatcagcagctcgagatggagtaacatcacattcatcatctgaatcgtgatacatcttgatcctttccagtatcagattttgttacatctttgtgaggatgaggaatcaagttgagaacttccatcaatggcatcactgcttcaatctcgtctgactgtttctctgcaactgacttgtatctctccatctaggctttcctgaatttccatggaagagcacgtgatggtaatggagtaagtttgaaacgttttaccatcctctcaattatggctgctttctctttttaggtggattaaatgagatgtggagaaccagaagaatggttgaattcaacaacagagacctcaatctgagtagaaggctccacttcttgaactgtccaagtgattaagtcaggaataggtcgagttggcagctctcgatcatggcagatagtgatgacgtgagcagttgtatactcctatggattatgtattgacttcccaggaagtcctgtaactttaggtgcagaggtagatgctaattctccttccaagtatctgactttggtattcaatgcctccactttgacattcaggtcattgtagctgaagtccagcttatggtgcaattcagataacttcttagcaatttccaaggagctagatgcttgtccctgtagcaggtgttgtaccatctgtttcatttcagcatcaagagcagcaggaccttggttttgctgaactgcaaacccaggtggtggttggggctggtagtttccctgaaattgctgcttgggaacaaaaccttggttgtagggaacaaaaggtttgttctgaccttgttgttggctgtggaggatacacttggtcttattagcaacgttggtgctgcggtaggagaggttagggttgttggtcttgaagttgttataccctttgtagtcaccctgattgttgttgatgtagctaacttcttctaactggttaccctctccatcttggacttgatactgctcgtcctcaacaagaaagtgcatatgcttctgctggctaagtagaattctgtctagcttgtcattcagcgctttgatctccttcctgtgtttgtcctcagagtcacctgtgcctggtcctgtcgcagtcctcgttgtaattaccatctgattgagctaggttctcaaccaattcccagccttcttcaacatctttgttctggaaattcccattgatggcggtttccagaagcattctgatgtgtgttaaaactcctcggtaaagagtgctgagcagagaggctttcttgaagccatgatgagggcattggttggtgtaacccttgaacgctcccatgcttcacatgagctttcaccaatttttggtgaaaaaccagaaatctcatttctgagtcttgcagttttggcattggagaagaactttgctagaaaggccttcttgcaatcatcccaagtggtgattgagtcatggggcagactcttctcccaattgtgtgctttgtcgcccaaggagaatggaaacaaccggagcttgaattcgtcttcactgacaccgttgattttgggtaggttgtagagcctatcaaattcatcaaggtggtcgagtggatcttccattggcagaccatggaatttgttccccagaatcatcgagatgagaccactcttaatctcgaagtttttgttctggatagcaggaggtgcaattcctttcctttgacgatggtcccgtggtgcatctccaacaccaatgttggcagggccattatgttgattttgttcgtcagccatttcgagtgggtgctggggtaagcaccaatgttggccggcccattctgtctgttggtagggccattctgtctgttgattttgttcatcagccatttcgagttgatctaagcaagtttgaaatatcaaatgtaacaaacaaacacccaattggcaacagcgccaaattgataataggtttttaagatcaattaatcctaaagcactatcatgtcgttgtagtactgaaggttgtcaatcccaatgagtgtgatgctaacaatcaagatgcaatcagagttcacagagtcaagccaaacaataacaggtttttgtgtgttctaacagtcctaagtgaacatgcataaaacagaaaataagacagaaacaataaaacactcgaccaacacagctcgttgtagagcactgggtgtggtcgagtgactggtcgagtaacaggcagtaaatgaaacaaagatactcgactgtacagtctgttgccagacaactgggtggtcgagtatcacgtcgaataacaggaaagaattgcaaaaactaagcaacatgtgacaatatgcagtaaacaacagcagagtaaacaaaaaaatcaattagataaagaaattcccaaggatggggtaattgagtagttttgtttcctcagtttacaggtgatcgacatgctcaataaattatccctagacaacaagttcattaaccaaatctaagtgccaccgcaatagagaccctcaagttaaactagtctcaaactcaatcaccattgacgagagctaacctaacaggcattacgaatcaacaagttaaagccaaaacgctccttgcaaccaataccttggtatagagccacgaatttctggaattagtggttcagacatttcatcgaaaacgtgttgggcgcagaaatgtctgggctcatattccaattgatcagaaggcaatgggcattaacaacaactattccagaagggatctataaatcaaacccaaccacctagcatactgagaattctaaactactctaagccatcctcagaaacctagtcactactcatacatcattgtagaaagcataaacgatgataagaatgaaaacatgatatcaacagagtaataacaagatgataataggatgaacaatagtaaacaaaatcaaaagcaaatactgaatagattaagaaaaatccggattacaaaaacgtcaagaacacagtgtctacagaataaaacttcgattatcaaaaatgtaaagtacatgctacttatagtgaaatattctgaaaccctaatactcagaacgacacagtattgggacggattaataactgtactcttcttttcttccttttcttccttgcgctcaagtgtctggttgaatgtggaatggggaagactatgaagctggcagtcgagtatgtagtcgagtgatagagatggtggtactcggcttggtggtagagtgatcgagtgaaggtgatgaaggtactcgaccatgtggtcgagtagggtgatcgagtgaaggtgatgtggtggacgtgatgatactcgaccagggggtcgagtgatgtgatcgagtggttgtcttggtggtactcgaccaggggtcgagtggtgacgtgaagtgatgaagtcttctactcgaccaggggtcgagtgatctgttgaggttgtgaagcatctactcgaccaggcggtcgagtggtttcacatgatcaagtccgcttcttctagttagctcgtcaacagctcgaaatcacctgaaattaacacaaatatgcaacatgcatgcaaaactatcctaaacatgcaaagtgatgacaaatgatgagaaatggtatgaaacagtggtgatatgatgcaatagtgataacaaatggatgctcaaaacatgtaaaatgcacatttatcaactaacaataacattggttgcttagaagaataagcactcttaacctcaccacattttgcaaaaaagttgggctgcttgacgactttttctttcttttgtttcagatgtattttatcttgataaacctcatgtagagtcatagggaccagaatagtcttccctcctttaaactcaaatgaatgacgattagtgaaaccatcatgtattaccttcctatcagattaccacggccttccaagaagaataagtccaacttccattggtaaaacatcacataagatctcatcttcatacttcccgataacaatgggcacaaccacttgatttttaaccctcatttcgccacaatcattaagccactaaagaacgtatggtttcacatgtttttgcactttcaatccaagcttcttaaccatagtttcacttgccacattcgttacaactccctccatcaatgatgaggctgcaaactttcccgtgcacatgacaacccgtgtgaaacaagttttctctctgttctttatcatcggtcttggtttggatgctcaaagttctcctagataccaacaactcacccttagccggcagctcctcattctctttcaatgaagaaggtgatctggaatctcctcctcggactctatatctccattatccatgtgattcgtgacatttgtatgatgtcctttccctttcccttgacatttgtaacacctaacatcacgaactctagatgtagaaatttcagcctttcctttgtaatcttgaactgcagcatatggttaatttcagcccttgaactgacaatcggcttatagctgctggttctctcctctctttggtaagtaggcttaacaacggttcctgaaccataactagatcatgaagaactcttcgtcttaacttgctgctcaaacaaaatcgccttgtgcaacatctcttctatttcaacatagtattgagtctccaatctgttttgaatatctctgttcaaacctccaagaaaccttgacatagttgcttctctatcctcggaaatatcagcccgcaacatcaaagtttccatttctttgtagtactcttcgacataacggttcccttgtgtaagattcctcaacttgagatgcagctcacggtggtagtgactagggacgaacctcttcctcataatagctttcatttcggaccaagattccaatggaagttcttgcttacacctccgtgaagtaactagttgatcccaccaactcaaagcatagtcataaaattcggtagcaacaactcttaccctattgatctcggtgtagtgttgaaaattgaaaaccaattcaatcttcttttcccattccaaataagcatctggatcattttttccatggaatggtggaattttaagcttaagacctccaagattgtcttgcaaaagatctctaccttcattagcacgtctatggtgtctcctatgactattgcgagataaagagctcctatgcccatagtactgatctgtagcttcatctctttgctcaagctgctcatcaactcttctttgtactcgaggacgagtctgccctaattctagtttctcatgaaacacttggcgaaaagcattcagtttggtgtccatcattttctcaaaggcttccaccaaaagtttgttgttgcgattgtggttagtctcttcctcttcagtttcagccattctttctgcaatagagacaacaaaacaacaccagtaactagttcttttgaaacaaacacgaacagacccttcagataccctagaatcctaattacgatagtttcacttgttgggatgctaaaaactaccaaatcgtttccaaatatttcagaaattttttcaaaaatagtagactcttttccaaacctgtgacagttgatttcgcaattttaacacacgccaattaattataaaaattaaatgaaggtgacagacggaaacagatttgaagatgaaaagacacaaaatggtgagattgaagactcaactttcagagtgtgctttgataccacatgatgagatcctcccaaggactcgacattcttaagttgagcaaaggatagaggtggctgtgaagccgtgataatggatcgatttgaatgaatcgatggatatcacagaagcttgcagaaaggcttcaaaataccaaaagagactaagggttttgctggatatacacaccagcaagatgatcttcttagaaaaggtttttgattaaaagaaagataagttctcaaaagagaatacaagagtatataaagagaaaaagaagagaagatgacgagacaagtcttggaacaagctccaaggctgcctagaacacaacagaaattaaaaacaaagtttaaaattcaaaagtaacccttcaacgtcaaaggccacgaaattgtctctttattttagtgggcttgggccttgaatcatcaaaatggattatatgaagcgaatacataagcctcattaaaaaccttcctttggaaaatccattgggacaaaaccaaaggcagggaaaaagagcactcatgaatcacttatccatcttgatgaggtccttgagcttgaatcaaaaccaaagaggtagtgacttggctcaagtcatttggtcggtcccaaatgtggttaagcatccatccaatggcttggttgaatagcttaactctagaacgagtcattggaacgtccggtgcgacaagaacatcctctgcctcaagcttctcccccgctacaagctcatccttggctacaagcttagctccttcctcggctacaagctcacgttcaagctccggttcatgctccatatccttaatgttttccatgatcatatcacgtcgccacctgtcgccacgccatcgtctgagacacacctgtcgcatgtgggcacgacagctgtccggacatgtggcagggggcgatgctgcatggccgaccttgggcggactataaatgatgctcatctctgcccgttttcatttttgaaggcgagagagagactgtaaggctgcccgacagataactcgtctgcaaccgagaaaacttgcccaaattcagtaaatcttgcacgtggtcgaggaaactctgtccgtgcctggagaatcgacgcctgtggtcgagagaacttgaccgtgagtaagggatcgtcgaccgttatcgaggaattttgcccgagacccagaaaccttccaaattaccgaatatgtgagttgtggtcgaattgtgtgtttgtttgcatgttttctagagctagtctttagatcatatgcatgcatagtcacttagacttaactaatcggaattcggtttaagttagaacttgaatcttaaaatgatggttacttgatgaacttgatagttaatatcattaaggaatggaatggactggtgcatgactaggctaagtgaatatggacttaactaagtttacttgatgaatcgagatttgattcgagggattacttgcctggttagattgttatacttatatgagatatgctatgaggctgtgaataagtccttgctatatcatgtatatatatatatatatatatatatatataaatacgtgatttagtacttgattttgttatacttgtttggggtgtggtaaactacttatatttagtactacatgaggttattgtgtctaagtggtattcagggtttacccgataccatcatgctttaagtaagctgttaccttcctttttgtgttgtgattgtgtcagtaagtcttgatcctgagtggtcacttacatgatggcacaagtctcgtagcgtatgtcgggtaatgcatgacgatgcactaaagtgatgttccgattataagctcgggtgttcatagttgtgtacgtacgtgtggtgtgggtgtggacgtacgtgtgtgtgatagcatacatgtggagaaaatgtatacacgtatgcgggagtttgtgctgatgttgtggtgcacctttttggtaaggtttacagtattttgggcccaaggttcattcatgtgtctagttcggctgcatattctggtattattataaatatataataatacgtttgctgcgtgttttgtgatatatgatggctaagtttacttattaagttgattaaaccctagagatttaattctgcatagaccgagctcactgagtaatgctagattactcatgattctacttgtcttacaggtaaccatagtgggatgaccatagcgggaagacaaacactaggaattgccggaaatagaatgtttgcgttgcttctgcaaaattacttgttattatgtatttttaacaaggatccgacataaagatatatttttgggtaactctttgcaaagtataagctatatactacatataaagtgttttcttaaaagcagccgagtgtttaatgatataagacctagtccgggtcgctcaacactagaatatcatgagggttggcaagcctaagtggtgttcctagtgggaagatggtcgattataatctggttaaggatccggattcatctggaacctctactgagttatggtcgatcatcttcactgtagtgtaactaggtcgcccgtggcttgtccgccaatagggcgattcaggggcgttacattatcctaatctaatccatcctcaagaaccctaataactactcaaacaacaaaatcaagaacataaacccaaaaattactctaaacatatcaaaatgtagatctaaacaatataaacaactttactcaaagaactaaatgcaaaaacaaaatagattaagagtaattaaggtttcaagattcttaaacacaaagaaaatctacagaataaaagcttcgtcttttggacaaaccccaaaagacatatttatagtaaaattccgaaaaccctagattcactagaagacaagagacttgaggcggtttagaggaatgctcgatcttggggatcgagtaaaaagggtgctacaaagtctgctttgaatgatcaattggtcgagtagttacttcttcctctcctcttcttatgctctgctgtctggttgagtgtggaatgaaaagaatctgaaggcgctttgaatgatcaacaagtcttgtggaatgggttgcttttggtcgagtacttgggcgagtagaggattgagtagggggtcgagtggtgtctactgcttcctatgtagctgcctggatcgagtgaatggtcgagtgaattgccctgctgcttccctcctggtttgatagagtatagggtcgagtgatttccatgtatcctccttctacacctaaaaacatacaaaaacatgcaatatgtatgcaatatgatcctaaatgcctaagtgtgcaaaataagctaaatgtggtgcaaaatgatatgaagcaatgagtgaacactaagctaaatgatgataaacatatgagtaacatgagtaaatacagtgttatctgttcctaaaagataatagtgttccatgctacaacatacaaacccaaagactcatacggacttcggctacaccattatagctttgagaagcaataaaaagcttggttagtgtttccgagtcaaatatgaatagatttcatgtgtatgattgagtataagaactagaaccgcaaccggttccgaaaagctaaagtagtgttttcctgttagaagatacaaagccaaagactcatgctgactttggctacaccatcaaagctttgagagggaataaaaagcttggttagtgttttggagtcaaatatgactagatgtcatgtgtatgattgagtataagaactagaatctcaaccggttctcaaaagctaaaggagtgtttctttgatagaagatataaagccaaagactcatatggatttcagcacaccatcagagctttgagaagcaataagaagattggttagtgttgtggagtcaaatatgacaagatgtcatgtgtatgatgcactacaacaaatatccacattgatagcagacgaggataacacattttccgtcactgctatgaaagattaatttttttttgggttcttttttaatagtttattaaaaacgctatgataggaaatacatgagtgggagtctaaaatcactcaacccgccaacactttacctaaattattcacttaagcgcgtctagaactattcatgtctcttccctcttctctcggcaaagacctaaggtttcagaaaaaaacaccaaattctctgatccacgattgctgtcaaattctacagtctcaaacacaaaatttcattatccccgaaactataatcttctctctcgccggtctgcttctatttcgagctccattgaagtcacattcaagctccatcgaagtcacattcctctttaatcgccagcgtcagcgagctcaaatcaaaggcatgtgtttcttcctttcactaattcctctttactcccaaatatattgtcaaacgattttgagatggttttattgaatttagggtttatgtgcatcgatttggtttatgtgaaattagggttcttgggtaatgtgattcgattacaagtttcagagttataattcttgtagatattatataacaatcgattacataagttgtctagcttcattgtcaaatgattatgctattttttttgcaagtgttggtgattgaaacgcttggaaactgaagcttgttgttcttgtaatcacacgacaggttagtctcttcagttgctttggttgtctttgtgattgtgattccatttgtctgtgaatttgcttcattttccgcgactgttttggttctgtgcattgctttggttgtctttagaattgtgattgtgattcatccgttatttgcattgctttggttgtctttagaattgtgtttatattagaaatgtctccacataagatgtcgctgtgagtgaatgtgctttctttctttttaatgttggttatggcttgaattggtgttaaaaaggtttaggcttatataatgttggacaagacatgggtgcagctatgcaggtaaggaattatcttatataggttaggtttacaaatgggttttggatactttaagaggcttctatttggctttctttattcattgaagagctgatcccaattacgagagaggtgctcggagttttgtacgtgatgtggttgcggctctaggagatatcgatatgattatatgtccctgtaaagagtgtcgtaacgtataccagcagtcaagcagtgatgtggttgtccatctggtaaccaaagggatggatgaggcatacaagttgcaaagtgaatggtatcatcatggagactctgtggcttcagctgaaggcgtaagtaccacaaatcagaggaatgatgaaattcttgagctatacaaggctgctgaatattttgatgaagagctggctagcaagcgggacttagtagagactccattgggtgacttagctgagatagcagaagacgaggacaggagagaagatgaattcctagccaaactagcagatgctgaaccccctttatacccgagttgtttaaaccacatcaagctctcggcgattgtgtctctctttaggattaaaacacgtaatggatggtctgacaagagcttcaatgagctgcttgagacattgccaaatatgttgcctaaagataatgtgctgcacacatcattgtatgatgtcaagaaatttttgaagagcttcgacatgggatatgaaaagatccatgcttgtgtgaatgactgctgcctattcagaaagaagtacaagaagctggacaattgtcccaaatgcaaagcttctcggtggaagattaatactcacagtggtgtagtaaagaaaggtgtcccacagaaggttctgcggtactttccgattatcctgcgacttaagagaatgttcaggacagctgaaatggccaaggacttaaggtggcatttcactaacaagagtagtgatggaaaactccgtcatcctgtggattctgtgacttgggataagatgaatgtgagtatccaacatttgcagctgaagcaaggaacatgcgacttggactgtctacagatggctttaatccgttcaatatgaagaatatacagtacagttgttggccggttcttttagttaactataacttgcctcctgacctatgtatgaagaaggagaacataatgtttacactgctcattcctggtccacaacagcctggtaatagcatcgatgtgtacttagaacctcttattgaagatttgaatcatttgtggaagaagggagaggtcacttatgacgcttaaagtaaaagcacattcacgctaaaggcaatgcttctttggactataagtgaccttccggcttatggaaacttagttggttacaaggtaaagggtaaaatgggatgtcctatttgtggtaaaaacacaagatagtatgtggttgaagtttagcaggaagcatgtgtatatgagtcatagaaaaggattggggccaactcatagttatagggataagaaggcttggtttgatggaaaatcagaacatgggagaaagggcagaattttgactggtcatgaagtttctcaaaacctgagaaactttaaaaacgattttggaaatgtgaaaggatctgggaggaagagaaaaaggactgttctattatctgatagtgattattcatcaagtgaatccgaagaagaagaagaagtagaagttgacgaggatgagttatcaagatggaagaaacgatctatcttattcaagctgccttattgggaggtatgtatagcttaatataattttagaattgataaacggatatttgtttaatgtgaaaccttataattgtatttgtattctctatatgatctcacggtaagacataacttggatgtaatgcatgtagagaaaaatgtggcttcaagcattgtctctacattgttacattgtggaaaatcaaaagacggtcttaatgcccgtaaagacctccaaaatcttgggataaggaaggatttgcatcctacaacacaaggaaagagaacttaccttcccgcaacaccttggtctttgtcaaagaaggagaagaaaacattttgcaagcgcctacatgactttaaaggtccagacggttattgttctaatatagcaagaggcgtttccttagacgactgcaagataacaggactcaaatcacatgattatcatgtgttgatgcaacagcttcttccggttgcacttctaggtttgttaccaaaagggccaaggacagcaatcttaagattatgtgcattctttaaccatttgagccagagagttattgacagagaggttatttcagtgatggaaactaaaatagtggaaactctttgtatgtttgaaagatttttccctcctagcttctttgatatcatgatacacttgactgtacatctaggaagggaagctagacttggaggaccagttcatttcagatggatgtacccatttgagatatttctttgcaccttactttaaacacttagtataagtcactgaaatccattgtaatatagatgcttcctttgtattgtaggtacatgaaatttttaaaagactttgtaagaaatcctgcaaggccagagggctgtattgcggagtcataccttgaagaagagtgtgttcagttctgtggtgatttcttgaagaatacaaccaatgtagaagaaaaagtagataggaatacagagtatgagaacagctctattttagaagggcgtccgatatcagcagggacttcaataactctaagtgaaatggacaagaatatagctcatcttgctgttattcaaaacatggctgcacttgaccaatatgtagagtaagttctctttctttcttaaaacatggctgcacttgatcaatatgattatatatgtaactgaaattcttaaatttctcttttgtaagcatgcatctacaacatctacaagactcaaatccaaggtgtaggcgtgatgcatcacacttatggagtatgcatgccaaaaattatgcttcttggttaaaagaacaggtaaatcatctcttttcttggttaagagaatagattgaaatctcgtgatggtgattctggttaactctaactgatagtctctttaaccgcttgctagatacctcttggttcgactgaacatgaagatataattaagtggatagcatatggtccacgatgtagtgctaggtcctttactgggtatatagtgaacgggcatcgtttccacacaagctcacttcaaaggcaaagtcagaatagtgggatttattatgagtcaactgctatgtgtagatctagtgctaaagataactcacaagtggtggatttggtatcctactatggtagagtcatagatatcattttgctggattataatgtgttttatgtgcctatattccggtgtcaatgggcagttagaggaaacagagttaaggtagaagatgggttcacgcttgttaacttgaatcacagtcaagttagcttcttgaaagatccgtttatactagcctctcaggcaaagcaagtcttttattctagagaagatgatgcatcaagctggtatgtagttatgcgaagttcttcgagaagaaactgtaaagaacaaaaccccacaatagcacagttcactatgaaggtcagacataccacaatcttgatacgcttatggtctctgcctcctaccacgagcaccacgcatctagacccaacatttcaagatattatgagacatatggttactcaaactcatagaattatcaatatccttactcaacacaacctcccaactataagccttaagcataagaatctaaaagatctcatatgcggctcattaccaccattcacactattaactaatactcatatgattcacgaaataaatcaatgaatgcaagagcatatgatcatgcaactaaaaaatcaatcaatcacccaaataaacacccaaacttagtcctcttaggaaccttcgtaccatcatagcttcatcatccctttcgttgtacaaatatctccaaagtcttgtaaaaatttgctcctacgcaaaggcaatcttttgcccttgttccaaactcataaactgcaactccagacgatcacatgcctctggtagaaaatacttagactcaaactccttcttaaacatttcccatgtgataggctggtcgcggtatcgtgaaacaacactatcccaccaagctcgaccatcctcatcttaaaagtataccgctatgtggcccttaaagtcttccgggcaccttgacttttcaaaattcatttccaggttcctcaaccacttatccgctaaaacagtattctgctctcctttaaacttcgaacacctaaatccttcattatccataaccagctttaagaactttgccgaaggagattcggcacgctggcttttctgcatctgttgttagtgtagctattgttgaatcatatgagtcaacaaggtctgaatcatccccaacatcgattgagtctccaacacactttgaacattacgaccttccccatttccttcatcaacttatcttggcagcgacggatttttgtgtgcagtgggttgattcacaggaacatgtgatcttgtctctgactgtgaccctttggatgtgctacagtgcataaaccttggtaaggagtattctggtatggttgcgggaacatcccaatcaggcgttccatacatattgggataatagtatccctcatccccttctcctccaacatacggtacccagtcttccggcccgaagtgctgactccagttttcataaacaggtgagaaattcatcgactcgttcctctccgttctttgacaagaaatctgcattcaatcaaccaaggtaaacttaacccatctacctaacaatggtgaaaagacaggattactcgataaaacattttgaaaaacacgagtcttgctagcatcattaaccatgctctgataccacaaattgtaacgcccccgagacgctctatgaccagacaagtcatgggcgccccgaaaacgccacattgagattgatcatcaacatccaaccgaggtttgggaacccatcctaacccttggccgacgtattgacgaccactctcccacttaaaacattgtttaggcttgccaacccttacgatatttaagtgttgtgccgattcagactaagtcattatcattcattactcgcaaatttgtacaagaaacctgatttatttcataagtatagatattttacaatatgttaccaaacatttataagttttatggccaaggcctagtgccaaaagcacggtacataatagaaacatacttgttttacaaaaggcacaaaactactccaagtttcctattgtccaccacgcgctctaatcctcactatgggttttctgcaaaataagtagaatcatgagtaatctaagattactcagtgaactcgggattccctgcaacagacattagtttaccccaacccaaatacccaacatggaacacacaacaaagcatggcaacgtaaggtagcttgccgaagcaaactacaaaaatatgcaaatgcattaagactccagttttagtaagttttaaagggcccgatatgctttcttcaaacccaacaccaaacacacacactcccgtgatctcccgcgttacaaccacaaaggtatgcaaccggagcatcactaccaaacgttacaccgtcgtgtatacactcggccagggtagctttccccgtctcttcgagttctttgcacttcatggtgataaagtaacatcgttacaagaccccacgatagcatggttcactacgaaggtcagacaaatcacgatcttggcacgcttatggtctttgcctcctaccacaaacacatcgtaccaagaccctaaagtttaagatattatgaaaaatatggctaaatcaaataatagaatcatcaatatcccaacacaacctcccaaccataaacaatagcataagaatctaaagatcacatatgcaatccaatataaccattcacacaattcatataactcacgaaatcaatcaagaatgcataagaatatgattttgaaacttaaacaattttctagaactcactcagtaaccaacaggatgcgtgcaatgattcggaaagaaattttggctacaggaccttaacttgaatcggacgaacggtctttaactcggcagcctctcactttcgttcactttctcttcacaaatcatttcgggtcgagttgggcttgaataggcaaagcaagggcgtgtcagcatgtacacatgtcaaacgcttgggcgagtcagcaatccacgtgtcatccgcccatgatgacacgctcaccgctttagaagatgagtgacatgtggccatccaaacttcggctccacgcaactttcttgggccccaagttagctgagccacgtgtccatggtgcggttaaatgccccaagtatttgatcatggaactaaacaatcaatcaatcacccaaataaacacccaaacctatcatgtgccatatcacacgcttcaagactcacatagattcggttgaaggtttaaggttagcttcaacaattctcggacattccatggcttcccaatcttgatcccatctcaatttaactctcctcatcttgatctaacacctcttgatagaagcagccttgattcatgaagctttagtccgaataaacatttatgggacgggttcctcggtaggttctcgatcagacaggataactgaatagatttctcgctcatgggcaggaattctcgatcactgacaggaattcttcactcacggtcaagaatatcgacggtaaggccttcttcacgttttctcggtcttacgggcagttaataactcaacagcattttggttctctctctctttttccctctgaaaattcttaaggccgaatggagcttatttaggggcggcaggggtgagtcagccagtacacatgtcgtccgcatgtgatgtcactcacgtggcaacgctaggacgatgacacgtggacatcaagactttggctccaagggacttaacttcggctccaagggacttaacttcagctccaatcctttaaaattcagctccaagcaactttgcttaagctccaagtaagccagcccacgtgtccatggcgcggtcaacgcccggtggggcaaacttcgcctacgccacgcctatgttggccaatcttgcccattcttgcccatctttgctcattcttgcccaaatagttatttctttttccctttgatggtttatcaccttttgggcacatatggtcaatgatcatgtattcatggcaactttctccagttttggcttcgcccggattaccccatttcaaactagaattggccagtttcatttttaccttgcccatatctttggctttcgtccttttactattcttttctcttttagttcttccttggacgttcctagatgtttgcccgcttggtcgcataccccttagcgagggtcactacacaaccccctctcttttatttttgtcctagtttcactctcttcttaaggatttctctaaactacttctctccttgtggatttgatcctaaaatactactccgatataatgtgctcttgcagtagtggtgttgtctattaggtaaaagcctgaggcgaaataaacatacatcaccactcgaccccatactcgatcctttacttgaccaatcactcgatcacagccaacggattccatctaacctaaagatcgatcaaagggccttccgatcctcctcatttccccactcaaccagacaactgagcataagaaaaggagaggaagaagaaactactcgacccagcgatcattcaaagcataaaggcaaaggcgcaatctttgtagcatcctgtcactcgatccccaaaggtcgagtatccactaaaccgtctcaagtcttttgtcttcttgtgtcctaaggtttttgggattttactataaataggtcactttggggtttgtccaaaggaccaagcttttatcttttagtttatttttgtgttttagaatctttgaaccttaattactcttaatcaatttcatttttgcatttagttctttgagtaaagttgtttatctagcttagatctacattttgatatgtttagagtaatttatgggtttgtgttcttgattatgttgctagagtagtgattagggttcttgaggatggattagattagggtaatttcagggtttttcaggtggttaagattaggttagatcccttttggattagttgggcttaatgtttatttctttctgatcaattggaattcgcctaaggcattcttcatccaaaagatgttcacatggaatgcctgatctactaattccagagattggttcctctatcccagagatggctctttggagggctttttggctttgatttgttggtgcttagtgcctgctgagttagattcctttgacaagaccaagtctggacctaactctgtttgaggtcattgatgcgagactgctttgatctgtattaaaacattttgtctagggtatttgcctttcacttgttaaccacctgatagaccctagatttgcttttatcaatgaatccatctttagggcttctattcttcttagatttatttgcttatttacattcacctattattgcatttctttcacctattatttgccttcaccctgtttagttacctattattgcatttttgtccttgaatctgtcgtttgcttggttttactcgaacttgtgatcgagtagggcacttagttctcatttttattgtttgaaacttgatttaggattgttactagaaacccaccatctttatacatctggcttgacttagttgcttttgtacacattttgactgcttagcaaacccagtgaaatggattgacaccccatgttgctgcatcaacatgttagtgtttaaggagaaattgaatacaacctagttaggcgttaaaacctaactatcaagagtaaagctaggaccaataaacaaaagagggttttgttgcaagtaaataagtaagtcaaggaagaaagtaaatcaagcaaatgaaaggaataagagaaccattgggtattcaagagatcacaatggattcaatgattaagtcaaaggataacacagttaggtttgtttatttccaaattctctcacatacaaaactcattcatttttgactaaccctatggtgtataggcttagagtcggctaatctccccacattctgttacccaactatcgaaggcaacgttacatagatcaaagcattaagttcaagttcgattctagcccataaggccctataaatcaactaccacaggttgtagcacaatattcattcgtgagttagattaaagagtattacacaagattctgccaagcataaaactcctaagatcatgttctaggtgggtgtaccgagcataaattcattaaggacaaactcaactagaaaaaagacagtataaacaataaaaaaaaaacatagttaacgccacttcaacattagatcatcaacccccctttgactagccctttaaacgcaactagagatctactcttgcatggtaaagggactcatcaaagggttttttgataaggctgataataagtttttagtcaattaatcctaaagcactatcatgtcgttgtagtattttaggttgtcaatccaaatgggtgtgatgctaataattaagatgtgatcagaagtcactaagtaaagccaagcaataacaggttttggtgtgttctagcagtcctaagtgaacatgcagaaaacagaaaatcaagcagaaacaataaaacactcgaccaacacagctctgtgcagagcactgggtgaggtcgagtagcagacagaaaacgaaacacagggatactcgactgcacagtctgttgccagacaactgggtgatcgagtataaggtcgagtaacaaaaaaaagaattgtagaaactaagcagcagatgacaagatgtagtaaacaacagtagagtaaacaaagaattcaatcagataaagaattcccgaggatggggtaattgagtagtttcgtttcctcagtttacaggtgattgacatgctcgataaattaaccctagacaacaagttcattaacaaaatctaagtgccacctagtcccagactcaatcaccattgacgagagctaacctaacaggcattacgaatcaacaagttaaagccaaaacactctctacaaccaataccttggtacagggcctctggaattagtggttcagacatttcatcgaacaccttttgggcgcgcaaaatgtctgggttcaaattccagttgatcagaaagcaataggcattaagaataactaatccagaagggatctatcaatcaatactcaaccacctagcatactgagaattctacactactctaacccatcctcagaaacctattcactactcagacatcattgtagagaacataaacgttgaacaggatgaaaacatgataacaacagtttaatagcaaaacgataacaggatgaacaacagtaaacgaaatcaagaacaaatactgaatgctgaatagataaagagaaatccggattacaaaggtctagaacacagtgtctgcggaataaaactagaaaaaaaacttgtttgcaaaaatgtgaagtacatgttacttatagccaaatattccgaaaccctaatacttaaaatgacgcagtattgggacggactaagaactgtactcgacccaggtggtcgagtgggaggtcgagtgaatagctggagtcttcttttcttccttgtgcttgagtgcggaatgaagaagactctgaagctcgcaatcgagtatgtagtcaagtggtggtgatggtgatactcgacttcaaggtagagtggtgagatcgactagtggtctagtaatggaggtgaagacactcgacctcggggtcgagtgatgtgattgagtgatggtcaggtgatggagatgaagacactcgacctcggggaggtcgagtggtgaggtgaagtggtgatgtccactactcaatcagggggtcgagtggtctgctgaggttgtgaagcgtctactcgacctgggggtcgagtggttttgtatgatcaagtccgcttcttccaattagctcgtcaacagctccaaatcacctgaaatcaacacaaatatgcaacatgcatgcaaacctatcctaaacatgtaaagtgatgacaaatgatgagaaatggtataaaacagtgatgatatggtgctaaagtgatgaaaaatggatgctcaaaacatgcaaaatacacacttatcaactccccttaacttagtctttgcttgccctcaagcaaacaatcaagaacaagctggaggtgaggtttgaaagcggggactcaaagccaaagcaccagataaacaagatgaaatcaatgtccaagttggaagttctaagctgcaatatgatcgaattctactcaaaaacgttagccatgcctcattatcaatatatccgactcatatgctcgacctacacatgttttcaaatctaccaatccctttaacattcattagttctggaaagtgaatcaagcaatgcatcatcaatcaactcatttggctaaggtaaaggtcaagggacaaagatggtcccttacaaaataggcttcagtaacaggggatctctcaaaaaatgattaagctttagtagaatgctaaaggtaagtcacaagctatgcatacagagataagatcccatctacccagaatatatcaaatgaagctctaatggttatccaatctccaatcccaatataagaacttaactctaccctttgcattgatgaatcttttaaaccctttttctaatcattcttttctattctcttaactctaggagaagctttctcaacactttgatgcatctagcggatttggatttctttaacaactaaggttcctgtttttaacattttaaaaccaagggcttttgcccatcttcaatagctaacaagaactctttcttttctttacaaatcccaaaacctttactagacttttctacttctttagcttacttcacctagagtcttttaccttttcttatcaatgaatcaaccccctttttttcttttaaacacatcccaaccaaaagtataagcgcccacctagtcctatctagtccaaaaaatgcgaactagaactacatgagacactatctctgtcgttacgaacctaacactttctaccaagcttaatcggaataagacctcacaaacactcacaagtgatatagggcttgaaagaaagtctaggttttggttcgggttaacagctctaataaggagagtcagctacttggattaacaagagtgatcaaaacgaataagaaaatccaagtattttagggtatccatgagttcagatttgatgtagacatgataattaaagatcagattcatgttcaaattgatagggaatggtatcagatcatgacagtgtggtcgagtagagcaatctaggcatggttcagttttatttcaaattcattgactacgcaacagacaactagcaacgagggcactgagtttatccggtgaatcaaaatgcgtacaaggctatctcatcattatcccctaggcatatgcaacaatcctaaatgaaacactctagactcgatcgtaaatgtaatgcaactacatgaacactttttttttttttgtgaaatcattttctgaaatttttcaaaatttttttggtttttctatgccttagataaatgcagactcaaaaatatacacaatgcaacacacacttcctgagccgtcccccaaacttatcatgtttcttgtaccacttctgcagcttgctgttgtttctatgagcttcgctcaaactcttgctttcccgcgatggaggtataagctcgctgaaatgatacatgctcgtgtcaaactccgcctcatttatatcatctgtctcatcaacatcttctgttgtagctcctttggtgtgactaacctcctcagttggcggactgccctcaaaataaagatcttctagcgcaggcttgaagtcaatgttccttccctcaagaatcctagtagcgtcaatgcaggggagaagaatgttggcgattctagaatgctcgaacctgtagcggtggaagtcgccagccatgtcaaactccaagaactcacatcggcgcaaatgatccaagtccatcatcctcggtgctaaccctggttccttgagcggtactccacaagcttccagaattggcgtcaaaacgccacccacaaatagtgctcctctcacattcttcttaatgtttgtcaacgcccacttcctatatccacacaggtggatcaatagaggcattactggtggtgtgttgttgagatcgcctctcaagacattctttccctttgtacggcggagaatccctgtgagcgcggaatctatcatctccatgtccgtgttagacacggtgcctgtagactcccaggagtaaaagacgttggcaactgatcgctcaaagtagcggatcataggactctggattttgttgctcttggaccgcgccgagtttagcgatagattgttccctatagtggcccacaaatccttaagctcctctctgtcaaatctgggtttggttcccttttcactagggaaaccaaacagttcttccaacttcttgatcgaaagctgataccgctgttcatccactgagaacgtcaagaagcctaaccccatggtttccagctcaaagtctgtgagtccctcatacatctccacttgcagcgtggaaagaaactcgattgtctcctccttataggcagcgtaaaggtaagacatgagtgtctccagatgacacttctcgaacagatgctgcacgtcctccagtaaccccagttgggttaaagtctcatagcacggatacctcattccccagaagtcattcatctcaaagagtctgatatattcctccattgtaacctcgtcgggtttgttcagcagcttcgtctccttgcgccatgactctggctcatagtcagtttagatatcctcatcaatcagctcatatctactcgacatcgccctctttcctctggcgatttcagctcttctctgattacgtcgaactgcggagcgttcaaattcatccctgaagctctcgtaagcatgttgcctctcggtctaacggaccaggactcagcttcatccacattataatcagggtccatagaggattctccactgtagttactcatgatgaaacctgaaaacagaagaaactcaaagataaacgtaatagcaaaaccaaaaacacaaaccaatcaagtaaaaaggtcgagtataaccaaaccggtcgagtgtttggaccaaatccctttttttttatatacttcttcgtcggtttgatgtgtccgcggtcgagtgaaggctgtggagtcgagtgatgtggtattgaatgagaggtggtgattgagctggagagatgaaagcagcggcggtaaagtgatgaagctcgaatggaggagaaaacgatttgattggttgatcgtgaagggggtcgagtggttttgagcgagaactgttgaaggcaaattgatggtagggatcgagtgtttggtgagcttgagaggcggaggggttcttgcgacgaagtcgagtgaaacgactacgaatgaagaggtgagagacgattctttgagtgagtgaatggtgagaagcggcgtggtatgaagcggtcgagtgaagtttgagaggatgacagttgtaatgagagctcgagtgattttggtggtggagatgcgatgagagttgtggctgtgaaaggcgagagaggagcggtcgagtgcgtgaggaagagagatggtgaggtcgagtttatgaaaggataaggcgatgggatcgagtgtatagataaggagaggtcgagtggtgctttggatggatgatgatggggttgaagacgagtgatggagagaagggagggttgatttaagaaggatgcggtcgagtttatttggttgtggaggagaaaacgaggtcgagtgatgggggagaagtcgagtgaagatggggttgcgtgaagatcgagttggtgtgaagagattccatgtctcttggtctgctgcatggaggacatgggcgtcagtggtgggttccattgtgtcttcttgtctttcttttgtgctctctgcttattgtaaaagccccaggaaattccgcaatcttctgtaaacttgataaagtctctgtaagactctgcagcttctgttggtcgagtaaaatgatgatttaattttttttcatgttttaaaaacatcactcaaactcgaccaatgtactcgatctctaggccatcaatagagtaaaagctttaaatttttactctaccttcacgttactctctttttttttctgagaaccacaaacacaactaaaacaaatcaaaaataacaagaaagtaaaaattatttacaaggataattatgggacttcctcccaagtgagcttttactctactcctcccaaactgcaacttgatatgctttccaaggttgagacttattttcccttccctgacatctatcactgctcccactgaagctaagaagggtcttcccaggattaagggatccttatgctctacttccatatccagcaccacgaagtctgtaggcacttctactccattaatcatgattggtagatctttcagcatgccgaagggttttcttgaagacctatccgcaaggatctaagtcaggtcacaagttttatactgaatgaactctaaccttcttgccacagagagtggcattcagctgacagaggctctgagatcgcacagacaattgctgaaagcgaattccccaatggaacatggtagagtgaaagatccatgatcttctaacttctcttgaacaatcctcttatcagcagctcgagatggagtggcatcactttcatcatctgaatcgtgatacatcttgatcctttccaatatcaaatttctcacatctttgtgaagatcgagaatcaggttgagaacttccatcagtggcatcactgcttcaatctcgtctagctgcttcgctgcaacagacttgtatctctccacccacgctttcctaaatgtccacggaagagcacatgagggtaatggagtaggtttgaatcgtttcaccattttctagattatggcggccttctcttccgaggtggattgaatgtgatggtgagaaccagtagaatggttgaattcaacaacagagacttcaatccgagtagaagcctcccattcttgaacatcactgtccctagtgattaaatcaaggacaggtcgagttggcttctctcgatcatggagagagtgatggcgtgagcagttgcatactcttttggattctgtatggacttccctggaagtcctgtgactttaggtgcagaggtagatgctgattgtccttccaaatatctgactttggtattcaatgcctccactttggcattcacgtcattgtatctgcaatccagcttatggtgcaattcagataatttcttatcaatttccattgagctagatgcttgtccttgtagcagttgttgtaccatctgtttcatttcagcatcaggagcagcaggaccttggttttgctgaggtgcaaacccaggtggtggtggcggctggtagttcccctggaatagctgcttgggaacgaaaccttggttgtagggaacaaaaggtttgttctgaccttgttcttgctgtggaggatacacttgatcctgaggattagcgatgttggtgttgcggtagaagaggttggggttgttggttttgaagttgttgtatcctttgtagccaccctagttgttgttgatgttgctgactgcttccaactggttaccctccccatcttggacttgaaactgctcgtcatcaacaaggaagtgcacaagcttctgctggctaagaagaatcttgtccagcttgtcattcagcgctttgatctccttcgtgtgtttgtcatcagagtcaactgtgcctctgacggtcctatcacagttctcgttgtaattgccatctgattgagcaaggttctcaaccaattcccagtcttcttcaacatcttttttctggatatttccattgctggcggtacccagaagcattctgatgcgtggtaggactcctctgtaaagagtgctgagcagagaggctttagtaaagccatgatgagggcattggttggtgtaacccttgaaacgctctcatgcttcacaaaagctttcaccagccttctgtaaaaagccagagatctcatttctgagtcttgcagttctggcattggagaagactttgatagaaaagccttcttgcaatcatcccaggtggtgattgaatcatggggcagattcttctcccatatttgtgctttgtcgcccaaggagagtggaaacaaacgaagcttgaatccgtcttcactgacaccattgatctttgttaggttgtagagcctatcgaattcatcaaggtggtcgagtggatcctccattggcagaccatggaatttgttcccctgaatcatcgagatgagaccactcttaatctcgaagttgttgttctggatagcaggaggtgcaattccttttctctaacggtgatcacgtggtgcatctccagaaccaatgttggcagggccattttgttgattctgttcgtcagtcatatcgagtggttgatgaggtacaaggttcactgtgtttctcctttctctgagttcgcgagctatgcggtcaatgttgtcgttgaaaaggaggttctgattgcctgttgattgagttcgcatacagcagaggtgtacatggatcaagaagacaacaagaaaaacacacagttagcaaccagattgaaaattgaaaaagaacttgatctaagcaagtctgaaatctcaaatgtaacaaacaaacacccaattggcaacggcgccaaagtgataacaggttttttagtcaattaatcctaaagcactatcatgtcgttgtagtattttaggttgtcaatccaaatgggtgtgatcctaacaatcaagatgtgatcagaagtcactaagtcaagccaagtaataacaggttttggtgtgttctagcagtcctaagtgaacatgcagaaaacagaaaatcaagcagaaacaataaaacactcgagcaacacagctctttgcggagcattgggtgaggtcgagtgacaagtcgagtagcagacagaaaacaaaacacatggatactcgaccgcatagtctgttgccagacaactgggtggtcgagtataagggcgagtaacaaaaaaaagaattgcagaaactaagcagtagatgacaagatgcagtaaacaacagtagagtaaacaaagaattcaatcagataaagaatttccgaggatggggtaattgagtagtttcgcttcctcagtttacaggtgattgacatgctcaataaattaaccctcgacaacaagttcattaaccaaatctaagtgccaccgcaacagagaccctcaagttaacctagtcctagactcaatcaccattgacgagagctaacctaacaggcattacgaatcaacatgttaaagccaaaacgctccctgcaaccaatacctttgtacagggccacgaatctctggaattagtggttcagaaagcaataggcattaagaacaactaatccagaagggatctatcaatcaatacttaaccacctagcatactgagaattctacactactctaacccatcctcagaaacctattcactactcagacatcattgtagagaacataaacgttgaacaggatgaaaacatgataacaacaatgtaatagcaaaatgataacaggatgaacaacagtaaacgaaatcaaaaacaaatactgaatgttgaatagataaagagaaatccggattagaaaggtctagaacacagtgtctgtggaataaaactagaaaaaaacttgtttgcgaaaatgtgaagtacatgctacttatagccaaatattccaaaaccctaatacttaaaacgacgcagtattgggacggactaagaactgtactcgacccaggtggtcgagtgggaggtcgagtgaatagttggagtcttcttttcttccttgtgcttgagtgccgaatgaagaagactctgaagctcgcaatcgagtatgtagtcgagtggtggtaatggtgatactagacttcaaggtagagtggtgagatcgagtagtggtctggtaatggaggtgaagacactcgaccccggggtcgagtgatgtgatcgagtgatggtcaggtgatggaaatgaagacactcgacctcggggtcgagtggtgaggtgaagtggtgatgtcctctactcgaccagggggtcgagtggtctgctgaggttgtgaagtgctactcgacctgggggtcgagtggttttgtatgatcatgtccgcttcttccaattagctcgtcaacagctccaaatcaactgaaatcaacacaaatatgcaccatgcatgcaaacctatcctaaacatgtaaagtgatgacaaatgatgagaaatagtataaaaaagtgatgatatggtgctaaagtgatgacaaatggatgctcaaaacatgcaaaatacacacttatcaaaggccataagaaagagatgaataagacttaacaaattgcagcaccgaattgtcaacattctaaggatggtcgaattgtagcacgagtgtagatcgacaccaccactcgagtcgatccacacacatcactggttgaagcagagtcatctccgatagctacttttcaagctgggatcattgttataagtctaggcactactgtcacgtcacccactacacctctcatacttcatccacctcctaaacaaccaaggtactaatcttttggggtcagatttcacccaggtaaccgagccgatcaaacaaataacacaagtgccgcgagagctaattttgccgtctccccgaggtgggaacattatcctttatggcccgggcgtcactccacaaacatacccgagccggtcctcgaaacaccttgggcaaacatcaccctgctcggtggttatcctagaagatgattgagctgagtatgacaacgatccgaggaccggtttgacctggctcagatgaactcttgacctgagccaaaggcacacgttcgtccgaggagaagacttttgaactttgacggggccgaaatatcaattccggaaaacctggaaatgatattggagaatcttcgaggatattatcaaatctggaaatcttcctgatgttcccgaagaataaggaaaatctccatttatgaaagatcttccatcgccgactccgagataaatgaaaatcttccgagaatatcgcgagaggtggtttatcaaagacctatataaagcgcctcatagaataaagaaaaggggtagagaaaaaaggctctccacttcaggctatcaaaacgctctgactttgaaggctaaaacacttatctttacctttctaaacacttgtacgatcgaatcatcatcttttcaataataatatcaagaacattgtccgcggtaatcgaataattctgttgttctttgagagtctcgcaaagatctgttctttgaagaaaccctaactacaatttcggttgtgtgagtttcgactctcacaatttggcgctagaaggagggggagagatttctcttactccaagaacacagaaccgacaaatcaagtaacgatgaccaacaaccagatcccccttaccaccgttgacgtggagggaaaccctgttcctccaatccaggtaaacgctcctaaagtcaacgctcccgcagtcctagcaaagctgaggagcatgatggcacaactccagaagaaggtgaacgatcaggagcaagcaaattgatccttgtcccaacagctcgaagtggctacttctcaagggcaggtcaggaccacccgctttggcgcacaacactttcctgatcggtgagcagcggtagatctcaatccaacgagactcgtgttcaacacacaccggtaacacgacgaggccattttggcggactgcgccagcactcggcggaacccgagcagaacatgacgaaccgagtagaggaagcagacccgcaggtcccgattccccgagccgaatctgacgaggctgacgagatcaaagtctctgacgacgaagattcggaggaaaacattagatgggctgaggagtaagccagggagtaggaaataaatgccatcaagctcttcctagccaatgcagatgccgagatgaagctcgtacgatcacagatgcatagcgctgtctcctcggtcccaaacatcgattgcattctagaagtatatcacaacacacctttcactcgcaagatctccaacgcgataatttcagacccggagaaactgagaatcgagtacttcagcgggtcatccgacccgaagggccatttgaaatctttcaaaatttctgtggcccgagccaagttcaaaccggaggagagtgatgctggtctctgtcatctgttcgtcgagcacttgaaaggaccagtcctagattggttctcaagacttgaagggaattctgtcgacagttttcaggagctatcgacgctcttcctcaagcaatactcggtgctaatcgatccgggcacgtctgatgtcgacctttggtcactgtctcaacagccgaatgagccacttagtgatttcctcacaaagttttgatccaccctagctaacgttgagggaataaatgacgttgcggctctctgcgctttgaagaaggcactatggtacaaatctgaatcgcgaaaggaattaaatctgtttaaaccataaacaatccgggaccccctgcactccgctttggcgcacaacactttcctgatcggtgagcagcgggagatctcaatccagcaagactcgtgttcaacacacaccggtaacacgacgaggccatttcggcggactgcgccagcactcggcagaacccgagcagaaccaacagcctcgggagagcagaacatgacgaaccgagtagaggaagccgacccgcaggtcccgattccccgagccgaatctgaagaggctgaccagatcaaagtctctgacggcgaagattcggaggaaaacattagatgggctgaggagtaagccagggagtaggaaataaatgccatcaagctcttcctagccaatgtagatgccgagatgaagctcgtacgatcatagatgcatagcgctgtctcctcggtcccaaacatcgatcgcattctagaagtatctcacaacacgcctttcactcgcaagatctccaacgggataatttcagaccggggaaactgagaatcgagtacttcaacgggtcatccgacccgaagggccatttgaaatctttcataatttctgtggcccgagccaagttcaaaccgtaggagagagatgctggtctctatcatctgtttgtcgagcacttgaaaggaccagccctagattggttctcaagactcaaagggaattctgtcgacagttttcaggagctatcgacgctcttcctcaagcaatactcggtcgctgtctcagcagccgaatgagccacttactaatttcgtcacaaagttttgatccaccctagctaaagttgagggaataaatgacgtcgcggctctctccgctctgaagaaggcactatggtacaaatctgaatcgcgaaagaaattaaatctgtttaaaccaaaaacaatccgggacgccctgcactcagcctcagattatgtttccaataaggaagaaatggaagtgctatcgaaaaggcacgagccgtcgaaacaaacgcctcgtggcgaaaaaatcccaacctagcgctgaaggcgagaatttagtacactatgaggggcgatacttctctggagctcacaattatcaagtcgatacaccccgaggttgagggcgaggccgcgattgaggtcatggacgagaatcatatacttggacgaaagatcaacctacgggaaatgagcaggagtactacgagttatgtaagagctacgaccatcacacttttagatgtcgtaatctcggtgcgaagttggcagccaagttcctagctggtgaaatcggtggatgcttaaccattgaagacttagaagtagagaaggcgaaagacgaacaggtaaatgccgtggcaaaccatgaacaggcagtgtagtgacccgcataaggacatcggccacgggcaagagtccgaatttttaaaagttgcccgaatgcatggccaattgaccttatgtgcccaagatacaatagactatcaaagggcaaatatgggcaagtttgggcaagaatgggcacaaatgggctagtttgggcaagatcgggcgtgccgcgggcgaagtttgccctacagggcgtcgaccgaccgttgaccgcaccaaggacgcgtggctcggctgacttggagccccagaaaagttgcctggagcaaaattttagttgcgtggagccgaagtttgggtggccacgtgtcgctcacccgctagaacggcgagcgtgttatcacgggcggatgacacgtagatcgcttactcgcccaagcacttgacacgtggacatacagacatgccctttcccttgtctatataagccgaactggaccccaattgttttgtgaagagaaagtgagcaaaagtgagaggctgccgaattgaaaccgtctgcaaattcaagttacggtcccatagccgaaaactctgcttgaatcattggaagcttcctgttggttactaagtgagttctggataatggtttaagttgcataatcatattctcatgcattctaaattgatttcgtgagttatatgaattgtgtaaatggttatatttgagtgcatatgtgatctttagattcttatgctaatgtttatggttgggaggttatgttgggatattgatgattctatgtgtttgatttaaccatatgtttcataatatcttaacctttgggatcttggtacgtggtgcttgtggtaggaggcaaagaccataagcgtgcaaagatcgtgatatgtctagctgatagtaggattcttactcaataaatcctaaaacactatcatgtcgttgtagtattttaggttgtcaatccaatccggtgtgatgcaaacagatgagatatgattagaaagttctaagtcaagccaagcagagagttggttggttctaatagtcctagtatgcaaaaacagaaatgaaatgaaactaaaagcaaaaatggcaataacaggtaggtgaataacaaagcagaaatgataacaggcagtcaaatggataaatgattcctaaggatggggttatcgaatagtttaaaaacattatattttaaaaaacaaatttgccatcaaacggcagatattgtgtaaaattacaagaatctgttgtaacataaaacaattctgtcataacattaaaaaattggttatcggttgataaaacttcacagaagctatccctagacaacaagttcaacaacagattaattcaatcccatgatagaaatcctcgagtaaagctagacactgacctaattcccattagcgatctctaactaagcaggcaatatcgaatcaacttgttaaagccaataccctctctacagccaatcccttggggtagaggcagatatctctgaaattaataggatccaacgcccatgaaacgccttctgagcgctggaagtcttgactcatattccacattagccagtgaaacaagcaataagcgcaacgaatccagaagggattctagtattctaaactcaaccacctaaagcgaccaagtaaaccacaactaatctatcccatcctcagaaatacgattcactactcagacataatcaaagacaatagcaaagcaacgattgaaaacatgtcaacagaaatgacgaatgacttaaacaaaaactgaatatcaaatacttaaaaatgaaaaaatacaaagtcgcaagagaaacactacggctatgaaagttgcaaaatgtaaaagtggatgaaaaacgagatgaaaaacgaaaaccctaagaggctacttatataagggaaaatgaaacaaataaggaaactagatatatagcgaatcttcacgtcatgaccctgcgatcgaatgtgtcattggcatctgatgggctgaaatgagcttccttatgattgagtatgtcattgatcaaactgggcttcagggactccaccttgcgatcgagtgagatgcagtgaagacgagattgaatggtccagtgaccctgtgattgagtgcgatcgagtggatgtcatgaggtggtgatcgagtagttgcttcggcttctcttcacttcttcgttctcatcttgtctggttgagtgcagaacgagcagataggcctcctggtgaacgagttattctgatggggtgattcttctggctttgcgattgagtgaaactgagctgctagcttctccggggttgggatagagtgatttgccctagtagggctccgaggctgcaatagagtacttttgctaaaggcgtcattgggcatccggactttctgttctgtttctcctctgtttaaactccaaaagcatccaaagtacctgaaaacaactaaatatgcaatgcacatgcaatcctaatgcaaaatcgtcccccctaagtatgcaaaacacactaaaacgactcctaatgagatgaaatatggatgaaacaatgacaaagtggtgaagaataaatgcctaaatcatgcaaattatagacatatcaactccccaaactttgtctttgctcgtcctcaagcaaacaagaagacataagcggaaggagaggtttgaagttggggattcaaaaccaaagcatgagatatgacaataaagatcaatgtaccagctaacagttctaagatacgaggtgatcgacttctacttaaaaactttagctatgctctattatgatccaaaacctacactcaaatgcacattgcgtcaagatcacccaatccctttaacattcattaagttcaaaaacatgaatcaagatatgcatcgctagtgaactcatttggctaatgacaggttatgagacaaagatggtccctttaactggttcagattttaataacaggggactctgaatgaaaaaagactaaactttagaagaatgctaaaggtaagtgccaacctatgcatacaagaatagcacctcatctacccaatgacataaaccgtgaataacaagtagatggtcctatctctaaacccaatgatgatcctaagtctaccattttgcactaaaggcatattttgattttttgttggatcaatgtttcttttcttttctttgactcttgttcttaaggagaagcttttcttaaactctatgaggctagtctagtgaattgggtttttctttaactcttatggctcttgtaattttttttttcttttttgtttttgttgccatctctttttttagagcatatcttcacaattctatgcttcccaaacattcactagacctcaatatgattttcaacttccttctcctaaagactctaacccattttatttttctttctttttctgcttacacccaatctcaatccccaattaagttcccacctagtcctaccaagtcccaaaacgcggattggaaccacatgagttactactcttgtcggctcaaacctaacacgttctaccaagctcaatcctgaaaataggcctcacatgctctcacaaaataacatggtttgaaagaagggttgggtaagggtgggggaactactccaataatagaagcaactacttggattaacaacagtggtgaataagtgaaagaataccaaatatgtattctatccacgagttcaaaaacgatgcaaacatgataattatgagtcatattcaagttcaaattgacagggaaaggtgtcatgacatgcatcgagtggtttctataaaacatggtgcgattttacttcaaagtcattcaaatgccttagagaactaataactcattttagtgaatcatcatgcttacaaggctatttcctcattatcccctatgcctatgcaacaatcctatatgaaacactctagactcgatcctaaatgtaatgcaactaaatgatcacttttttttttgtggaattcattttcaaaaaatttcattttttttgttttttctatgacttagatgatatgaagactcaaatgatattcacaaaaaacaagtcaaatacgtcttgaaccctcccccaaacttaaattacacagccccttgtgtaatcaaaatttgtgaaagaattcaagataaacacagaaacaaaaacaaaagcggtatttacaaatggttttggtgtgttacctcagtagaatgtcctggagatgtagtcatccatatctgtttgagtgtactcagcaggcacgagcggttcttgatgtgatctgccatctcctcgtcattgtgctcgatcgcaaccccaggaggttgtggagcatgacgctcatgtgttctccggggttgcgatagagtgatttgggcaattccactaggagaccactcgatctgaccacttccaggttgcgatcgagtagtttgacattgtcgttgagaaatatgtgtgtcccaaaaccactagatcgcactcccgagcttttactctcatcttgcgatccagtgattcatcaaaaaattgaaattttttatttgaacactcgattgcatccctgctgttgctccatctgttattcatttcctgagaatcaaaaacaaaaccaaaacaaataaatggtaactaaaaaaaataaaaactatatacagggataggactgggacttcctcccaagtgagcttgttttaagtctctagcttgactcctcacactcattaggctcaatgagggtgattgagtagaattgacgtctcttctccttccttagtagatacaacatcaaattcagcatactctcgtgacaggattgtaattgagtactcaatggccctttcttggtaagctcgtttatcatcatctggatagtcgtcttttctagactgttctaatgtgaattc

SEQ ID NO: 1181 - DNA, 91413 bp, Arabidopsis thaliana
aagctttctcaacattttgatacttctagaagatttgggtatccatgagttcaaatttgatgcaaacatgataattaaagatcaaattcaggttcaaattgataggaaatggtatcagatcatgacaatgtggtcgagtagagcaatctaggcatggttccgttttactttaatttcattgactacgcaacagacaactagcaacgagggcactgcgtttatctagtaaaccaaaatgcttacaaggctatctcatcattatcccatatgcatatgcaacaatcctaaatgaaacactctagactggatcctaaatgtaatgcaactacatgaatactctgtttttgtgaaatcattttctgaaatttttcacatttttgttttttttgtttttctatgccttagatgaatgctgactcaagagtataaacaatgcaacacacacttcctgagccttcccccaaacttaaatcacatagtccactgtgtgactaaacttggaagagagtatacaagacaaatccaatcacataaacaaaataaagaacaaatcacaagagatgatatagtacaatagtgaagtgaggtgcttacctctgtcgaagaatgaacggagttggtcgtcaatggctgcctatgattgctcccaggccatagacgagccgccctgttctgtgtcagctccaccatgtgggtactcaacctcatcagctctgtggcggccagcaccgctttgaagatactcgacctctcttcttctactacaaccagcatcgcggtcacgtaaactacgagactgcaaaagtcgtctgctcctgctgctagatcgagtgagtgtggttctcctctttctcccagattcacgagactcaaatgatgaatgcctcgctaggacatgcggaatctctcgcagggataaactccctttaagactatgtatcttctgttggtcgagtaaaatgatgatttaaatttttttgggttttaaacatcactcatactcgaccgatatactcgagtgcaaggtctccaggtgcaacagaaagttttaaaattttttcactcctctgtactttgtactcgatctctatgccatctgtagagaaaaagttttaaattttcactctaccttcacgttattcctttattcgtgagaaccacaaacacaactaaaacaaatcaaaaataacaagaaaagaaaaacctattcacatagatagtcatgggacttcctcccaagtgagcttgtttaaagtctctagcttgactcctcacacttatcaagaagaaaatgaatgatagagagggtctgcatagttctctctaatatcattctcatactcagtgtcctccctggagaggtctacttcagaatactcaattcccctctcttcaaaataggcttctttctcttctggagggtaatctatctcttcaaaacatcttgaagtgaacttctttcttgagatagtgtcaatcccgcctttagattgagcttccttctgcatctgattcagcttactcctatgttcctcaacagtgtgggctagcctttctatagtttcttcttgtttatcagacctctttttaagctcttttacattttcagtctcatatccttctcctgggatcactctatcgtctccagagggtttttcatcttttgttgactcttgtggagttttgttgatgtcaaactgcaacttgatgtgctttccaaggttgagactttttttccctttcctgacatctatcactgctcccactgaggctaagaaaggtcttcccatgattaggggatccttatgctcttcttccatatccagcaccacgaagtctgtaggcacttccactccattaatcatgactggtagatctttcaccatgccaaagggttttcttgaagacctatccgcaaggatcagagttaggtcacaaggcgtatactgaacaaattccaaccttcttgccacagagagtggcattaagctgacagaggctctgagatcgcacaagcaatcgctgaaagctaattccccaatggaacatggtagagtaaaagatcctgaatctcctaacttttcttgaagaatcctcttatcagcagctcgagatggagtaacatcacattcatcatctgaatcgtgatacatcttgatcctttccagtatcagattttgttacatctttgtgaggatgaggaatcaagttgagaacttccatcaatggcatcactgcttcaatctcgtctgactgtttctctgcaactgacttgtatctctccatctaggctttcctgaatttccatggaagagcacgtgatggtaatggagtaagtttgaaacgttttaccatcctctcaattatggctgctttctctttttaggtggattaaatgagatgtggagaaccagaagaatggttgaattcaacaacagagacctcaatctgagtagaaggctccacttcttgaactgtccaagtgattaagtcaggaataggtcgagttggcagctctcgatcatggcagatagtgatgacgtgagcagttgtatactcctatggattatgtattgacttcccaggaagtcctgtaactttaggtgcagaggtagatgctaattctccttccaagtatctgactttggtattcaatgcctccactttgacattcaggtcattgtagctgaagtccagcttatggtgcaattcagataacttcttagcaatttccaaggagctagatgcttgtccctgtagcaggtgttgtaccatctgtttcatttcagcatcaagagcagcaggaccttggttttgctgaactgcaaacccaggtggtggttggggctggtagtttccctgaaattgctgcttgggaacaaaaccttggttgtagggaacaaaaggtttgttctgaccttgttgttggctgtggaggatacacttggtcttattagcaacgttggtgctgcggtaggagaggttagggttgttggtcttgaagttgttataccctttgtagtcaccctgattgttgttgatgtagctaacttcttctaactggttaccctctccatcttggacttgatactgctcgtcctcaacaagaaagtgcatatgcttctgctggctaagtagaattctgtctagcttgtcattcagcgctttgatctccttcctgtgtttgtcctcagagtcacctgtgcctggtcctgtcgcagtcctcgttgtaattaccatctgattgagctaggttctcaaccaattcccagccttcttcaacatctttgttctggaaattcccattgatggcggtttccagaagcattctgatgtgtgttaaaactcctcggtaaagagtgctgagcagagaggctttcttgaagccatgatgagggcattggttggtgtaacccttgaacgctcccatgcttcacatgagctttcaccaatttttggtgaaaaaccagaaatctcatttctgagtcttgcagttttggcattggagaagaactttgctagaaaggccttcttgcaatcatcccaagtggtgattgagtcatggggcagactcttctcccaattgtgtgctttgtcgcccaaggagaatggaaacaaccggagcttgaattcgtcttcactgacaccgttgattttgggtaggttgtagagcctatcaaattcatcaaggtggtcgagtggatcttccattggcagaccatggaatttgttccccagaatcatcgagatgagaccactcttaatctcgaagtttttgttctggatagcaggaggtgcaattcctttcctttgacgatggtcccgtggtgcatctccaacaccaatgttggcagggccattatgttgattttgttcgtcagccatttcgagtgggtgctggggtaagcaccaatgttggccggcccattctgtctgttggtagggccattctgtctgttgattttgttcatcagccatttcgagttgatctaagcaagtttgaaatatcaaatgtaacaaacaaacacccaattggcaacagcgccaaattgataataggtttttaagatcaattaatcctaaagcactatcatgtcgttgtagtactgaaggttgtcaatcccaatgagtgtgatgctaacaatcaagatgcaatcagagttcacagagtcaagccaaacaataacaggtttttgtgtgttctaacagtcctaagtgaacatgcataaaacagaaaataagacagaaacaataaaacactcgaccaacacagctcgttgtagagcactgggtgtggtcgagtgactggtcgagtaacaggcagtaaatgaaacaaagatactcgactgtacagtctgttgccagacaactgggtggtcgagtatcacgtcgaataacaggaaagaattgcaaaaactaagcaacatgtgacaatatgcagtaaacaacagcagagtaaacaaaaaaatcaattagataaagaaattcccaaggatggggtaattgagtagttttgtttcctcagtttacaggtgatcgacatgctcaataaattatccctagacaacaagttcattaaccaaatctaagtgccaccgcaatagagaccctcaagttaaactagtctcaaactcaatcaccattgacgagagctaacctaacaggcattacgaatcaacaagttaaagccaaaacgctccttgcaaccaataccttggtatagagccacgaatttctggaattagtggttcagacatttcatcgaaaacgtgttgggcgcagaaatgtctgggctcatattccaattgatcagaaggcaatgggcattaacaacaactattccagaagggatctataaatcaaacccaaccacctagcatactgagaattctaaactactctaagccatcctcagaaacctagtcactactcatacatcattgtagaaagcataaacgatgataagaatgaaaacatgatatcaacagagtaataacaagatgataataggatgaacaatagtaaacaaaatcaaaagcaaatactgaatagattaagaaaaatccggattacaaaaacgtcaagaacacagtgtctacagaataaaacttcgattatcaaaaatgtaaagtacatgctacttatagtgaaatattctgaaaccctaatactcagaacgacacagtattgggacggattaataactgtactcttcttttcttccttttcttccttgcgctcaagtgtctggttgaatgtggaatggggaagactatgaagctggcagtcgagtatgtagtcgagtgatagagatggtggtactcggcttggtggtagagtgatcgagtgaaggtgatgaaggtactcgaccatgtggtcgagtagggtgatcgagtgaaggtgatgtggtggacgtgatgatactcgaccagggggtcgagtgatgtgatcgagtggttgtcttggtggtactcgaccaggggtcgagtggtgacgtgaagtgatgaagtcttctactcgaccaggggtcgagtgatctgttgaggttgtgaagcatctactcgaccaggcggtcgagtggtttcacatgatcaagtccgcttcttctagttagctcgtcaacagctcgaaatcacctgaaattaacacaaatatgcaacatgcatgcaaaactatcctaaacatgcaaagtgatgacaaatgatgagaaatggtatgaaacagtggtgatatgatgcaatagtgataacaaatggatgctcaaaacatgtaaaatgcacatttatcaactaacaataacattggttgcttagaagaataagcactcttaacctcaccacattttgcaaaaaagttgggctgcttgacgactttttctttcttttgtttcagatgtattttatcttgataaacctcatgtagagtcatagggaccagaatagtcttccctcctttaaactcaaatgaatgacgattagtgaaaccatcatgtattaccttcctatcagattaccacggccttccaagaagaataagtccaacttccattggtaaaacatcacataagatctcatcttcatacttcccgataacaatgggcacaaccacttgatttttaaccctcatttcgccacaatcattaagccactaaagaacgtatggtttcacatgtttttgcactttcaatccaagcttcttaaccatagtttcacttgccacattcgttacaactccctccatcaatgatgaggctgcaaactttcccgtgcacatgacaacccgtgtgaaacaagttttctctctgttctttatcatcggtcttggtttggatgctcaaagttctcctagataccaacaactcacccttagccggcagctcctcattctctttcaatgaagaaggtgatctggaatctcctcctcggactctatatctccattatccatgtgattcgtgacatttgtatgatgtcctttccctttcccttgacatttgtaacacctaacatcacgaactctagatgtagaaatttcagcctttcctttgtaatcttgaactgcagcatatggttaatttcagcccttgaactgacaatcggcttatagctgctggttctctcctctctttggtaagtaggcttaacaacggttcctgaaccataactagatcatgaagaactcttcgtcttaacttgctgctcaaacaaaatcgccttgtgcaacatctcttctatttcaacatagtattgagtctccaatctgttttgaatatctctgttcaaacctccaagaaaccttgacatagttgcttctctatcctcggaaatatcagcccgcaacatcaaagtttccatttctttgtagtactcttcgacataacggttcccttgtgtaagattcctcaacttgagatgcagctcacggtggtagtgactagggacgaacctcttcctcataatagctttcatttcggaccaagattccaatggaagttcttgcttacacctccgtgaagtaactagttgatcccaccaactcaaagcatagtcataaaattcggtagcaacaactcttaccctattgatctcggtgtagtgttgaaaattgaaaaccaattcaatcttcttttcccattccaaataagcatctggatcattttttccatggaatggtggaattttaagcttaagacctccaagattgtcttgcaaaagatctctaccttcattagcacgtctatggtgtctcctatgactattgcgagataaagagctcctatgcccatagtactgatctgtagcttcatctctttgctcaagctgctcatcaactcttctttgtactcgaggacgagtctgccctaattctagtttctcatgaaacacttggcgaaaagcattcagtttggtgtccatcattttctcaaaggcttccaccaaaagtttgttgttgcgattgtggttagtctcttcctcttcagtttcagccattctttctgcaatagagacaacaaaacaacaccagtaactagttcttttgaaacaaacacgaacagacccttcagataccctagaatcctaattacgatagtttcacttgttgggatgctaaaaactaccaaatcgtttccaaatatttcagaaattttttcaaaaatagtagactcttttccaaacctgtgacagttgatttcgcaattttaacacacgccaattaattataaaaattaaatgaaggtgacagacggaaacagatttgaagatgaaaagacacaaaatggtgagattgaagactcaactttcagagtgtgctttgataccacatgatgagatcctcccaaggactcgacattcttaagttgagcaaaggatagaggtggctgtgaagccgtgataatggatcgatttgaatgaatcgatggatatcacagaagcttgcagaaaggcttcaaaataccaaaagagactaagggttttgctggatatacacaccagcaagatgatcttcttagaaaaggtttttgattaaaagaaagataagttctcaaaagagaatacaagagtatataaagagaaaaagaagagaagatgacgagacaagtcttggaacaagctccaaggctgcctagaacacaacagaaattaaaaacaaagtttaaaattcaaaagtaacccttcaacgtcaaaggccacgaaattgtctctttattttagtgggcttgggccttgaatcatcaaaatggattatatgaagcgaatacataagcctcattaaaaaccttcctttggaaaatccattgggacaaaaccaaaggcagggaaaaagagcactcatgaatcacttatccatcttgatgaggtccttgagcttgaatcaaaaccaaagaggtagtgacttggctcaagtcatttggtcggtcccaaatgtggttaagcatccatccaatggcttggttgaatagcttaactctagaacgagtcattggaacgtccggtgcgacaagaacatcctctgcctcaagcttctcccccgctacaagctcatccttggctacaagcttagctccttcctcggctacaagctcacgttcaagctccggttcatgctccatatccttaatgttttccatgatcatatcacgtcgccacctgtcgccacgccatcgtctgagacacacctgtcgcatgtgggcacgacagctgtccggacatgtggcagggggcgatgctgcatggccgaccttgggcggactataaatgatgctcatctctgcccgttttcatttttgaaggcgagagagagactgtaaggctgcccgacagataactcgtctgcaaccgagaaaacttgcccaaattcagtaaatcttgcacgtggtcgaggaaactctgtccgtgcctggagaatcgacgcctgtggtcgagagaacttgaccgtgagtaagggatcgtcgaccgttatcgaggaattttgcccgagacccagaaaccttccaaattaccgaatatgtgagttgtggtcgaattgtgtgtttgtttgcatgttttctagagctagtctttagatcatatgcatgcatagtcacttagacttaactaatcggaattcggtttaagttagaacttgaatcttaaaatgatggttacttgatgaacttgatagttaatatcattaaggaatggaatggactggtgcatgactaggctaagtgaatatggacttaactaagtttacttgatgaatcgagatttgattcgagggattacttgcctggttagattgttatacttatatgagatatgctatgaggctgtgaataagtccttgctatatcatgtatatatatatatatatatatatatatataaatacgtgatttagtacttgattttgttatacttgtttggggtgtggtaaactacttatatttagtactacatgaggttattgtgtctaagtggtattcagggtttacccgataccatcatgctttaagtaagctgttaccttcctttttgtgttgtgattgtgtcagtaagtcttgatcctgagtggtcacttacatgatggcacaagtctcgtagcgtatgtcgggtaatgcatgacgatgcactaaagtgatgttccgattataagctcgggtgttcatagttgtgtacgtacgtgtggtgtgggtgtggacgtacgtgtgtgtgatagcatacatgtggagaaaatgtatacacgtatgcgggagtttgtgctgatgttgtggtgcacctttttggtaaggtttacagtattttgggcccaaggttcattcatgtgtctagttcggctgcatattctggtattattataaatatataataatacgtttgctgcgtgttttgtgatatatgatggctaagtttacttattaagttgattaaaccctagagatttaattctgcatagaccgagctcactgagtaatgctagattactcatgattctacttgtcttacaggtaaccatagtgggatgaccatagcgggaagacaaacactaggaattgccggaaatagaatgtttgcgttgcttctgcaaaattacttgttattatgtatttttaacaaggatccgacataaagatatatttttgggtaactctttgcaaagtataagctatatactacatataaagtgttttcttaaaagcagccgagtgtttaatgatataagacctagtccgggtcgctcaacactagaatatcatgagggttggcaagcctaagtggtgttcctagtgggaagatggtcgattataatctggttaaggatccggattcatctggaacctctactgagttatggtcgatcatcttcactgtagtgtaactaggtcgcccgtggcttgtccgccaatagggcgattcaggggcgttacattatcctaatctaatccatcctcaagaaccctaataactactcaaacaacaaaatcaagaacataaacccaaaaattactctaaacatatcaaaatgtagatctaaacaatataaacaactttactcaaagaactaaatgcaaaaacaaaatagattaagagtaattaaggtttcaagattcttaaacacaaagaaaatctacagaataaaagcttcgtcttttggacaaaccccaaaagacatatttatagtaaaattccgaaaaccctagattcactagaagacaagagacttgaggcggtttagaggaatgctcgatcttggggatcgagtaaaaagggtgctacaaagtctgctttgaatgatcaattggtcgagtagttacttcttcctctcctcttcttatgctctgctgtctggttgagtgtggaatgaaaagaatctgaaggcgctttgaatgatcaacaagtcttgtggaatgggttgcttttggtcgagtacttgggcgagtagaggattgagtagggggtcgagtggtgtctactgcttcctatgtagctgcctggatcgagtgaatggtcgagtgaattgccctgctgcttccctcctggtttgatagagtatagggtcgagtgatttccatgtatcctccttctacacctaaaaacatacaaaaacatgcaatatgtatgcaatatgatcctaaatgcctaagtgtgcaaaataagctaaatgtggtgcaaaatgatatgaagcaatgagtgaacactaagctaaatgatgataaacatatgagtaacatgagtaaatacagtgttatctgttcctaaaagataatagtgttccatgctacaacatacaaacccaaagactcatacggacttcggctacaccattatagctttgagaagcaataaaaagcttggttagtgtttccgagtcaaatatgaatagatttcatgtgtatgattgagtataagaactagaaccgcaaccggttccgaaaagctaaagtagtgttttcctgttagaagatacaaagccaaagactcatgctgactttggctacaccatcaaagctttgagagggaataaaaagcttggttagtgttttggagtcaaatatgactagatgtcatgtgtatgattgagtataagaactagaatctcaaccggttctcaaaagctaaaggagtgtttctttgatagaagatataaagccaaagactcatatggatttcagcacaccatcagagctttgagaagcaataagaagattggttagtgttgtggagtcaaatatgacaagatgtcatgtgtatgatgcactacaacaaatatccacattgatagcagacgaggataacacattttccgtcactgctatgaaagattaatttttttttgggttcttttttaatagtttattaaaaacgctatgataggaaatacatgagtgggagtctaaaatcactcaacccgccaacactttacctaaattattcacttaagcgcgtctagaactattcatgtctcttccctcttctctcggcaaagacctaaggtttcagaaaaaaacaccaaattctctgatccacgattgctgtcaaattctacagtctcaaacacaaaatttcattatccccgaaactataatcttctctctcgccggtctgcttctatttcgagctccattgaagtcacattcaagctccatcgaagtcacattcctctttaatcgccagcgtcagcgagctcaaatcaaaggcatgtgtttcttcctttcactaattcctctttactcccaaatatattgtcaaacgattttgagatggttttattgaatttagggtttatgtgcatcgatttggtttatgtgaaattagggttcttgggtaatgtgattcgattacaagtttcagagttataattcttgtagatattatataacaatcgattacataagttgtctagcttcattgtcaaatgattatgctattttttttgcaagtgttggtgattgaaacgcttggaaactgaagcttgttgttcttgtaatcacacgacaggttagtctcttcagttgctttggttgtctttgtgattgtgattccatttgtctgtgaatttgcttcattttccgcgactgttttggttctgtgcattgctttggttgtctttagaattgtgattgtgattcatccgttatttgcattgctttggttgtctttagaattgtgtttatattagaaatgtctccacataagatgtcgctgtgagtgaatgtgctttctttctttttaatgttggttatggcttgaattggtgttaaaaaggtttaggcttatataatgttggacaagacatgggtgcagctatgcaggtaaggaattatcttatataggttaggtttacaaatgggttttggatactttaagaggcttctatttggctttctttattcattgaagagctgatcccaattacgagagaggtgctcggagttttgtacgtgatgtggttgcggctctaggagatatcgatatgattatatgtccctgtaaagagtgtcgtaacgtataccagcagtcaagcagtgatgtggttgtccatctggtaaccaaagggatggatgaggcatacaagttgcaaagtgaatggtatcatcatggagactctgtggcttcagctgaaggcgtaagtaccacaaatcagaggaatgatgaaattcttgagctatacaaggctgctgaatattttgatgaagagctggctagcaagcgggacttagtagagactccattgggtgacttagctgagatagcagaagacgaggacaggagagaagatgaattcctagccaaactagcagatgctgaaccccctttatacccgagttgtttaaaccacatcaagctctcggcgattgtgtctctctttaggattaaaacacgtaatggatggtctgacaagagcttcaatgagctgcttgagacattgccaaatatgttgcctaaagataatgtgctgcacacatcattgtatgatgtcaagaaatttttgaagagcttcgacatgggatatgaaaagatccatgcttgtgtgaatgactgctgcctattcagaaagaagtacaagaagctggacaattgtcccaaatgcaaagcttctcggtggaagattaatactcacagtggtgtagtaaagaaaggtgtcccacagaaggttctgcggtactttccgattatcctgcgacttaagagaatgttcaggacagctgaaatggccaaggacttaaggtggcatttcactaacaagagtagtgatggaaaactccgtcatcctgtggattctgtgacttgggataagatgaatgtgagtatccaacatttgcagctgaagcaaggaacatgcgacttggactgtctacagatggctttaatccgttcaatatgaagaatatacagtacagttgttggccggttcttttagttaactataacttgcctcctgacctatgtatgaagaaggagaacataatgtttacactgctcattcctggtccacaacagcctggtaatagcatcgatgtgtacttagaacctcttattgaagatttgaatcatttgtggaagaagggagaggtcacttatgacgcttaaagtaaaagcacattcacgctaaaggcaatgcttctttggactataagtgaccttccggcttatggaaacttagttggttacaaggtaaagggtaaaatgggatgtcctatttgtggtaaaaacacaagatagtatgtggttgaagtttagcaggaagcatgtgtatatgagtcatagaaaaggattggggccaactcatagttatagggataagaaggcttggtttgatggaaaatcagaacatgggagaaagggcagaattttgactggtcatgaagtttctcaaaacctgagaaactttaaaaacgattttggaaatgtgaaaggatctgggaggaagagaaaaaggactgttctattatctgatagtgattattcatcaagtgaatccgaagaagaagaagaagtagaagttgacgaggatgagttatcaagatggaagaaacgatctatcttattcaagctgccttattgggaggtatgtatagcttaatataattttagaattgataaacggatatttgtttaatgtgaaaccttataattgtatttgtattctctatatgatctcacggtaagacataacttggatgtaatgcatgtagagaaaaatgtggcttcaagcattgtctctacattgttacattgtggaaaatcaaaagacggtcttaatgcccgtaaagacctccaaaatcttgggataaggaaggatttgcatcctacaacacaaggaaagagaacttaccttcccgcaacaccttggtctttgtcaaagaaggagaagaaaacattttgcaagcgcctacatgactttaaaggtccagacggttattgttctaatatagcaagaggcgtttccttagacgactgcaagataacaggactcaaatcacatgattatcatgtgttgatgcaacagcttcttccggttgcacttctaggtttgttaccaaaagggccaaggacagcaatcttaagattatgtgcattctttaaccatttgagccagagagttattgacagagaggttatttcagtgatggaaactaaaatagtggaaactctttgtatgtttgaaagatttttccctcctagcttctttgatatcatgatacacttgactgtacatctaggaagggaagctagacttggaggaccagttcatttcagatggatgtacccatttgagatatttctttgcaccttactttaaacacttagtataagtcactgaaatccattgtaatatagatgcttcctttgtattgtaggtacatgaaatttttaaaagactttgtaagaaatcctgcaaggccagagggctgtattgcggagtcataccttgaagaagagtgtgttcagttctgtggtgatttcttgaagaatacaaccaatgtagaagaaaaagtagataggaatacagagtatgagaacagctctattttagaagggcgtccgatatcagcagggacttcaataactctaagtgaaatggacaagaatatagctcatcttgctgttattcaaaacatggctgcacttgaccaatatgtagagtaagttctctttctttcttaaaacatggctgcacttgatcaatatgattatatatgtaactgaaattcttaaatttctcttttgtaagcatgcatctacaacatctacaagactcaaatccaaggtgtaggcgtgatgcatcacacttatggagtatgcatgccaaaaattatgcttcttggttaaaagaacaggtaaatcatctcttttcttggttaagagaatagattgaaatctcgtgatggtgattctggttaactctaactgatagtctctttaaccgcttgctagatacctcttggttcgactgaacatgaagatataattaagtggatagcatatggtccacgatgtagtgctaggtcctttactgggtatatagtgaacgggcatcgtttccacacaagctcacttcaaaggcaaagtcagaatagtgggatttattatgagtcaactgctatgtgtagatctagtgctaaagataactcacaagtggtggatttggtatcctactatggtagagtcatagatatcattttgctggattataatgtgttttatgtgcctatattccggtgtcaatgggcagttagaggaaacagagttaaggtagaagatgggttcacgcttgttaacttgaatcacagtcaagttagcttcttgaaagatccgtttatactagcctctcaggcaaagcaagtcttttattctagagaagatgatgcatcaagctggtatgtagttatgcgaagttcttcgagaagaaactgtaaagaacaaaaccccacaatagcacagttcactatgaaggtcagacataccacaatcttgatacgcttatggtctctgcctcctaccacgagcaccacgcatctagacccaacatttcaagatattatgagacatatggttactcaaactcatagaattatcaatatccttactcaacacaacctcccaactataagccttaagcataagaatctaaaagatctcatatgcggctcattaccaccattcacactattaactaatactcatatgattcacgaaataaatcaatgaatgcaagagcatatgatcatgcaactaaaaaatcaatcaatcacccaaataaacacccaaacttagtcctcttaggaaccttcgtaccatcatagcttcatcatccctttcgttgtacaaatatctccaaagtcttgtaaaaatttgctcctacgcaaaggcaatcttttgcccttgttccaaactcataaactgcaactccagacgatcacatgcctctggtagaaaatacttagactcaaactccttcttaaacatttcccatgtgataggctggtcgcggtatcgtgaaacaacactatcccaccaagctcgaccatcctcatcttaaaagtataccgctatgtggcccttaaagtcttccgggcaccttgacttttcaaaattcatttccaggttcctcaaccacttatccgctaaaacagtattctgctctcctttaaacttcgaacacctaaatccttcattatccataaccagctttaagaactttgccgaaggagattcggcacgctggcttttctgcatctgttgttagtgtagctattgttgaatcatatgagtcaacaaggtctgaatcatccccaacatcgattgagtctccaacacactttgaacattacgaccttccccatttccttcatcaacttatcttggcagcgacggatttttgtgtgcagtgggttgattcacaggaacatgtgatcttgtctctgactgtgaccctttggatgtgctacagtgcataaaccttggtaaggagtattctggtatggttgcgggaacatcccaatcaggcgttccatacatattgggataatagtatccctcatccccttctcctccaacatacggtacccagtcttccggcccgaagtgctgactccagttttcataaacaggtgagaaattcatcgactcgttcctctccgttctttgacaagaaatctgcattcaatcaaccaaggtaaacttaacccatctacctaacaatggtgaaaagacaggattactcgataaaacattttgaaaaacacgagtcttgctagcatcattaaccatgctctgataccacaaattgtaacgcccccgagacgctctatgaccagacaagtcatgggcgccccgaaaacgccacattgagattgatcatcaacatccaaccgaggtttgggaacccatcctaacccttggccgacgtattgacgaccactctcccacttaaaacattgtttaggcttgccaacccttacgatatttaagtgttgtgccgattcagactaagtcattatcattcattactcgcaaatttgtacaagaaacctgatttatttcataagtatagatattttacaatatgttaccaaacatttataagttttatggccaaggcctagtgccaaaagcacggtacataatagaaacatacttgttttacaaaaggcacaaaactactccaagtttcctattgtccaccacgcgctctaatcctcactatgggttttctgcaaaataagtagaatcatgagtaatctaagattactcagtgaactcgggattccctgcaacagacattagtttaccccaacccaaatacccaacatggaacacacaacaaagcatggcaacgtaaggtagcttgccgaagcaaactacaaaaatatgcaaatgcattaagactccagttttagtaagttttaaagggcccgatatgctttcttcaaacccaacaccaaacacacacactcccgtgatctcccgcgttacaaccacaaaggtatgcaaccggagcatcactaccaaacgttacaccgtcgtgtatacactcggccagggtagctttccccgtctcttcgagttctttgcacttcatggtgataaagtaacatcgttacaagaccccacgatagcatggttcactacgaaggtcagacaaatcacgatcttggcacgcttatggtctttgcctcctaccacaaacacatcgtaccaagaccctaaagtttaagatattatgaaaaatatggctaaatcaaataatagaatcatcaatatcccaacacaacctcccaaccataaacaatagcataagaatctaaagatcacatatgcaatccaatataaccattcacacaattcatataactcacgaaatcaatcaagaatgcataagaatatgattttgaaacttaaacaattttctagaactcactcagtaaccaacaggatgcgtgcaatgattcggaaagaaattttggctacaggaccttaacttgaatcggacgaacggtctttaactcggcagcctctcactttcgttcactttctcttcacaaatcatttcgggtcgagttgggcttgaataggcaaagcaagggcgtgtcagcatgtacacatgtcaaacgcttgggcgagtcagcaatccacgtgtcatccgcccatgatgacacgctcaccgctttagaagatgagtgacatgtggccatccaaacttcggctccacgcaactttcttgggccccaagttagctgagccacgtgtccatggtgcggttaaatgccccaagtatttgatcatggaactaaacaatcaatcaatcacccaaataaacacccaaacctatcatgtgccatatcacacgcttcaagactcacatagattcggttgaaggtttaaggttagcttcaacaattctcggacattccatggcttcccaatcttgatcccatctcaatttaactctcctcatcttgatctaacacctcttgatagaagcagccttgattcatgaagctttagtccgaataaacatttatgggacgggttcctcggtaggttctcgatcagacaggataactgaatagatttctcgctcatgggcaggaattctcgatcactgacaggaattcttcactcacggtcaagaatatcgacggtaaggccttcttcacgttttctcggtcttacgggcagttaataactcaacagcattttggttctctctctctttttccctctgaaaattcttaaggccgaatggagcttatttaggggcggcaggggtgagtcagccagtacacatgtcgtccgcatgtgatgtcactcacgtggcaacgctaggacgatgacacgtggacatcaagactttggctccaagggacttaacttcggctccaagggacttaacttcagctccaatcctttaaaattcagctccaagcaactttgcttaagctccaagtaagccagcccacgtgtccatggcgcggtcaacgcccggtggggcaaacttcgcctacgccacgcctatgttggccaatcttgcccattcttgcccatctttgctcattcttgcccaaatagttatttctttttccctttgatggtttatcaccttttgggcacatatggtcaatgatcatgtattcatggcaactttctccagttttggcttcgcccggattaccccatttcaaactagaattggccagtttcatttttaccttgcccatatctttggctttcgtccttttactattcttttctcttttagttcttccttggacgttcctagatgtttgcccgcttggtcgcataccccttagcgagggtcactacacaaccccctctcttttatttttgtcctagtttcactctcttcttaaggatttctctaaactacttctctccttgtggatttgatcctaaaatactactccgatataatgtgctcttgcagtagtggtgttgtctattaggtaaaagcctgaggcgaaataaacatacatcaccactcgaccccatactcgatcctttacttgaccaatcactcgatcacagccaacggattccatctaacctaaagatcgatcaaagggccttccgatcctcctcatttccccactcaaccagacaactgagcataagaaaaggagaggaagaagaaactactcgacccagcgatcattcaaagcataaaggcaaaggcgcaatctttgtagcatcctgtcactcgatccccaaaggtcgagtatccactaaaccgtctcaagtcttttgtcttcttgtgtcctaaggtttttgggattttactataaataggtcactttggggtttgtccaaaggaccaagcttttatcttttagtttatttttgtgttttagaatctttgaaccttaattactcttaatcaatttcatttttgcatttagttctttgagtaaagttgtttatctagcttagatctacattttgatatgtttagagtaatttatgggtttgtgttcttgattatgttgctagagtagtgattagggttcttgaggatggattagattagggtaatttcagggtttttcaggtggttaagattaggttagatcccttttggattagttgggcttaatgtttatttctttctgatcaattggaattcgcctaaggcattcttcatccaaaagatgttcacatggaatgcctgatctactaattccagagattggttcctctatcccagagatggctctttggagggctttttggctttgatttgttggtgcttagtgcctgctgagttagattcctttgacaagaccaagtctggacctaactctgtttgaggtcattgatgcgagactgctttgatctgtattaaaacattttgtctagggtatttgcctttcacttgttaaccacctgatagaccctagatttgcttttatcaatgaatccatctttagggcttctattcttcttagatttatttgcttatttacattcacctattattgcatttctttcacctattatttgccttcaccctgtttagttacctattattgcatttttgtccttgaatctgtcgtttgcttggttttactcgaacttgtgatcgagtagggcacttagttctcatttttattgtttgaaacttgatttaggattgttactagaaacccaccatctttatacatctggcttgacttagttgcttttgtacacattttgactgcttagcaaacccagtgaaatggattgacaccccatgttgctgcatcaacatgttagtgtttaaggagaaattgaatacaacctagttaggcgttaaaacctaactatcaagagtaaagctaggaccaataaacaaaagagggttttgttgcaagtaaataagtaagtcaaggaagaaagtaaatcaagcaaatgaaaggaataagagaaccattgggtattcaagagatcacaatggattcaatgattaagtcaaaggataacacagttaggtttgtttatttccaaattctctcacatacaaaactcattcatttttgactaaccctatggtgtataggcttagagtcggctaatctccccacattctgttacccaactatcgaaggcaacgttacatagatcaaagcattaagttcaagttcgattctagcccataaggccctataaatcaactaccacaggttgtagcacaatattcattcgtgagttagattaaagagtattacacaagattctgccaagcataaaactcctaagatcatgttctaggtgggtgtaccgagcataaattcattaaggacaaactcaactagaaaaaagacagtataaacaataaaaaaaaaacatagttaacgccacttcaacattagatcatcaacccccctttgactagccctttaaacgcaactagagatctactcttgcatggtaaagggactcatcaaagggttttttgataaggctgataataagtttttagtcaattaatcctaaagcactatcatgtcgttgtagtattttaggttgtcaatccaaatgggtgtgatgctaataattaagatgtgatcagaagtcactaagtaaagccaagcaataacaggttttggtgtgttctagcagtcctaagtgaacatgcagaaaacagaaaatcaagcagaaacaataaaacactcgaccaacacagctctgtgcagagcactgggtgaggtcgagtagcagacagaaaacgaaacacagggatactcgactgcacagtctgttgccagacaactgggtgatcgagtataaggtcgagtaacaaaaaaaagaattgtagaaactaagcagcagatgacaagatgtagtaaacaacagtagagtaaacaaagaattcaatcagataaagaattcccgaggatggggtaattgagtagtttcgtttcctcagtttacaggtgattgacatgctcgataaattaaccctagacaacaagttcattaacaaaatctaagtgccacctagtcccagactcaatcaccattgacgagagctaacctaacaggcattacgaatcaacaagttaaagccaaaacactctctacaaccaataccttggtacagggcctctggaattagtggttcagacatttcatcgaacaccttttgggcgcgcaaaatgtctgggttcaaattccagttgatcagaaagcaataggcattaagaataactaatccagaagggatctatcaatcaatactcaaccacctagcatactgagaattctacactactctaacccatcctcagaaacctattcactactcagacatcattgtagagaacataaacgttgaacaggatgaaaacatgataacaacagtttaatagcaaaacgataacaggatgaacaacagtaaacgaaatcaagaacaaatactgaatgctgaatagataaagagaaatccggattacaaaggtctagaacacagtgtctgcggaataaaactagaaaaaaaacttgtttgcaaaaatgtgaagtacatgttacttatagccaaatattccgaaaccctaatacttaaaatgacgcagtattgggacggactaagaactgtactcgacccaggtggtcgagtgggaggtcgagtgaatagctggagtcttcttttcttccttgtgcttgagtgcggaatgaagaagactctgaagctcgcaatcgagtatgtagtcaagtggtggtgatggtgatactcgacttcaaggtagagtggtgagatcgactagtggtctagtaatggaggtgaagacactcgacctcggggtcgagtgatgtgattgagtgatggtcaggtgatggagatgaagacactcgacctcggggaggtcgagtggtgaggtgaagtggtgatgtccactactcaatcagggggtcgagtggtctgctgaggttgtgaagcgtctactcgacctgggggtcgagtggttttgtatgatcaagtccgcttcttccaattagctcgtcaacagctccaaatcacctgaaatcaacacaaatatgcaacatgcatgcaaacctatcctaaacatgtaaagtgatgacaaatgatgagaaatggtataaaacagtgatgatatggtgctaaagtgatgaaaaatggatgctcaaaacatgcaaaatacacacttatcaactccccttaacttagtctttgcttgccctcaagcaaacaatcaagaacaagctggaggtgaggtttgaaagcggggactcaaagccaaagcaccagataaacaagatgaaatcaatgtccaagttggaagttctaagctgcaatatgatcgaattctactcaaaaacgttagccatgcctcattatcaatatatccgactcatatgctcgacctacacatgttttcaaatctaccaatccctttaacattcattagttctggaaagtgaatcaagcaatgcatcatcaatcaactcatttggctaaggtaaaggtcaagggacaaagatggtcccttacaaaataggcttcagtaacaggggatctctcaaaaaatgattaagctttagtagaatgctaaaggtaagtcacaagctatgcatacagagataagatcccatctacccagaatatatcaaatgaagctctaatggttatccaatctccaatcccaatataagaacttaactctaccctttgcattgatgaatcttttaaaccctttttctaatcattcttttctattctcttaactctaggagaagctttctcaacactttgatgcatctagcggatttggatttctttaacaactaaggttcctgtttttaacattttaaaaccaagggcttttgcccatcttcaatagctaacaagaactctttcttttctttacaaatcccaaaacctttactagacttttctacttctttagcttacttcacctagagtcttttaccttttcttatcaatgaatcaaccccctttttttcttttaaacacatcccaaccaaaagtataagcgcccacctagtcctatctagtccaaaaaatgcgaactagaactacatgagacactatctctgtcgttacgaacctaacactttctaccaagcttaatcggaataagacctcacaaacactcacaagtgatatagggcttgaaagaaagtctaggttttggttcgggttaacagctctaataaggagagtcagctacttggattaacaagagtgatcaaaacgaataagaaaatccaagtattttagggtatccatgagttcagatttgatgtagacatgataattaaagatcagattcatgttcaaattgatagggaatggtatcagatcatgacagtgtggtcgagtagagcaatctaggcatggttcagttttatttcaaattcattgactacgcaacagacaactagcaacgagggcactgagtttatccggtgaatcaaaatgcgtacaaggctatctcatcattatcccctaggcatatgcaacaatcctaaatgaaacactctagactcgatcgtaaatgtaatgcaactacatgaacactttttttttttttgtgaaatcattttctgaaatttttcaaaatttttttggtttttctatgccttagataaatgcagactcaaaaatatacacaatgcaacacacacttcctgagccgtcccccaaacttatcatgtttcttgtaccacttctgcagcttgctgttgtttctatgagcttcgctcaaactcttgctttcccgcgatggaggtataagctcgctgaaatgatacatgctcgtgtcaaactccgcctcatttatatcatctgtctcatcaacatcttctgttgtagctcctttggtgtgactaacctcctcagttggcggactgccctcaaaataaagatcttctagcgcaggcttgaagtcaatgttccttccctcaagaatcctagtagcgtcaatgcaggggagaagaatgttggcgattctagaatgctcgaacctgtagcggtggaagtcgccagccatgtcaaactccaagaactcacatcggcgcaaatgatccaagtccatcatcctcggtgctaaccctggttccttgagcggtactccacaagcttccagaattggcgtcaaaacgccacccacaaatagtgctcctctcacattcttcttaatgtttgtcaacgcccacttcctatatccacacaggtggatcaatagaggcattactggtggtgtgttgttgagatcgcctctcaagacattctttccctttgtacggcggagaatccctgtgagcgcggaatctatcatctccatgtccgtgttagacacggtgcctgtagactcccaggagtaaaagacgttggcaactgatcgctcaaagtagcggatcataggactctggattttgttgctcttggaccgcgccgagtttagcgatagattgttccctatagtggcccacaaatccttaagctcctctctgtcaaatctgggtttggttcccttttcactagggaaaccaaacagttcttccaacttcttgatcgaaagctgataccgctgttcatccactgagaacgtcaagaagcctaaccccatggtttccagctcaaagtctgtgagtccctcatacatctccacttgcagcgtggaaagaaactcgattgtctcctccttataggcagcgtaaaggtaagacatgagtgtctccagatgacacttctcgaacagatgctgcacgtcctccagtaaccccagttgggttaaagtctcatagcacggatacctcattccccagaagtcattcatctcaaagagtctgatatattcctccattgtaacctcgtcgggtttgttcagcagcttcgtctccttgcgccatgactctggctcatagtcagtttagatatcctcatcaatcagctcatatctactcgacatcgccctctttcctctggcgatttcagctcttctctgattacgtcgaactgcggagcgttcaaattcatccctgaagctctcgtaagcatgttgcctctcggtctaacggaccaggactcagcttcatccacattataatcagggtccatagaggattctccactgtagttactcatgatgaaacctgaaaacagaagaaactcaaagataaacgtaatagcaaaaccaaaaacacaaaccaatcaagtaaaaaggtcgagtataaccaaaccggtcgagtgtttggaccaaatccctttttttttatatacttcttcgtcggtttgatgtgtccgcggtcgagtgaaggctgtggagtcgagtgatgtggtattgaatgagaggtggtgattgagctggagagatgaaagcagcggcggtaaagtgatgaagctcgaatggaggagaaaacgatttgattggttgatcgtgaagggggtcgagtggttttgagcgagaactgttgaaggcaaattgatggtagggatcgagtgtttggtgagcttgagaggcggaggggttcttgcgacgaagtcgagtgaaacgactacgaatgaagaggtgagagacgattctttgagtgagtgaatggtgagaagcggcgtggtatgaagcggtcgagtgaagtttgagaggatgacagttgtaatgagagctcgagtgattttggtggtggagatgcgatgagagttgtggctgtgaaaggcgagagaggagcggtcgagtgcgtgaggaagagagatggtgaggtcgagtttatgaaaggataaggcgatgggatcgagtgtatagataaggagaggtcgagtggtgctttggatggatgatgatggggttgaagacgagtgatggagagaagggagggttgatttaagaaggatgcggtcgagtttatttggttgtggaggagaaaacgaggtcgagtgatgggggagaagtcgagtgaagatggggttgcgtgaagatcgagttggtgtgaagagattccatgtctcttggtctgctgcatggaggacatgggcgtcagtggtgggttccattgtgtcttcttgtctttcttttgtgctctctgcttattgtaaaagccccaggaaattccgcaatcttctgtaaacttgataaagtctctgtaagactctgcagcttctgttggtcgagtaaaatgatgatttaattttttttcatgttttaaaaacatcactcaaactcgaccaatgtactcgatctctaggccatcaatagagtaaaagctttaaatttttactctaccttcacgttactctctttttttttctgagaaccacaaacacaactaaaacaaatcaaaaataacaagaaagtaaaaattatttacaaggataattatgggacttcctcccaagtgagcttttactctactcctcccaaactgcaacttgatatgctttccaaggttgagacttattttcccttccctgacatctatcactgctcccactgaagctaagaagggtcttcccaggattaagggatccttatgctctacttccatatccagcaccacgaagtctgtaggcacttctactccattaatcatgattggtagatctttcagcatgccgaagggttttcttgaagacctatccgcaaggatctaagtcaggtcacaagttttatactgaatgaactctaaccttcttgccacagagagtggcattcagctgacagaggctctgagatcgcacagacaattgctgaaagcgaattccccaatggaacatggtagagtgaaagatccatgatcttctaacttctcttgaacaatcctcttatcagcagctcgagatggagtggcatcactttcatcatctgaatcgtgatacatcttgatcctttccaatatcaaatttctcacatctttgtgaagatcgagaatcaggttgagaacttccatcagtggcatcactgcttcaatctcgtctagctgcttcgctgcaacagacttgtatctctccacccacgctttcctaaatgtccacggaagagcacatgagggtaatggagtaggtttgaatcgtttcaccattttctagattatggcggccttctcttccgaggtggattgaatgtgatggtgagaaccagtagaatggttgaattcaacaacagagacttcaatccgagtagaagcctcccattcttgaacatcactgtccctagtgattaaatcaaggacaggtcgagttggcttctctcgatcatggagagagtgatggcgtgagcagttgcatactcttttggattctgtatggacttccctggaagtcctgtgactttaggtgcagaggtagatgctgattgtccttccaaatatctgactttggtattcaatgcctccactttggcattcacgtcattgtatctgcaatccagcttatggtgcaattcagataatttcttatcaatttccattgagctagatgcttgtccttgtagcagttgttgtaccatctgtttcatttcagcatcaggagcagcaggaccttggttttgctgaggtgcaaacccaggtggtggtggcggctggtagttcccctggaatagctgcttgggaacgaaaccttggttgtagggaacaaaaggtttgttctgaccttgttcttgctgtggaggatacacttgatcctgaggattagcgatgttggtgttgcggtagaagaggttggggttgttggttttgaagttgttgtatcctttgtagccaccctagttgttgttgatgttgctgactgcttccaactggttaccctccccatcttggacttgaaactgctcgtcatcaacaaggaagtgcacaagcttctgctggctaagaagaatcttgtccagcttgtcattcagcgctttgatctccttcgtgtgtttgtcatcagagtcaactgtgcctctgacggtcctatcacagttctcgttgtaattgccatctgattgagcaaggttctcaaccaattcccagtcttcttcaacatcttttttctggatatttccattgctggcggtacccagaagcattctgatgcgtggtaggactcctctgtaaagagtgctgagcagagaggctttagtaaagccatgatgagggcattggttggtgtaacccttgaaacgctctcatgcttcacaaaagctttcaccagccttctgtaaaaagccagagatctcatttctgagtcttgcagttctggcattggagaagactttgatagaaaagccttcttgcaatcatcccaggtggtgattgaatcatggggcagattcttctcccatatttgtgctttgtcgcccaaggagagtggaaacaaacgaagcttgaatccgtcttcactgacaccattgatctttgttaggttgtagagcctatcgaattcatcaaggtggtcgagtggatcctccattggcagaccatggaatttgttcccctgaatcatcgagatgagaccactcttaatctcgaagttgttgttctggatagcaggaggtgcaattccttttctctaacggtgatcacgtggtgcatctccagaaccaatgttggcagggccattttgttgattctgttcgtcagtcatatcgagtggttgatgaggtacaaggttcactgtgtttctcctttctctgagttcgcgagctatgcggtcaatgttgtcgttgaaaaggaggttctgattgcctgttgattgagttcgcatacagcagaggtgtacatggatcaagaagacaacaagaaaaacacacagttagcaaccagattgaaaattgaaaaagaacttgatctaagcaagtctgaaatctcaaatgtaacaaacaaacacccaattggcaacggcgccaaagtgataacaggttttttagtcaattaatcctaaagcactatcatgtcgttgtagtattttaggttgtcaatccaaatgggtgtgatcctaacaatcaagatgtgatcagaagtcactaagtcaagccaagtaataacaggttttggtgtgttctagcagtcctaagtgaacatgcagaaaacagaaaatcaagcagaaacaataaaacactcgagcaacacagctctttgcggagcattgggtgaggtcgagtgacaagtcgagtagcagacagaaaacaaaacacatggatactcgaccgcatagtctgttgccagacaactgggtggtcgagtataagggcgagtaacaaaaaaaagaattgcagaaactaagcagtagatgacaagatgcagtaaacaacagtagagtaaacaaagaattcaatcagataaagaatttccgaggatggggtaattgagtagtttcgcttcctcagtttacaggtgattgacatgctcaataaattaaccctcgacaacaagttcattaaccaaatctaagtgccaccgcaacagagaccctcaagttaacctagtcctagactcaatcaccattgacgagagctaacctaacaggcattacgaatcaacatgttaaagccaaaacgctccctgcaaccaatacctttgtacagggccacgaatctctggaattagtggttcagaaagcaataggcattaagaacaactaatccagaagggatctatcaatcaatacttaaccacctagcatactgagaattctacactactctaacccatcctcagaaacctattcactactcagacatcattgtagagaacataaacgttgaacaggatgaaaacatgataacaacaatgtaatagcaaaatgataacaggatgaacaacagtaaacgaaatcaaaaacaaatactgaatgttgaatagataaagagaaatccggattagaaaggtctagaacacagtgtctgtggaataaaactagaaaaaaacttgtttgcgaaaatgtgaagtacatgctacttatagccaaatattccaaaaccctaatacttaaaacgacgcagtattgggacggactaagaactgtactcgacccaggtggtcgagtgggaggtcgagtgaatagttggagtcttcttttcttccttgtgcttgagtgccgaatgaagaagactctgaagctcgcaatcgagtatgtagtcgagtggtggtaatggtgatactagacttcaaggtagagtggtgagatcgagtagtggtctggtaatggaggtgaagacactcgaccccggggtcgagtgatgtgatcgagtgatggtcaggtgatggaaatgaagacactcgacctcggggtcgagtggtgaggtgaagtggtgatgtcctctactcgaccagggggtcgagtggtctgctgaggttgtgaagtgctactcgacctgggggtcgagtggttttgtatgatcatgtccgcttcttccaattagctcgtcaacagctccaaatcaactgaaatcaacacaaatatgcaccatgcatgcaaacctatcctaaacatgtaaagtgatgacaaatgatgagaaatagtataaaaaagtgatgatatggtgctaaagtgatgacaaatggatgctcaaaacatgcaaaatacacacttatcaaaggccataagaaagagatgaataagacttaacaaattgcagcaccgaattgtcaacattctaaggatggtcgaattgtagcacgagtgtagatcgacaccaccactcgagtcgatccacacacatcactggttgaagcagagtcatctccgatagctacttttcaagctgggatcattgttataagtctaggcactactgtcacgtcacccactacacctctcatacttcatccacctcctaaacaaccaaggtactaatcttttggggtcagatttcacccaggtaaccgagccgatcaaacaaataacacaagtgccgcgagagctaattttgccgtctccccgaggtgggaacattatcctttatggcccgggcgtcactccacaaacatacccgagccggtcctcgaaacaccttgggcaaacatcaccctgctcggtggttatcctagaagatgattgagctgagtatgacaacgatccgaggaccggtttgacctggctcagatgaactcttgacctgagccaaaggcacacgttcgtccgaggagaagacttttgaactttgacggggccgaaatatcaattccggaaaacctggaaatgatattggagaatcttcgaggatattatcaaatctggaaatcttcctgatgttcccgaagaataaggaaaatctccatttatgaaagatcttccatcgccgactccgagataaatgaaaatcttccgagaatatcgcgagaggtggtttatcaaagacctatataaagcgcctcatagaataaagaaaaggggtagagaaaaaaggctctccacttcaggctatcaaaacgctctgactttgaaggctaaaacacttatctttacctttctaaacacttgtacgatcgaatcatcatcttttcaataataatatcaagaacattgtccgcggtaatcgaataattctgttgttctttgagagtctcgcaaagatctgttctttgaagaaaccctaactacaatttcggttgtgtgagtttcgactctcacaatttggcgctagaaggagggggagagatttctcttactccaagaacacagaaccgacaaatcaagtaacgatgaccaacaaccagatcccccttaccaccgttgacgtggagggaaaccctgttcctccaatccaggtaaacgctcctaaagtcaacgctcccgcagtcctagcaaagctgaggagcatgatggcacaactccagaagaaggtgaacgatcaggagcaagcaaattgatccttgtcccaacagctcgaagtggctacttctcaagggcaggtcaggaccacccgctttggcgcacaacactttcctgatcggtgagcagcggtagatctcaatccaacgagactcgtgttcaacacacaccggtaacacgacgaggccattttggcggactgcgccagcactcggcggaacccgagcagaacatgacgaaccgagtagaggaagcagacccgcaggtcccgattccccgagccgaatctgacgaggctgacgagatcaaagtctctgacgacgaagattcggaggaaaacattagatgggctgaggagtaagccagggagtaggaaataaatgccatcaagctcttcctagccaatgcagatgccgagatgaagctcgtacgatcacagatgcatagcgctgtctcctcggtcccaaacatcgattgcattctagaagtatatcacaacacacctttcactcgcaagatctccaacgcgataatttcagacccggagaaactgagaatcgagtacttcagcgggtcatccgacccgaagggccatttgaaatctttcaaaatttctgtggcccgagccaagttcaaaccggaggagagtgatgctggtctctgtcatctgttcgtcgagcacttgaaaggaccagtcctagattggttctcaagacttgaagggaattctgtcgacagttttcaggagctatcgacgctcttcctcaagcaatactcggtgctaatcgatccgggcacgtctgatgtcgacctttggtcactgtctcaacagccgaatgagccacttagtgatttcctcacaaagttttgatccaccctagctaacgttgagggaataaatgacgttgcggctctctgcgctttgaagaaggcactatggtacaaatctgaatcgcgaaaggaattaaatctgtttaaaccataaacaatccgggaccccctgcactccgctttggcgcacaacactttcctgatcggtgagcagcgggagatctcaatccagcaagactcgtgttcaacacacaccggtaacacgacgaggccatttcggcggactgcgccagcactcggcagaacccgagcagaaccaacagcctcgggagagcagaacatgacgaaccgagtagaggaagccgacccgcaggtcccgattccccgagccgaatctgaagaggctgaccagatcaaagtctctgacggcgaagattcggaggaaaacattagatgggctgaggagtaagccagggagtaggaaataaatgccatcaagctcttcctagccaatgtagatgccgagatgaagctcgtacgatcatagatgcatagcgctgtctcctcggtcccaaacatcgatcgcattctagaagtatctcacaacacgcctttcactcgcaagatctccaacgggataatttcagaccggggaaactgagaatcgagtacttcaacgggtcatccgacccgaagggccatttgaaatctttcataatttctgtggcccgagccaagttcaaaccgtaggagagagatgctggtctctatcatctgtttgtcgagcacttgaaaggaccagccctagattggttctcaagactcaaagggaattctgtcgacagttttcaggagctatcgacgctcttcctcaagcaatactcggtcgctgtctcagcagccgaatgagccacttactaatttcgtcacaaagttttgatccaccctagctaaagttgagggaataaatgacgtcgcggctctctccgctctgaagaaggcactatggtacaaatctgaatcgcgaaagaaattaaatctgtttaaaccaaaaacaatccgggacgccctgcactcagcctcagattatgtttccaataaggaagaaatggaagtgctatcgaaaaggcacgagccgtcgaaacaaacgcctcgtggcgaaaaaatcccaacctagcgctgaaggcgagaatttagtacactatgaggggcgatacttctctggagctcacaattatcaagtcgatacaccccgaggttgagggcgaggccgcgattgaggtcatggacgagaatcatatacttggacgaaagatcaacctacgggaaatgagcaggagtactacgagttatgtaagagctacgaccatcacacttttagatgtcgtaatctcggtgcgaagttggcagccaagttcctagctggtgaaatcggtggatgcttaaccattgaagacttagaagtagagaaggcgaaagacgaacaggtaaatgccgtggcaaaccatgaacaggcagtgtagtgacccgcataaggacatcggccacgggcaagagtccgaatttttaaaagttgcccgaatgcatggccaattgaccttatgtgcccaagatacaatagactatcaaagggcaaatatgggcaagtttgggcaagaatgggcacaaatgggctagtttgggcaagatcgggcgtgccgcgggcgaagtttgccctacagggcgtcgaccgaccgttgaccgcaccaaggacgcgtggctcggctgacttggagccccagaaaagttgcctggagcaaaattttagttgcgtggagccgaagtttgggtggccacgtgtcgctcacccgctagaacggcgagcgtgttatcacgggcggatgacacgtagatcgcttactcgcccaagcacttgacacgtggacatacagacatgccctttcccttgtctatataagccgaactggaccccaattgttttgtgaagagaaagtgagcaaaagtgagaggctgccgaattgaaaccgtctgcaaattcaagttacggtcccatagccgaaaactctgcttgaatcattggaagcttcctgttggttactaagtgagttctggataatggtttaagttgcataatcatattctcatgcattctaaattgatttcgtgagttatatgaattgtgtaaatggttatatttgagtgcatatgtgatctttagattcttatgctaatgtttatggttgggaggttatgttgggatattgatgattctatgtgtttgatttaaccatatgtttcataatatcttaacctttgggatcttggtacgtggtgcttgtggtaggaggcaaagaccataagcgtgcaaagatcgtgatatgtctagctgatagtaggattcttactcaataaatcctaaaacactatcatgtcgttgtagtattttaggttgtcaatccaatccggtgtgatgcaaacagatgagatatgattagaaagttctaagtcaagccaagcagagagttggttggttctaatagtcctagtatgcaaaaacagaaatgaaatgaaactaaaagcaaaaatggcaataacaggtaggtgaataacaaagcagaaatgataacaggcagtcaaatggataaatgattcctaaggatggggttatcgaatagtttaaaaacattatattttaaaaaacaaatttgccatcaaacggcagatattgtgtaaaattacaagaatctgttgtaacataaaacaattctgtcataacattaaaaaattggttatcggttgataaaacttcacagaagctatccctagacaacaagttcaacaacagattaattcaatcccatgatagaaatcctcgagtaaagctagacactgacctaattcccattagcgatctctaactaagcaggcaatatcgaatcaacttgttaaagccaataccctctctacagccaatcccttggggtagaggcagatatctctgaaattaataggatccaacgcccatgaaacgccttctgagcgctggaagtcttgactcatattccacattagccagtgaaacaagcaataagcgcaacgaatccagaagggattctagtattctaaactcaaccacctaaagcgaccaagtaaaccacaactaatctatcccatcctcagaaatacgattcactactcagacataatcaaagacaatagcaaagcaacgattgaaaacatgtcaacagaaatgacgaatgacttaaacaaaaactgaatatcaaatacttaaaaatgaaaaaatacaaagtcgcaagagaaacactacggctatgaaagttgcaaaatgtaaaagtggatgaaaaacgagatgaaaaacgaaaaccctaagaggctacttatataagggaaaatgaaacaaataaggaaactagatatatagcgaatcttcacgtcatgaccctgcgatcgaatgtgtcattggcatctgatgggctgaaatgagcttccttatgattgagtatgtcattgatcaaactgggcttcagggactccaccttgcgatcgagtgagatgcagtgaagacgagattgaatggtccagtgaccctgtgattgagtgcgatcgagtggatgtcatgaggtggtgatcgagtagttgcttcggcttctcttcacttcttcgttctcatcttgtctggttgagtgcagaacgagcagataggcctcctggtgaacgagttattctgatggggtgattcttctggctttgcgattgagtgaaactgagctgctagcttctccggggttgggatagagtgatttgccctagtagggctccgaggctgcaatagagtacttttgctaaaggcgtcattgggcatccggactttctgttctgtttctcctctgtttaaactccaaaagcatccaaagtacctgaaaacaactaaatatgcaatgcacatgcaatcctaatgcaaaatcgtcccccctaagtatgcaaaacacactaaaacgactcctaatgagatgaaatatggatgaaacaatgacaaagtggtgaagaataaatgcctaaatcatgcaaattatagacatatcaactccccaaactttgtctttgctcgtcctcaagcaaacaagaagacataagcggaaggagaggtttgaagttggggattcaaaaccaaagcatgagatatgacaataaagatcaatgtaccagctaacagttctaagatacgaggtgatcgacttctacttaaaaactttagctatgctctattatgatccaaaacctacactcaaatgcacattgcgtcaagatcacccaatccctttaacattcattaagttcaaaaacatgaatcaagatatgcatcgctagtgaactcatttggctaatgacaggttatgagacaaagatggtccctttaactggttcagattttaataacaggggactctgaatgaaaaaagactaaactttagaagaatgctaaaggtaagtgccaacctatgcatacaagaatagcacctcatctacccaatgacataaaccgtgaataacaagtagatggtcctatctctaaacccaatgatgatcctaagtctaccattttgcactaaaggcatattttgattttttgttggatcaatgtttcttttcttttctttgactcttgttcttaaggagaagcttttcttaaactctatgaggctagtctagtgaattgggtttttctttaactcttatggctcttgtaattttttttttcttttttgtttttgttgccatctctttttttagagcatatcttcacaattctatgcttcccaaacattcactagacctcaatatgattttcaacttccttctcctaaagactctaacccattttatttttctttctttttctgcttacacccaatctcaatccccaattaagttcccacctagtcctaccaagtcccaaaacgcggattggaaccacatgagttactactcttgtcggctcaaacctaacacgttctaccaagctcaatcctgaaaataggcctcacatgctctcacaaaataacatggtttgaaagaagggttgggtaagggtgggggaactactccaataatagaagcaactacttggattaacaacagtggtgaataagtgaaagaataccaaatatgtattctatccacgagttcaaaaacgatgcaaacatgataattatgagtcatattcaagttcaaattgacagggaaaggtgtcatgacatgcatcgagtggtttctataaaacatggtgcgattttacttcaaagtcattcaaatgccttagagaactaataactcattttagtgaatcatcatgcttacaaggctatttcctcattatcccctatgcctatgcaacaatcctatatgaaacactctagactcgatcctaaatgtaatgcaactaaatgatcacttttttttttgtggaattcattttcaaaaaatttcattttttttgttttttctatgacttagatgatatgaagactcaaatgatattcacaaaaaacaagtcaaatacgtcttgaaccctcccccaaacttaaattacacagccccttgtgtaatcaaaatttgtgaaagaattcaagataaacacagaaacaaaaacaaaagcggtatttacaaatggttttggtgtgttacctcagtagaatgtcctggagatgtagtcatccatatctgtttgagtgtactcagcaggcacgagcggttcttgatgtgatctgccatctcctcgtcattgtgctcgatcgcaaccccaggaggttgtggagcatgacgctcatgtgttctccggggttgcgatagagtgatttgggcaattccactaggagaccactcgatctgaccacttccaggttgcgatcgagtagtttgacattgtcgttgagaaatatgtgtgtcccaaaaccactagatcgcactcccgagcttttactctcatcttgcgatccagtgattcatcaaaaaattgaaattttttatttgaacactcgattgcatccctgctgttgctccatctgttattcatttcctgagaatcaaaaacaaaaccaaaacaaataaatggtaactaaaaaaaataaaaactatatacagggataggactgggacttcctcccaagtgagcttgttttaagtctctagcttgactcctcacactcattaggctcaatgagggtgattgagtagaattgacgtctcttctccttccttagtagatacaacatcaaattcagcatactctcgtgacaggattgtaattgagtactcaatggccctttcttggtaagctcgtttatcatcatctggatagtcgtcttttctagactgttctaatgtgaattcacatccttcttttctaaccataggaataacttcatcatttgggatgtccttgatgtcgagtagtgcgtggttgactttcccatggagctccttaatttgatctttcagctctctcacagtgtgtgttagctctcttataatagctttgtcgtgccatttagacctctccttgagttctaaccaatcatttgatgccctcatgcttgactttaggtgtttagctgagcactctagtctagtatcaattgaggcttcctcgttcaatgcaacatgctctctttctaacccaatgacacctttaaagatctctgatcctggtactttgttgtgtgagtctaatgacatctcatagctcaaggtctcactggagaaaaatccagcttcactatttttggtcaaagcagtttgaaggtgatctttgtcaataagctcctctagcagttcattagctagttgacccatttcttcaactaagaaggtttgtccttctattgttggcttcttcatagtgttcctgatttcaaacttcattttgaaatcctccccgagattaagattaatttttccttgcttaacatctatgactgctccagctgaagccaagaaaggtcttcctaatatcagaggatccttagattcttcatccatctcaagcacaacaaaatcaatagggacctctactccattaatcattacaggcacatcctctaacaggccaaaaggtctccttgaagtcctatcagcaagaatcaaggttaggtcacaaggtttgtactgaacgaatcccagtttccttgccatagagagtggcattatactgaccgaggctcctagatcacatagagaattgctaaaagtcaattgcctaatggagcatggtagagtaaaagatcctggatcttccaacttttcttgaacaatcttctgttgaatgattgcactgcactcatgacttaataccaccattccttggacttctttgatcctttctgtaatcaggtctttcacgtacttgtgctcgttaggtattagcgcgagacagtccactaaaggcatatcctttatctatttttccaagagggcttcatattttgtaaccaaaactttcttaaatcgacgagggaatggaagtggaggtttataaggggtggcacgaagactgtatctttggtctttgcagttgtcagttttgcaacgaaggtagtaattggcggagcttgtggtcgagtgcgttgactgtcaaggatgggctcttcgattgttttgtcagccaaaacatcatcttgataaaattcctccccctctagaatcacactgtccttagtgtttgatgtagggacatgttgagtttgcagctgtcaatcatgtctgatagtgatggcatgggcagtggcatactcctttggattctagtttgcttttcctagaagctgtcatgggtttttgttaacagatggtgaagcgaggatgccttccacatatctcatcctagtgcctagtgattcaaacttgctgttaagttcgacgccttgtcggtcgactttgttgtttaatttagctagctttttagcgattttcattgctcatgtgacttgtccttgaatgagctgctagagaatagtcagtatgtctgaattctgaggcgcagttgcttattattgttgtggtgtgaaactaggtggtggctgctgttgttgatatcctccttgaaactgctgctttggaacaaactcttggctttggtagtaatgaacaaacggtttgggttgttctgctgctgctgctgctgaggatagacttggtcctgagggttggcgacattggtgcttctgtatgacatatttggattgggtctgtaattgttgtaccccatgttgtagccaccttgattctgaacatagctgatttcagcactttgatcattctccccctcttgcacttggaatggttcatcttgagagatgaagtgaacatgtttctgttgcacttggaggattttgtctagtttgtcattgagagctttcatctctctgcggtgcttttatcagagtcagaactggtgcagatgcttcttgcataatcttcattgtagttgtcatccgactgagcaaaattttcaactagctcccatccttcttcaacatcctttgttagaaaattcccatttgaagcggtgtcaagcagcatccttgtctttggcacgacgcctctatagagtgtgctgagaagagaagcttccttaaatccgtgatgagggcatttggtttgataacccttaaagcgctcccaagcttcacataagctttcattttgcttctaagtgaatccggatatctcattccggagtcttacagttctggagttggagaagaattttaccaaaaaggcctttttgcagtcatccaggtcgtgattgaattctggggtagcatcttttcccacagatgggctttatctccaagtgataatggaaacaagcgaagcttgaaaccatcttcactaactccattgattttagtaaggccacagggcctttcaaactcgtcaagatgatctagcagatcctccattggcaagccatgaaactttttcccctgaaccattgcaatgagacagcttttgatctaaaagttgttgttatgtactggaggtgaaacaattccatgacgctagttgtggttgtgagggaagtcatcagcaccaaagttggtaggtttctcttgctcatctacaatgtcagccattgtgtctatttttgtctgttatctcagttggcgagcagtacggtcgatgttatcgttgaataggaggttctgatttccttgtgaccgtgtatcgcctcctggtgatcgagtggttctgatgaggtgattcctctggcttcgcgattgagtgaaactgagctgctagcttctccggggttgcgatagaatgatttgccctagcagggctcctaggctgcgatagagtacttttgctgaaggcgtcattgggcattttgactttctgttctgtttctcctctgtttaaactccaaaagcatccaaagtacctgaaaacaactaaatatgcaatgcacatgcaatcctaatgcaaaatcgtcccctaagtatgcaaaacacactaaaacgactcctaatgagatgaaatgtggatgaaacaatgacaaagtggtgaagaatgaatgcctaaatcatgcaaattatagacatatcaactctcccaaacgtagtctttgctcgccctcaagcaaacaggaagacataagcgaaaggagaggtttgaagttggggattcaaaaccaaagcataagatatgacaattaagatcaatgtaccagctaacaattctaagatgcgaggtgatcgacttctacttataaacttttgctatgctctgttatgatccaaacctacactcaaatgcacactgcgtcaagatcagccaatccctttaacattcattgagttaaaaaacatgaatcaagatatgcatcgctagtgaactcacttggctaatgacaggttatgagacaaagatggtcccttttaagtggtttagattttaataacaagggactctcaatgaaaaaggactgaactttagaagaatgctaaaggtaagtgccaacctatgcatataagaatagcaccccatctacccaatgacataaaccgtgaataataagtagatggtcctctaaacccaatgatgatcctaagtctaccattttgcactaaaggcatattttgattttttcttggatcaatgtttcctttcttttctttgactcttgttcttaaggagaagcttttcttaaactctatgagtctagtctagtgaattgggtttttcttaaactcttatggctcttgtaattttttttttcttttttgtttttgttgccatctctttttttagagcatatcttcacaattctatgcttcccaaacattcactagacctcaatatgattttcaacttccttctcctaaagactctaatccattttatttttctttctttttctgcttacactcaatctcaatccccaattaagttcccacctagtcctaccaagtcccaaaacgcggattggaactacatgagatactactcttgtcggctcaaacctaacacgttctaccaagctcaatcctgaaaataggcctcacatgctctcacaaaataacatggcttgaaagaagggttggttaagggtgggggaactactccaataataaaagcagctacttggattaacaagagtggtgaataagtgaaagaataccaaatatgtattctatccacgagttcaaaaacgatgcaaacatgataattatgagtcagattcaagttcaaattgacagggaaaggtgtcatgacatgcatcgagaggtttctatagaacatggtgcagttttactttaaagtcattcaaatgccttagagaacttataactcattatagtgaatcatcatgcttacaaggctatttcctcattaccccctatgcatatgcaacaatcctatatgaaacactctagactcgatcctaaatataatgcaactaaatgatcactttttttttttgttgaattcattttcaaaaaatttcaatttttttttgttttttctatgacttagattatatgaagactcaaatgatattcgcaaaaaacaagtcaaatacgtcttgaaccctcccccaaacttaaattacattgtctcttgtgtaattaaaatttgtgaaagaattcaagataaacacagaaacaaaaacaaaagcggtatttacaaatggttttggtgtgttacctcagtaaaatgtcctggagatgtagtcatccatatctgcttgagtgtactcagcaggcacgaccggttcttgatgtggctctgccatctcctcgtcattgtgctcgatcgcaacccaggaggttgtggagcatgacgctcatgtgttctccggggttgcgatagagtgatttgggcaattccacaaggagaccactcgatcacactacttccaggttgcgatcaagtagtttgacattgtagttgagaaagatgttgtcccaaaaccactagatcgcactcccgagcttttactctcatcttgcgatcgagtgattcatcaaaaaattgaatttttttatttgaacactcgattgcatccctgttgttgctccatctgttattcatttcctgagaatcaaaaacaacaccaaaacaaatcaaaggtaactaagaaaataaaaactatatacagagataggactgggacttcctcccaagtgagcttgttttaagtctctagcttgactcctcacactcattaggctcaaggatggtgatagagtagaattgacgtctcttctccttccttcgtagatacaacatcaaattcagcatgctctcgtgacaggtctataattgagtactcaatggccttttcttggtaagctcctttttcatcatctggatagtcgtcttttctagactgttctaatgtgaattcacatccttcttttttaaccataggaataacttcatcatttgggatgtccttgatgtcgagtggtgcttggttggctttcccatggagctccttaatttgatctttcagctctctcacagtgtgtgttagctctcttataatagctttgtcgtgccaattagacctctccttgagttctaaccaatcatttaatgccctcatgcttgactttacgggtttggttaagcactctagtctagtatcaattgagccttcctcgttcaatgcaacatcctctctttctaacccaatgacacctttaaagatctttgatcctagtactttgttgtgtgagtctaatgacatctcatagctcaaggtctcactggagagaaatccagcttcactactttttgtcaaagcagtttgaaggtgatctttgtcagtaagctcctctagcagttcattagctagttgacccatttcttcaactaagaaggtttgtctttctattgttggcttcttcatagtgttcctgatttcaaacttcattttgaaatcctccccgagattaagattaattttaccttgcttaacatctatgactactccagctgaagccaagaatggtcttcctaagatctgaggatcattagattcttcatccatctcaagcacaacaaaatcaatagggacctctactccattaatcattacaggcacatcctctaacaggccaaaaggtctccttgaagtcctatcagcaagaatcaaggttaggtcacaaggcttgtactgaacgaatcctagtttccttgccacaaagagtggcattatgctgaccgaggctcctaaatcacatagacaattgctaaaagtcaattgcctaatggagcatggtagagtaaaaaatcctagatcttccaacttttcttgaacaatcttttgttgaatgattgcattgtactcatcacttaataccaccattccttggacttctttgatcctttctataatcaggtctttcacgtacttgtgttcgtcaggtattagcgcgagacagtccattaaaggcatatcctttatctattttttcaggagggcttcatattttgcaaccaaaactttattaaatcgacgagggaatgtaagcggaggtttgtaaggggtggcacgaagactgtatctttggtctttgcagctgttggttttgcaacgaaggtagtagctggcggagcttgtggtcgagtgcgttgactatcaaggatgggctcttcgtttgttttgtcagccaaaacatcatcttgataaaaatcctccccctctagaatcacagtgtcctcagtgtttgatgtagggacatgttgagtttgcagctctcgatcatgtctgatagtgatggcatgggcagtggcatactcctttgaattctagtttgctttccctagaagttgacatgagtttttgttaacagatggtgaagcgaggatgccttccacatatctcatccttgtgcctagtgattcaaacatgttgttaagtttgacgccttgtcggtcgactttgttgtttaattcagctagctttttagcgatttccattgctcatgtgacttgtccttgaatgagctgttggagcatagtcattaggtctgaattctgaggcgcagttgcttgttgttgttgtggtgtgaaactaggtggtggctgctgttgttgatatcctccttgaaactgctgctttggaaaaaactcttggccttgtgtaacgcccgtgtcccgagttagggagtaaccaagatcttacacacgccgaattcgaggacgaattcagtttaaggggggtagacttgtaacgaccgcgtcccgcgttcataaagaggccaggttgttttaggagaaaactagaccatggtcaagaaacggactaaaatacttagtcggaagaacgagaaagttcaagctgaaccagctaggcgagctggacaagctaggatgaactagctagctaagctaggtgcgctaaaccagctggaagactagctagctcagctaggtgagctgaccgacagctcgattgagctcagtgagctgatcgtgtactgacccagctgggtggtctggtcagctgacactcgagctggtggactggtagctcacaggtgaagaggtgtctcggccaaaaggtgtaaggtcaagcgggtacaaacgaacggttgcatcgccaaaagatgcatggaacagatgtgacctttcggaaggatgcaaggagcggatgtgacctttagggagggtgccaggaagggatgtgatgcttcgggaagcatccattcgccccctatataagggaggacgcccaacgatatctcacatcatctcacaacatccaaacaccattaaatattcttaaaggagtcccaacacatcctagagttgttggtcggaaagggggtgcggctcggcgagtataactcgaccaaactgatgcgcatgctacctcccggtccaacggttcgatggagtgtagaggatggagagggtagaccgttcgtcttaaagacgaatcggatccggtagaccgatcgtgggatcagatcggtcagaccgatcgtcagacggatcggatcggccagacggatcggacagaccgatcgtcggacgggtcggatgggacaggccgatcgtctgacggagcgggtcgaacaaaccgatcgtcggatgggatggatcgagaaaagtgttcaaggaagcacaaggataagtgcatccgaacacacccaagggtcgcccatggatgcaatcttaccggtaaagggagaaagcaccaagaatgggtaaggaacgtgattcaccatataggatcaacatcgcggccgccttcatgtatctatctcctcagccatggtgaaaccgatcagagatcggtaagaccaaagggtgactcgacgggtaaccaacgggaaagtccacggtgggaaccgatggacaaaacgaatgttggacccgcgagcaaacctaaggccgatggaagaaggatttcatgggctagcctacgatgatccagtggatgaatccacggactcttgggtgtgataaggatatagttcggatcgtatggatggatcaataagccgaaagctttatcgaccaccatagaccggacggataaacggttagtaaaccgtggacggtcgtagtaaatgaccggatcagaaacatggatggttcgataagccaagggctcaatcgtccaccatggaaccgaaggggagtacgtttggaggacagatggaccaataagccaagagcttgattcgaccatcgtgaaccaagggaatcgtatgatccccaatctctatcgttgtacttagactagtggggttggttggttgtatggctaagtaacgatagggattggttcatcaattcacgaccgatgacgagtcattgaacgaatggagtaaggcgacaaacgggctaaggaatcaaatccgcatattggccaaggtatgtaacgatctagcttattagttaagatagacgtttggtaattgaccgtgaaagtaggataaaggaatatgcgattgtttggcttagaatggttagcgaacatatgcatgtcttgaccgagtaaaggattgatctaagtctaagggacaaagacgatgaaaccggtacaagagttggttagagttaaaccaaggttagaaagacttccgctgtataataagagagcgattatagaatttagcctcgtaaaggcaattctatgttgaatcgcgaaaaattaagaggttcagccgggaagaggcgcgaacttgagtacaacgtcaccggacgccgatacgtccgggacggggtctcacaagttggtatcagagcatgcttgatcctaggatggataggtgctcgggaaaacgtcatagtaaggttctggcggataaggaagttgagggatcgttgtgtacggaaacggaaatagttacccaactcacgatcaggaaccaagatattatccttgtagtcaaaactcaaacatgacggaaaagtgggttgatatattcggagatggaccgatatcaatgaaatttggatctagtcgaaacttgactaagatcgggtacagacttagtcgggatttgactatttctggggttttgatcctatcggaaattgaccaagatcatggaaaaacgacaaggttggaaagagacctatgtcgggaatattgaccgagtccggtggggaccagggtcggaaatattgacaaagtcggaaaaagactttagtcgagaatatgatcgagtccgggaaaggaccaggatcagaaatttgatcgaatgtcggaagagacaaagatcagaaaacgttgatcaaatccaggaaaggacaaagattggaaaacgttgatcaagtccaggaaacgacaaagatcgggaaataatgatcgagtccgggaaaggaccaggatcaaaaatttgatcgaatatcggaagagacaaagatcagaaaacgttgatcaagtccagaaaaggacaaagattggaaaacgttgatcaagtccaagaaaggacaaagatcggaaaacattgatcaagtccaggaaaggacaaagatcgggaaataatgatcaagtccgggagaggaccaggatcaggaatttgatcgagtgtcgtaagagacaaagatcgggaaacttgatcaaactcggaaatagagatttgatcaaacgtgatatctaaagtcttggagagactaaagatgggaaagcattaaggagtaaacaagatcttacactcgctgaattcgaggacgaattcagtttaaggggggtagacttgtaacgcccgtgtcccgagttagggagtaaccaagatcttatacacgccgaattcgaggacgaattcagtttaaggggggtagacttgtaacgaccgcgtcccgcgttcataaagaggccaggttgttttaggagaaaactagaccatggtcaagaaacggactaaaatacttagtcagaagaacgagaaagttcaagctgaaccagctaggcgagctggacaagctaggatgaactagctagctaagctaggtgagctaaactagctggaagactagctagctcagctaggtgagctgaccgacagctcgattaagctcagtgagctgatcgtgtactgacccagctgggtggtccggtcagctgacactcgagcaggtggactgtagtagctcacaggtgaagaggtgtctcggccaaaaggtgtaaggtcgagcgggtaccaacgaacggttgcatcgccaaaggatgcaaggaacagatgtgacctttcggaaggatgcaaggagcggatgtgacctttcggaagggtgccaggaagggatgtgatgcttcgggaaacatccattcgccccctatataagggaggatgcccaatgatatctcacatcatctcacaacatccaaacaccattaaacattcttaaaggagtcccaacacatcctagagttgttggtcggaaagggggtgctacctcccggtccaacggttcgatggagtgtagaggatggggagggtagaccgttcgtcttaaagacgaatcggatctggtagaccgatcgttggatcagatcggtcagaccgatcgtcagatggatcggatcggccagacggatcggacaaacagatcgtcgaacgggtcagatgggacaggccgatgatctgatggagcgggtcggacagaccgatcgtcggatgggatggatcgagaaaagtgttcaaggaagcacaaggataagtgcatccatcacacccaagggtcgcccatggatgcaatcttaccggtaaagggagaaagcaccaagaatgggtaaggaacgtgattcaccatataggatcaacatcgcggccgccttcatgtatctatctcctaagccatggtgaaaccgatcagagatcggtaagaccaaagggtgactcgacggataaccaacaggaaagtccacggtgggaaccgatggacaaagtggatgttggacccgcgagcaaacctaaggccgacggaagaaggatttcatgggctagcctacaatgatccagtggatgaatccacggacccttgggtgtgataaggatatagttcggatcgtatggatggatcaataagccgaaagctttatcgaccaccatagaccggacggataaacggttagtaaactgtggacggtcgtagtaaatgaccggatcggaaacatggatggttcgataagccaagggctcaatcgtccaccatggaaccgaaggggagtacgtttggaggatggatggaccaataagccaagagcttgattcggccatcgtgaaccaagggaatcgtatgatccccaatctctatcgttgtacttagaccacttgggttggttggttgtatagctaagtaacgatagggattggttcatcaattcacgaccgatgacgagtcattgaacgaatggagtaaggcgacaaacgggctaaggaatcaaatccgcatattggccaaggtatgtaacgatctagcttattagttaagatagacgtttggtaattgaccgtgaaagtaggataaaggaatatgcgattgtttggcttagaatggttagcgaacatatgcatgtcttgaccgagtaaaggatcgatctaagtctaagggacaaagacgatgaaaccggtacaagagttggttagagttaaaccaaggttagaaagacttctgctgtgtaataagagagcgattatagaatttagcctcgtaaaggcaattctatgttgaatcgcgaaaaattaagaggttcggtcgggaagaggcgcgaacttgagtacaacgtcgccggacgccgagacgtccgggacggggtctcacaccttggttgtaagaaacaaacggtttgggttggttctgttgctgctactgttcctgaggatagacttggtcctgagtgttggcgatattggtgcttctgtctgacatatttggattgggtctgtaattgttttagccactttcattctgaacatagctgatttcagcactctgatcattctccccctcttgcacttggaatggttcatcttgagagatgaagtgaacatgtttctgttgcacttggaggattttgtctagtttgtcattgggagctttcatctctctatggtgcttttcatccgagtcaaactggtgcggatgcttctgtcataatcttcattgtagttgccatccgactgagcaaagttttcaactagctcccatccttcttcaacatccttcgttagaaaattcccatttgaagcggtgtcaagcagcctccttgtctttggcaagccatgaaacttgttcccctgaaccattgcaatgagaccgcttttgatctcaaagttgttgttatgtactggaggtggaacaattccatgacgctagttgtggttgtgagggaagtcatcagcaccaatgttggtaggtttctcttgctcatctacaatgccagccattgtgtctgtttctgtctgttatctctgttggcgagcagtacggtcgatgttatcgttgaataggaggttctgatttccttgtggccgtgtatgcatgcaacatatagcagcctggctatgaaagacgaatcagagatgtgtctgtaaagagggttgcaaggtaccaaaaacacaaagacagaaaaggcacaatgttagtaacttgtgtaacaaaaacgaacttgatcttaacgtttctaatgatctaaaatatagcaaacaaacaccaaactcgcaacggcaccaaattgataataggatttttagtcaattaatcctaaaacactatcctgtcgttgtagtattttaggttgtcaatctaatctggtgtgatgcaaacagatgagatatgattagaaagctctaagtcaagccaatcagagagttggttggttctaacagtcctagtatgcaaaaacagaaatgaaatgaaactaaaagcataaatggcaataacaggcaggtgaataactaagcagaaatgataacaggcagtcaaatggataaacgattcctaaggatggggtaatcgaatagtgtggtctccttaatctattcaggcggttgaaaaaacttcacagaagctatcccaagacaacaagttcaacaaccgattaattcaatcccgtgatagaaatcctcaagcaaagctagacactgacctaattcccattagcgatctctaactaagcaggcattatcgaatcaacttgttaaagccaaaaccctctctacagccaatcccttggggtagaggcagatatctctagaattaataggatccaacgcccattaaacgccttctgagcgctggacgtctggactcatattccacattagccagtgaaacaagcaataagcgcaactaatccagaagggattctagtattctaaactcaaccacctaaaacgaccaagtaaaccacaactaatctatcccatcctcataaatacggttcactacttagacataatcaaagacaatagccaagcaacgattgaaactaataacaaaaaggcttaaacgaaaattgaatatcaaatacttgaaagtgaaaaaatacaaagtcggaggagaaacactacggctatgaaagttgcgaaatgtaaaagtggatgaaaaacgagataaaaaatgattgccctagggaaaaccctaagaggctacttatatcagggaaaatgaaacaaataaggaaactagatatatagctaatcttcacgttatgaccctgcgatcgaatgtgtcattggcatctgatgggctgatatgagcttcccagtgatcgagtatgtcattgatcaaacttggcttcagggactccgccttgcgatcgagtgagatgctgtgaagacaagattgaatggtctagcgaccctgtaatcgagtgcgatcgagtggatgtcatgaggtggctatcgagtggttgcttcggcttctcttctcttcttcgttctcagcttgtctggttgagtgcagaacgagcagataggcctcttggtgatcgagtggttctgatggggtgattcctccggcttcgcgattgagtgaaactgagctgctagcttctccggggtttcgatagagtgatttgccctggcagggctccgaggctgcgatagagtacttttgctgaatgcgtcattgggcattttgactttccgttctgtttctcctttgtttgaactccaaaagcatcaaaggtacctgaaaacaaccaaatatgcaatgtacatgcaatcctaatgcaaaatcgtcctaagtatgcaaaagacactaaaacgactcctaatgagatgaaatgtggataaaacaatgacaaagtggtgaagaatgaatgcctaaatcatgcaaattatagacatctcattggcctttgtagtgaaccgtgctatcgtggggtcttgtaacaatgttacttgatcgccatgaagtgcgaagaactcagagagacagggttagctaccctggccgagtgtctacacgacggtgtaacgtttggtagtgatgctccggttatttacctttgtggttgtaacacgggagatcacgggagtgtgtgtgtttggtgttgggattgaaggcagcatatcgggctctttaaaacttaataaaaattagagtcttaatgcattggcatatttttgtagttgcttcgacaagctaccttttgttgccattatctgttgcgtgtttcatgttgggtatttgggttggggtaaactaatgtcagttgcagggaatcccgagctcactgagtaatcttagattactcatgattcaacttgtcttgtaggaaacccgtagtgggtaatagagggcgtggtggacaataggaaacccggagtagttttgtgccttttgtaaaacaagtgtgtttctattatgtaccatgcttttggcagtaggccctggccataaaacttataaatgtttggtaacatgttgtgtaatatttatacttatgaaataaatcgggttttttgtacaaattaacgagtaatgactgataatgacttagtccgagtcggcacaacacttaaatatcgaaagggttggcaaacttaaacgatgttttaagtgtgagagttgtcgtcaatacgccggccaagggttgagattggttcccgaacctcggttggatgttgatgatcaatctcaatgtggcattttcggggcgcccgagacttgtctggtcatagagcgtctcaagggcgttacaggcagccccgcggcgatcctcaaaaggcccaagagaggtcaaggaaaccgcgaggcagatgatgacgagccagaagctgctcgggggagaatcttcacgattttgggcgattcggctttttgtcaggacacaacagcctcaatcaaagcttatcagaggaagaccgacccaatccataacttgacccgaccgttcaacggacaagatgatgaagacactttccaagagagcgatactaacggcttggatcggccgctcaatgatcccttggtcataacactgactatcggtgatttcaacgtcgagcgaattttaatcgatatagggagtacgctggacatcattttctgaccaccccgcgagaaatgaagatcgatatgaccctaatcgtaccgactccacgacctgtgcttggttactctggtgagaccactatgaccctcggcaccatcaaattaccagtccgagccaaaaaggtaacaaaaattgtcaatttctctattacggattagccaaccgtttacaatgcaattatcagcatgccatggttaaatcaattccaagccgtcacctcgacttaccatctccggatggaatttcccacaagcaactacgtgaagaccatctgggggaatcagaaaaatgcctgaatttgcctcatggcagcgcacaaactcagaaaccccatcaccgaatcaacagccgaggggaatcacgaaaaggctaagctgggtcgagctgaagaaaaagcaatctccgagcagttatagcaattaaagatcaaggaggctcggaaatcaacaaagcctgaggtgtgtttgtctcgatgatcgaggaggcctagtaaacaacatagcaattaaagatcgaggaggcccagtaatctctatttgtctcgaagacgaaaaccccgagcagtgcgtggaaattggtggagacttaggcgaagaactaacagctgagctgacttccttcctcaaggataacgtcagcacttttgcctggttgccgtaggatttgcttggagtgagcgtcgaaatcgtatcacacgagctcaacgttgatccaacctttaaacctattaagcaaaagagaagaaaattgggtcgggaacgagcggaagctgtgaaagccgaggtagaaaaacttttaagaatctactctataaccgaggcaaaatatcccgattggctcacaaatccggtagtggtaaaaaagaagaacggcaagtggagattctgcatcgacttcactaacctgaacaaagcctttctgtaggatagtttcccactgccgcacatcgaccgcctcgtagagtcaacctcaggaaacacattgttatcattcatggacgcttttgctggatacaaccaaataatgatgaatcctgaggaccaagagaaaacggcattctacacggaacaaggtatttgctaccgagtgatgccattcggacttaaaaacctcgggacttatgatcttcgccttgcagatcaggaaaacgatggaagtgtacgttgatgacaccttggtaaaatccatggaagaaaaagaacatgtagccaatttgcgcaaatgttttcaacagctcaacctctataacgttaagcttaatccggtcaagtgtcgtttcagggtaagatccggcaaattcttgggatatctagtcacccaactcggcattgaggaaaacccgaagcaaatcgaggcgttattgggaatggcatcacctaagaacaaacgcgaagtgcagcgtttaaccggaagagtcgcagctcttaatcgatttatctcgcggtctaccgacaaatgcctggatttctacgatgtgcttcggggaaacaaaaaatttgaatggatgaccagatgcgaggaggcttttcaagaactcaagaagtatctgatgctccggttgcatactttgtggttgtaatgcgcgagatcacgggagtttgtgtgtttggtgttgggttggaaggcagcatatcttgccctttaatgcatgtgcatattttttgtagtttcttcggcaagctacctttcgttgccattctctgttgcgtgtttcatgttgtgtatttgggttggggtaaattaatgtctcttgcagggaatcctgagctcacttagtaatcttagattactcatgattatacttgttttgcaggaaacccgtagtgtgaaatagagggtgtggtggacaataggaaacccgaagtatgtttctattatgtaccatgattttgtaaagcaagtatgtttctattatgtaccatgcttttggcactaggccctggccataaaacttataaatgttaggtaacatgttgtgtaatatttatacttatgaaataaattgggtttcttgtacaaacttacgagtaatgactgataatgacttagtccgagttggtacaacacttaaatatcgaaagggttggcaagcctaaacaatattttaagtgggagagtggtcgtcaatacaacggccaagggttgggatattggttcccgaacctcggttagatgttaatgatcaatctcaatgtggcgttttcaaggcgccctgtgacttgtctggtcatagagcatctcgggggcgttacaatttgtggtataagagcatggttaatcatgctacaggactcgtatttttcaaaatgttttatcgagtaaatgagtcgcaaaaggcatttaggataatctggtctgttcaccattattaggtagatgggttaagtttaccttggttgaatggatgcagatgtctggtcaaagaacggagaggagtgtgtcgataaatttctcaccagtttacgaaaactggagtcagcatttcggtccggaagactgggtaccgtatgttggaggagaaggagatgagggatactattatcccaatatgtatggagcgcctgattgggatgttcccggaaccacaccggaatactccttaccaaggtctgtgcactatagcacatctgaatgggtcacactcggggatgagaccacatgttcctgtgaatcaacataccgcacacccaaatccgtcgcagccaaaagaagttaatgaaggaaatgcggaaggccgtaatgttcaaaatgtgccagagactcaagagatgttggggatgattcagaccttgttgactcacatgattcaacaacagcaacaccaacaacagatgcaggaaagccagcgtgcagaatctcctggagaaggtcttaaaactggttatgatgatgaaggatcttggtgttcggaagttcaaaggagagcaaaatactgttttagcggataagtgtttgaggaacctggaaatgaattttgaaacttgaaggtgcccggaagactttaagggccagatagcggtaaactttttagatgcggatgttcgagcatggtgggatagtgttgtttcacgataccgcgaccagcctatcacatgggaaatgtttaagaaggagtttgagtctaagtattttccacctgggcacgtgatcgtctggagctacagtttatgagtttggaacaagggcaaaagagtgtcagggcatacgagcaaattttttcaagacttcgaagatatttgtacaatggaagggatgatgaagctatgatggtacgaaggtttttaagaggactaaggcctgaaattaggggacgtcttcaggctgtgacttataccaatgtgagtgaattgactgatagggccgtgaatgttgaagaagggattgagttagaaaagggaaacaagtttcaggagaatgaaaagtctgaaggcaaaaaggggaataatgtagaatttcagcctggtgttttgaggactaattagtcgggaggacgaaacccgaataatgatcgtgggaagcctaaggttggtaaccaaggaggacgtgtaatgaccacttacgatccaagagcctgctatatgtgcggaaagccgggacattttgcacgagattgctcaacggtcgtacagacgaaagtgccaattctggcatttgttacttgttacatttgtggggagtcagaacatgtgtcaaatgcatgcccgaataagcaagcgggactacaggataaccgagtgcgagcttgtttcatttgtagagacctagggcattatgctaacgcatgcccgaacaggcaaataaagcagtataaccaaatggttaaccacccaccgccagttcagaaagctaagggaccaccggtaaagaagcaagccactctagcaaatgtttatgccttagatgtagaacctaccaaaccttcaggacccgcaaaagttcctgtaacaggttagtatgggttcttacttttcttatttatgcgtgtttgagtgattgatcgttgtgtgcgtagtttactagattaaatattgcatacatcattttcatttgcattagggacattacttgttagtggtaaccccacacatgtattgttcaatttgggagcgacaaatagttttgttagttctgacgtggccgataagtttggccatgggtatgagaaaagagaagtgaatgttttggtacatactgcgggaaatcagccacccttgcagacccgagttgtgttagtaggagttccagtagttatccaggatacgattctacaggcaaaccttttgggaatgccgatggaaaggtttgaagttatctttgggatggattggttgtcaggatatcatgcccatttagattgtaggcggagcagagtagtgttcgaactaaggaatcgaccacgactcacttactgtggaatcaatccaagtaagattgcttcgttcgtgtcagcactaaaggttgagaatttactatgggaaggagaagtctaccttgtcactttaaccgccattggtggagaagttgaaggtgactcaaggattgaagagatcccagttgtgaacgaatttgaagatgtgttcaagcccttggaaggattacctccaccgagaaatcatttgtttaccattaatcttgaaccgggggtgactccaattacaagggcaccatataggatgccaccagttgagcttgcagaacttaaaaaagaattggaggatctactcgaaaagagatttattcgtccaagttcatcgccatggggagcttcgatattgtttgttaagaagaaagatggaagtatgcggttatgtatagactaccgaggtcttaacaacatgaccataaggataagtacccattgccacgagttgatgaactattggatcagttgagaggagcaagttagttctcaaaaattgatctagcctctaggtatcatcaaatttcaatcttggagctggatgtaatgaagactgcctttcagacgaggtatgggcaatatgaatttgtagtcatgccatttgaacttacaaatgcacctccagccttcatgagacttatgaacgaggtactccatgattatttggatagcttcgttatcatatttattgatgatatcttggtatattcacggagtgcggaagagcatcgtgaacatcagtggaaagtgttggatagacttagggaacaacggttgttcgctaagtttagcaagtgtaagttctggcaacgagaaattggatttcttggtcacagaattttaggacagggagttacagcggatcctgaaaagattgccgtaatacagcaatggtcgcgacctacatccgttacagaagtacggagtttcttaggattggcaggctattaccgtaagtttgtcaagggattttcgtcaattgttaagcctttgacccgacttactggtaaaggtgtacccttcatatggagtaaggaagttgaggaagccttcgtaaagttgaaaaagacattaacgaccgctctaattttagcattgctagagccgaataaaccatatgatacggatgcctcaagagttggcttgggatgtgtcctgatgcaagaagaaaatatgaatgcctatgcgtcacgataattaagacggcatgaggagaattatcccactcacgatttagagattgccgctgtagtatttgcgttgaaggcctggagatcatacttgttcacgctgccagacctgaatctacgacaacggagatggatggaattaatcgccgactatgatttggagattcagtatcatccgggaaaggctaatgtggtggcagacgccttaagttgccagaaaatgaaagtaaatgttggaaaggatctagagtcgttaactgatgagttaaagaaagtaaatctgttagctttagagggtgaatctagtgagcccttgggtttacaagccgtgactcaagcaaacctacttcaccgaatccgagaagaacaagtacaagatgaaaagttatagaaaattgcggaggagttaaaaacattagatagaccaaacgctagtggctaccatctagctgatgacggcaccttattactcaatgggaaaattacagtgcctgatcgtaaaggattacgacaagaaattttaagggcggcgcatacttctttattgagcattcatctgggaagtacaaaaatgtacaaggatataaggaagtattaccattggcctgggatgaagagatcagtggcaaaatgcgtaagccaatgtgattcatgccaaggagttaaggtggaacaccaagtgccggcaggtttattgtgtaacctaccaatccctggatggaaatgggagtcaatctcgatggattttatcactggattaccaacaagaccaggacgtagcaatgatgctatatgggcagtagtagatcgctagaccaagatggctatttggtatcaatgaaaagcgcaaataagtcacctatcctggcagaaaagtatattgatgaaatcttaagactccatggagtacctgctaatatagtatccgatcgagatcctaagttctcatctatattttggcaagacctccagcatgctttagggactgatgttcacatgagcaaggcattccatccgaaaattgatgggcaaactgaaaagaccatcaccgaaccatagaagatatgattcgactatgtgcactagagtgggctggtgattgggaagactacatacctttagttgaattttcttacaataacaactatcactcgagcatcggtatgtcgccatttgaagcaatgtatgggaggccatgtcgaactcctctttgttggactgaagtaggagagaggatgagttttaataatcggttgatcaatgagactgcggagaaaattcagttcatccgagacaatatgaagaaagctcaagatcgacagaaaaactatgctgaccgaaagaggcgtgaagtggaattccaagaaggcgacatggtttatcttaaggtaactgcgttaaaagggaaagatcgttttggaaaagttggaaagctcgcagtaagatttattggtccatacaaaattgagaagagaatcggggaggtaccctaccgtttgtttatgccagaagaaatgcgagtacataaagtttttcatgtgtcgcaactaaggaagcacgttccggatcctaatgctatcatacccgagccgatacaagagttgaaaacgaatctcacctttcccgaaatccctcttggtactggtgaaagaagaatgcggagataaagaatagaaggattctacaaattcaagtgttctggggaaggcaaaatcgtaaggttattacttgggcaaatgaggaaaagttcctcggacaaaatatccacagtttttcgaaccacggaatgctgaggatgaagtcggaccgtctaatccttctggaatttgggacaaattctattaaggggggggggagaatgtagtgacccgcgtagagacatcggccacaagcaagagtccaaattttagaaagttgcccgaatgcatggccaattgaccttaagtgcccaaaacacaatacactatcaaagggaaaatatgggcaagtttgggcaaaaatgggcacgaatgggcaagtttgggcaagatcgggcgtgctgcgggcaaagtttgccccaccaggcgttgaccgaccgttgaccgcgccaaggacgtgtggctcggctgacatggggcccaagcaaagttgcttggagccgaattttagttgcgttgagccgaagtttgggtggccacgtgtagctcatccgctagagcgacgagtgtgtcatcacgagcggatgacacgtggatcgctgactcgcccaagcacttgacatgtggacctgcagactcgcccttttcccttgcctatataagccgaacacgaccccgattgttttgtgaagagaaagtgagtggaagtgagaggctgccgagttgaaaccgtccgtccgattcaagttaaggtcccatagctgaaaactttgcccgaatcgttgaaaactttttgttggttactgagtgagttctggataatggtttaagtttcatattcatattctcatgtattcttgattgattttgtgagttatatggatcgtgtgaatggttatattggaatgcatatgtgatctttagattcttatgctattatttatggttgggaggttgtgttgggatattgatgattctatgtgtttgatttaaccatatatttcataatatcttaaactttggggtcttggtacatggtgattgtggtaggaggcaaagaccataagcgtgccaagatcatgatatgtctgaccttcatagtgaaccgtgttatcgtggggtcttgtaacgatttacttgatcgccatgtagtgcgaagaactcagagagacggggttagctaccctggccgagtgtctacacgacggtgtagagtttggtagtgatgctccggttgcatacctttgtcgttgtaatgcgggagatcacgggagtgtgtgtgtttggtgttaggttagaaggcagcatatcgggccctttaaaactcaataaaaattggagccttaatgcatgtgcatatttttttgttgttgcttcggcaagctacctttcattgtcattctctattgcgtgtttcatgttggatatttgggttagggtaaattaatatctgttgaaggaaatcccgaactcactaagtaatcttagattactcatgattctacttgttttccaggaaacccgtagtgggaaatatagggtgtggtggacaataggaaacccgaagtagttttgtgccttttgtaaaacaagtatgtttttattatgtacgatgcttttagcactaggccctggccataaaacttagaaatttttggtaacatgatgtgtaatatttatacttatgaaataaatcgggtttcttgtacaaacttactagtaatgactgataatgacttagtctgagtcggcacaacacttaatatcgaaagggttggcaagcctgaacgatgttttaaatgggagagtggtcgttaatacgccggccaagggttgggattggttcccgaacctcgattggatgttaatgatcaatctcaatgtggtgttttcggggcgcccgtgacttgttcggtcatagagcgtctcgaaggcgttatagacgtcctcaccgagatcaaaccgggcccttaggtccaaaagcgaccgctcagtgcacaaagatgaaccaggaggatccggtagtatcgcctttttgctcttcttcttctttttcttctcggccttctcaaaagccctctgctcggtaattcacatgatatcaactttctcatttggaccaaaataaagataatcctcgatcttcacctgcggcaataagggctcggatgtgccctgccagttcgaagtccctgcttcagcaactaccggagctcgggtccttcagagaagagacggctcggggtcctcaggcaaatctaactcccgagcgatatcggcagtagcatcttcccgagccgtgaagggaatagcctgctcggaagcatttgaagacgacaccgcgtcgccctccgacgatgtccaaaccatctttcgcttgtagataggaggaagatcgtctcggtgatttgaatcgcttgagtcaacgaggtaatcgctgggggccaaaggataggggttagagtacgaagaactcattctcggctcggaattgtctaacgcaatgaggatcggagaatagaaattttctaataggcaaaaccaaaactaactcagaagcggcggagcttcaccggaaaaagagagaattataaggaaatcaagatcagagagaagagagcaaaccttgaaatttttcttcggaaatttcaaatgagaatttctcaaggaggtggctcgatatatatagaacttttaagggcccgtcgggtccacaacaattggtgaaacgcgttaaaagcgcgtgggctcggtagagaaagatacgtctgcgtgatcctcgggaataagcaagaaacgtttccacttctcaagaaatagtcggctacacgcaacagaagtttgaccgtccaggaagatgaagcgccagagttatgatgcgggaagaggtacagtcggctcgatcacccactcatgaagctcatcacctcttcctctaaagtcaatgagctggagggcatactgttggagtcggatttcacccaggtaaccgagccgatcagacagatgccacaagtgccgctagagctaaatttgccgtctccccgaggcgggaacgttatcctttatggctcgggcgtcactccagaaatatacccgagccggtcctcgaaacacctcgggcaaacatcacccgactcggtggttatcccagaagatgcttgagctgagtttgacaacgatccgaggactggtttgacctggctcggatgaactcttggcccgagccaaagacacacgtacgtccgaggagaagacttgtgaactttgaaggggccaaaatatcatttccggaaaacctggaaatgatattggagaatctccgaggatattatcaaatctggaaatcttcctgatgttcccgaagaataaggaaaatctccatttatgaaagatcttccatcgccgactccgagataaatgaaaatcttccaagaatatcgcgagagacggtttatcaaagacctatataaagcgcctaatagaataaagaaaagggggagagaaaaaaggctctcaacttcaggctattaaaacgctctgactttctaaacacttgtacgatcgaatcatcatcttttcaataataatatcaagaacaccgtccgcgttaatcgaataattctgttgttctttgagagtctcgcaaagatctgctctttgaagaaaccctaaatacaatttcggttgtgtgagtttcgactctcacaatctcctcctccaaaacctcaagatttcatcaataagagcttaagatttcaaaaaattgttttacggttaagcaagctacgagtttctcgtcgagcgcttgttcgttcttttgatgattgtgcaggaaaagaagtattccacccatacctaagtcccaccctgctgatgcttttgtcttcctagatagacctcatgcgctaactgcttatacgccagcatggatgatgagaggtctttctccgcgatatttactgctaccttttgatctagcttaaaagagttcgacattaaaaagatagatgagtttataatgaggaaatacaagagtttaaatagagaagaagagaaggggaagagttagtcttggaacaagctccaagataactcggaaaaggagaaatcataaatgaaattttgaccacaaaatagacccatggccttccaaattcgtggtcctcttagtgggcttgggccggattgataagggaggatttggaagtgttacttaggcctcgttaaaaacctactaaggaaaacccaatgggacaaaaccttagcagggaaaaatagcacccaaagcaacacttagcccattaccaatcgtcttggaaagatattgcaaccatcatggttcatgtccaagtgtttgggtagtccgaaatagcttggttgagaagtttggtcttcgagcgagtcatttgtcttcttggttcggccaacgcttcctccactacatgctgctcctcggctccaagttgttcctcggctataagctgctccgctggttcaagtttcgggtggtgctcgggaatagtcatatcatgctccccctcttcaaaaggatttgcccttaaatccgtttcacctacatcaaaaggaaaaatttaggcacaacgaacaagaaaaagcataaatggacattagcaaagtagtattttagagtggagcatccttttgcaattgtggtcgtcttccttaagtacttccaattccaaactccaaagagatgcgtccttgcttcacttgctttacttgctttcatttcggaccaagcttgatccatgtcttcttttgatccataatcaaaaggattagggaaaccataactcttcctaatgtttaaaatcgcatccttaaccggtttttcattatctttcacaaacactaaaggaaacacattaaatgtgcgtgagaaaccaaatagctccctatgaaaatgtttaaacatgctttcacaacctaaaacatttgattccaattctaaatgaattccactttcatagaatgatccaaaaacacaaaaatcagtttaaagcgaaattttcacacaagggaacacttcatacaacttaggttcatttcgagctctaataagattagatatgctaccaaactcaaaaacactcaaagaggaattaatttcatgcaagtcattagctaaaagatctttcggttttaaaatagtttcaagtgtgaggttttcaaaggtaggaatcatgtcgctaaacacaggacttgaaactctaaattcctttactttttctaaaccaaaacgtttttcttcttgagtagaaaccaacacaaaccaagtaggctcctttctaaataaatcaatttccttatagtgcttttgttcgtattcatttgacttaaggattggttctgtaatggagatagtttgttgctccaaatcggtaacaatcgatgacaaactcctttgaccttctttttgagatctttcttcaagaacctgcgaaaaacaagacatactactcggttgcaccggctttgaaaagattagtttttcacaagcttgattatttcaagcacaaaatcagttttctcataaagatcacaagtatctttggtaaattcggaaggaagagcaatcttagctttttttgaattagaaggaagaggatgcttggctttcttcagtttgttgtaagcgttgagaatcataagaagctcatcctttaactgttcatttgaggatagactttcctttcggttttgcttcatggtcttaacttctttcacatcattaggttgttgtctagcttgctcaaaacgtctatgatcatcacgaatatagtagtaacaatttgattcatctttggttggtctactcctccaattatgcttctcttggggtctatttggttttgcctctttttgatgcgagatctgctcatattgctctattcctttgagttggtcgttgatcggcttatgtttggcatcaattattttctccatttgtaacgtgatagcatcgatgatggcttggtcattaacactcactcccgagcttgatttggatgtcaccattcctgccaacaaacaacactaaaccagtcactagttcaaggagaatatcaaacgtttttctaagaacaggcaaactagatcgaacaaaataaattatcaaatcatgctcaaaaattccagaaacaattgtataaattactagactcgtcctagattcagatccaattgatttcgcaattttatcccaagccagttatttatgaaaattaaagcaagatgacagcgaagatgaaaagacagatgagaagatgaacgaacaaaatgaaatgaggtgatgaaatgatgaatagaataaaacgaaatgatgaagtgatgaaaggatagagtactcaacttcagaatgtgctctgataccacttaatatgatttccctaagatcgacactcttgaggttgagtaggggatagactttgcatctaagagatcatgagatcactcaaaccaaaggatatggagcgaatggtcacacaaaggatgcggatggcctttgatataccttcgatctagcttaaaagagtttgagattaaaaagatagatgagtttacaatgagaaaatacaagagtttaaatagagaagaatagaaggggaagagttagtattggaacaaactccaagacaactcggaaaaggagaaatcataattgaaattttgaacacaaaatagacccatggttttccaaatttgtggtcctcttagtgggcttgggccggattgataaggggggatttggaagtgttacttaggcctcattaaaaacctactaaggaaaacccaatgggacaaaaccttagtagggaaaaagagcacccaaagcaacacttagcccattaccaatcgtcttggaaagatatcgcaaccatcatggttcttgtccaagtgtttgggtagtccaaaatagcttggttgagaagtttggtcttcaaacgagtcatttgtcttcttggttcggccaaagcttgctcctcggctacaagctgctccgctggttcaagttccgggtggtgctcgggaatagtcatatcaggtaagaatgtttcccatcaccccattgttatacattattaggaatgatcaattataaaggttggatatatttcgagggtgtcaatccagttggcgagttcccctttgtttactctttaaaaagaataagttttgggggagagaaagaataccaaaataaaagaaaatataaagaatggtcaatttatcatagtatagtaaatgaataagtctagaaggttcttgaatattagcttgtttgatgagacccagcgatgaaagcatggtggatatagttgtggaacttaggtacggaatctagaatgttgtgtaagcttggagagaagtacatgttggttaggatttgaatagaactgctaggcatatggatttggttagaatgatcatggcaataggctagagaatgttgggagttcttgtgttttcaaacctcttccacgggttcagcttttgtgttttgcttgagggcaagcaagagctaagtctggggagttgatataaccctatttttactgttttaactatgttttagatataggattttgagtctttttgttatttctagagtcttttctagtgttttacaggtctttacatgtttgggattcatttggagataatagagcattctggagaaaacaaagaatttatgctgtagaagaaatccgaatactaaaaatcgcgtaggtgtcgaacgacactaatacctgacggcaattcaaagacgcaacttattgaagttttgaagatttccaaattcggcccagaactttcccttatttctaaagaaggcccatcacgttttaggtcatagatatataattttaaagttcattatttagacctaagcttggagaggctaatctccttatctcttttgtacttgggagcaaaaccctgtggagactcgctagagaagatctttcttactctttcttttgttattttcattattgatttcttattcagactttaatttgtgttcctttgatcatgtttgagtagctttcttgttaggtttagggtttctcattaaggatttagatgatttagtagattgcccccttgctaggttatctgttaggattctttatcttagttgttcttgttcttaatgctagttctagagtagctaactagaacttgattccagataatagatatacccgccataagtatcttttatttgatgagcctgctctataggtgtgtaataagaatcggcctatttactaaggtgactttattgaattcgtttataatgcatgattaagtataagatttctcggcttctctggttattcttagctctaggcatagggagtttcacggaccgccaccggttattccacaataagagttagagtttatgaacggtttgataacaacctagctatcactagatatactaatcatctaccctaagcctgactatttttccatctaatttacatcttgatatttattgcttttctttgcttcttaatttataatctactggtttagcttaattcgatatccatatagtctattgtgtgattcgagagctttgtggaattcaaccctgaagtactacaatcgatctcttatttgagagagtggtcttaaggcaatttgacctacattagaactgttcggctttgggtctttttttcttctaaaactcttaaaaccgtcttggctcgcaaaatacatgttcatctccttcgtggctctaaaatagcaccaaattgtctctgaaacataagaaaacaatacctaaaacgggctaaaatgctgtgttatcacctgtttgaaaacccaaaaccaaaaacacaaaggtactttagctacagcatcaaagctttgagaagtaagaaaaagctttattacggtttttgtattcaaatatgattagatttcatttgtatgattgtatataaggactagaatcacaaccaaatcgcgaaagctaaagtagtgtttccatgttagaagatccaaaacggaaaactcaaaggaactttggcaacacggtcaaagctttgagaagcaacggaaaggttggttagcgttttaaagtcaaatatgactaaatgttgtgtatatgattgagtataacaactagaaccgcaagcgttcccgaaacttaaagtagtgtttccctgttagaagatccaaaaccaaaagctcataggcacttcggcagcaccatcaaagatttgagaagcaagaataaggttggttagtgtttttggagttgaatatgactagatgtcttgtgtatgattgagtatatgaactagaaccgcaaccgcatcccataagctaaagtagtaattcctggttacacgatccaaaataaaaacacataaggacttcggctacaccatcatagctttgagaagcaagaagaagcttggttggtgttttggagtcaaaaatgaccaaaatgtcgtgtgtttgattgggtatacgaagtagaaccgcatgtggaacacaaaagctaaaaggtctaataccaaaaaatcatagagactttgttagcgtcaaagctttaagaagcaagaagaagcttctttagcgtgtttggagtcagttttaactagatcttgtgtgtatgattgagtataagaactagaaccacaaccggatcctgaaagttatagtaatgtttccctgttagcatttttggagtcaaatatgactacatatcgtgtgtatgattgagtatgggaactagaactgcaattggatccacgaaactatagtagtgttttcctcttagaagattcaaatccagaaactcatacggacttcgactacaccatcaaagcttcgaaaagcaagaagaaggttggttagcgtttttggtgtgaaatatgactagatgttgtgtgtatgatagagtataaaaactagtaacgcaattggatcccaaaagataaagtagtgtttcattgttagaagattcaaaaccaaaaacatcatacggactttggctacaccatcaaagctttgagaagcaagggaaaagttggttagagttttggagtcaaatataagtagatcttgggaaaatgattaaatataagaactagaaccgcaattggaatctcaatggtaatgttgtgtttccctcttaacagatccaaaaccatattatcattggtacttcggcaacaccatcaaagcttgagaagtaagaagaagcttggttagtatttttggattcgaatatgactagatatcgtgtatttgattgagtatatgaactagaaccgcgaccgcatcccataagctaaagtggtaattcctgattaaaatatctaaaggaaaaacacgtaaggacttcggctacatcatcacagctttgagaagtaagaagaagccttgttggtgttttggagtaaaaaatgtccaaatgtcgcgtgtatgattgggtataagaattgtagaaccgaatgtggaacacaatagctaaattagtcttttcttgttaaaaggtctaataccaaaaaatcattgtgacttggttagcgtcaaagcttgagaaacaagaaaaagctgggatactgtgttttgtgtcagttataactagatgttgtgtgtatgattgggtataagaattagaaccgcaaccggatcctgaaagataaagtagtgtttcctttttagaagatcaaaaaccaaaactcataggtatttcggccgcacgatcaaagctttgaaaagcaagaagatgctttgttagcgtttttggagtcaaatatgactaaacatcgtgtgtatgattgagtataggaagtagaactgcaatcggatccacgaaactatagtagtgttttcctcttagaagattaatatacctcgatttttactggttttagctatgatttaggtatagtttttagagtccttttgttatttgtagagtcttttctagtcttttttagatccttacatgtttgagatgcatttggagattatggagcattctagagcaaaacagacaacttaagctgcagaagcaatccggagacaaaaattgacgtaggtgtcgatcgtcacaacccccagtgtcgagcgacaccaatacctaaaaccaattcaattgcgcaacttattgatgttttgaagatttccaaatttggcgcataactttctcctatttgtaaagaagtccctgcacgttttaggtcatatatatatagttttaaaggtcattgtttagacctaactcttattatttattctgtacttgggagaaaaaccttgtggagactccctttagagaagatctttctaaactctattctcttattgtttcttacattgattttttattcaatcaagatttgttcttctatgatcatgcttgagtagttctattgttgggtttagggatttggatgaattagtagatcgaaaaccctgttaggataatatttttagaattcttcatcttagattgttcttaatgctagttttagagtaactaactagaacttgattttaggataatacgtatgcccaccataggtatctattactggaactatcttagatgagcctactatttagatgcgtgctagctttgattacttaggtgaacttatcaaacctgattataatgcttgcttagttctagggatttacaagagagttgggatcaatactattaagcatagtaagtttcgcggaacaccaccggttactttatattagtgatttgtgttctagaatggttcgttaataatcctagtttactgctagatcaactattctgatattttcttagaattttcctaaacccgacgtcttaatcatctgaatctacaaccaattttaattgctttcttgtcttttacttttacaatattttctgtttagctttattcaaaactgttaatctattgtgtgatccgagaactttgtggaatttgatccctaagtgttataacaacctctttatttgagagagtagtcatttgggtaatttgactcatattaaatttggcgcatttgccggggatttttcttcgattcaccattagattaggtgtagaatttagtttaagcttttcttttcttttgttacttacgcgtttttatttctttttcttcttgtgtttcagaagtttaaagaattcaaacgcaactcaagattctgatagtaatacctgatgctgctggagtgttacgcgacaaagcttgtcagcatacaacgaagagggtcagaaaatagatgaacagtgaaacctgataccagaaatcgttgatggtgtcgatcaacaccatatgggtgtcgctcgacaccaagaagaaatcagagcagatggtcgtcggaggactcttgatgactacaacagaccggatctcttctattccaatcggtctgcaatccgaccacctacattcgaaagaagcgattttgagataaaccctgctttctatacactcttgtgagtacccacccttttcatggtctagcacaagatcatcctatcgatcatattgagcagtttgaagacttggtttcgagtattaaggcagaaggtgtttcttctgactaccttccctgcaagctcttcccatattctggggatgcatcttcttggcttaagcagttgaagcctggatctctgacaacttggaaagaaataaaggttgcttttcttaacaacttttataatgatgcaaggtccgaggagctgagaatgaagatctctatcttctctcaagaagcagctgaagaatttaaagccgcttggatcagattcagagcattgacgttatcagatggcattggatgcagctagtcatgggaatttcatgtcaagatatccagaagatgcaacaatgttgattgacaacttagcttccaacattagtaccaaaagtgttgacattgcaaggaaaacgcaagttcagtatgttgcacatgttgacagtttagccacttcagaaaagatggatcaacagagatacatgagcttcaatcagcaatctacacatcaaaaaccggttcagcaaactacaagcttcattcagaatcatgcttcttcaacacaagcccaccctccacccgacaccactaaaacgatcgaatctatgctcgaacagattctcaaaggtcaagagaagcaaacaacagattttgatcacaaaactggttgcattatccgacgatgtgaatgggaagattcaaatattgaacaattggatcaagcaattgactacaaacaaagaagatgttcgtgctattgacttaaggagtggaaaacagctaaatctagtgcttcaacgagagcttcctgcagccaaaattgtcaatttggaagaaaatgatgttgcagtttttgcagactagacaccagtgtcgatcgacaccagccaacacagacactatagaacccgacagtgtcaacctacatcaattgtgtgtcgatcgacaccaacccagtccagccttgcgaattctctaaaacccgatttcagctgcagcaaaggtaaccaaacccaaggttccttttcccaagagtcctaggaagtccaaacaagagcttgatgatgctagatgcaaagttatgatggataagctgattgtagagatgccacttatagatgctgtgaaatcttctcctatgatcagacagtttgtgaagaggatcgttactaaggatatgcttactgagaccgttgtgatgacgatgtctacacaggttagcgacattattcagaacaagattccacagaaacttccagatcgaggtagcttcgttctcaattgtggtatccttaacgagagttttgatcgatgcttgtgcgatcttggttctagtgtcaacttgatgccctgttgagttgcgctccggcttggtttgacagatttagagcctacgcaaatcactcttgttcttgctgatcgatctgttcgtagatccgatggtatcatatgcgatgtccctgtacaagtcggtactagctacattcctacagatcttgtggttttatcttatgagaaagaacctaaagatcctctaatcttgggaaggcctttcttagtcacaactggtgccattattgatgtaaggaagggcataataggcttgaatgtaggtgatcttacaatgcagtttgacatcaataaggtggttaagaagcctaccatcgatgggaagactttctatttggatactatctcttttttggctgatgaatttctcatgaagatgacacttgctgttcctttgaagcatgctctgattccctcaatagacaaagttcccaaagggtatggtaagctgctggataggattgagcatgtaatgcaattggttgctcaagaggagttaattggcacatcttcccaagcagcaacaattggcgattggagcctagaaaaagctcctaaagttgatctaaaaccacttcctccagggctaaggtacgcatttcttggtgaaaactctacttatcatgtcattgttaatgcttctttaaacaaggtagagctcactttattgctaagcaagctgcgcaagtatcgcaaagctcttggctattctcttgatgatattacaggtatctctccagacttgtgtatgcataggattcacctcaaggatgagtctaagccctcagttgagcatcggcggagactaaacccgaatctcaaggatgctgttaagaaggagatcatgaagttgttggaagttgggatcatctatcctatttaagacagtgattgggttagtccagtgcatgtggttcctaagaaaggaggtgttagagttgttaagaatgacaaaatgagctgattcctatacggactgttaccgggcacaggatgtgtattgactgcaggaagctgaacgctgcaacaaggaagaatcattttcctttacaattcattgatcaactgctggaaaggttatctaatcacaagtactactgcgttcttgatgggtactcaggattctttcagataccaatccatccagatgatcaggagaagaccatgttcacgtgtccctatggtacttttgcttatagcagaatgccatttggtctatgcaatgctcctgcgatatttgagagatgtatgatgtcaatcttcacagacatgattgagaatttcatagaagtctttatggatgacttttctgtttatgggtcttcatttgaagcatgcttggagaaccttcgcaaagttctagctagatgtgaagagaagaatttggttcttaattgggagaagtgtcatttcatggttcaggaaggtatagttcttggtcacaaagtttcaggtgctggtattgaggttaataaagccaagatagaggttatgacaagtttacaggcactagatagcgtgaatctgtgaggagttttcttggacatgttggattttacaggaggttcgtcaaggatttcagtaagattgccaggccactaacagctttgctttgtaaggatgtgaagtttgacttcaattctgagtgtcatgatgcttttaatcagattaaaaatgcattagtgagtgctccaatagttcaacctctggactggaatttaccttttgagatcatgtgtgatgcaggtgattatgcggttggagctgttttgggacaaaggaaaggcaataaactacatgctatccactatgcaagtagaacacttgatgatgcacagaggaataatgcgacaacagagaaagaattgttagcagtggtgtttgcttttgacaagtttcgctcttatctggttggttcaaaggtaattgtgcatacagatcattcagcactcaagtaccttatgcagaaaaaggatgctaagccaagattactacgatggattcttcttcttcaagagtttgacatcgaagtacgggataggaaagggattgagaatggagttgctgatcatttatcaaggatcaaggttgaagatgacattcctatcaatgattttgttaggaattatgatctctctttcgagtttattgcttgaattgcttaagtactgcagtttcaaatcaatccgactaatgaaaaatccagaaggccaaccaacaaacttaaggacatccattcccaacataatatacagaggctggagctaatctcattgctcttccttttacctcatcaaaacagttagtgttcgtaggacttgactcattgttcatacatgataaatcgactaatgtgataaaaagaaagtattcctctcccttgaaagaaaaaaaatatatatatatatatgtataataatgagagattgacatgattttcagatactgtataggggtatgaatgtttcctatgaccccattattatacattgtttgaaatgatcaattacaaaggttggaaaaatgtcgagggtgtcgatccagtatgcgagttcccctttgtttactctctaaaaagaataagtctgggagagaaagaataccagaaataaaaagaaaatgaatggtcgatttgttatagtataatacaggaatgagtctagaaggttcttaaacattaacttgattgatgagacccagcgatgagaacctaatggatatagttgagtgctttggtatggaatctaggatgttgtgtgggctagcggaaaattacatagtggtcaggatttgactagaactgtttagtgcatggattaggtttgtatgatcagggtaataagctagagatattggaagttcctatgtttttaaacctcttccacgagtttggcttttgtgtttgacctgagggcaagcaaaagctaagtctggggaagttgatatacctcgatttttactgcttttagctatgatttaggtatagtttttagagtccttttgttatttgtagagtcttttctagtctttttcaggtctttacatgtttgggatgcatttgcagattatggagcattctggagcaaaacagacaacttaagctgcgacaacaatccagagacgaaaattgacgtaggtgtcgatcaacacaatccctagtgtcgagaaacaccaatacctgacggcaattgaattgcacaacttattgatgttttgaagattttcaaattcggcacagaacttgttcctatttctaaagaagtccctgcacgttttaggtcatatatatatatatatatatatatatatatatatatatatagttttaaaggttatcgtttagacctaactcttattatctcttttattattgggagcaaaaccatgtggagactccctttagagaagattcttctaatctattttctcctcttaatttcatcattgatttcttattcaatcatgttatgttcttctatgatcatgcttgagtagttctcttgttgggtttagggattctcattagggatttggatgaattagtagatcaaaaaccctgttaggataaaatatttagaattcttcatctttgattattcttaatgctagttctagttagttctagagtaaatagctagaacttgattttaggttattagggatgcccaccataggtatctaatactgaaactattttagatgagcctagtatttagatgcgtgctagtgtccattacttaggtgaacttatcaaacctgattataatgcttgtttagttctagggatttacaagagagttgggatcaatactattaagcatagtgagtagcacggcacaccaccggttactttatattagtgatttgtgttctagaatggtttgataatatcccttatttactgctagatctactattatgatatttcttgagaatttccctaaacccgacgtcttaatcatctgaatcgacaatctcttttatttcttgtcttgtcttttacttttattacattctctaataagctttattcgaaactgttaatctattgtgtgatccgaaaactttgtggaattcgatccctaagtgctataccaacctctttatttgagagagtagtcattagggtaatttgactcatatcagcccttatctggttggttcaaaggtaattgtgcatacagatcattcagcactcaagtaccttatgtagaaaaaggatgctaagccaagattactacgatggattcttcttcttcaagagtttgacatcgaagtacgggataggaaagggattgagaatggagttgttgatcatttgtcaaggatcaagtttgaagatgacgttcctatcaatgattttctacttgaagaaagtatctacttggttgagacaagtttgtaggaaaatcatggcagtgtcaattcacgtgcagatgagagttgcatagaatcagtgtcgattgacaccacacacctgtcgatcgacaccatcgcgtttcacagacagatggttctgcacaattagtgtcgatcgacaccagatgctgcacatagccgatatgtttacacatcgcctttgaaggcgagattgcagcataagtccaattttcctccatccaagtcctgaactccaaccaagtcaagctattgactttaaacaagcgcttagtggaaggtaacccactgatatgttttttttttcttttttttttttttcttttttttttcttgcttactctggatttgaatgccactgaggacagtgacgtttaagtctgggggaagcagttattaactacgtttttctttttgagtcttattcttactcttctttttcttatttttgagtcgtttcattgagtcaaaacttttctctgaaattatgatctctctttcgaatttattgcttggattgcttaagtattgaagattcaaatcaatccgactaatggaaaatccagaagaccaaccaacaaacttaaggacatccattcccaacttaatccataaatgatggagctaatctcactgctcttccttttacctcatcaaaacagttaatgttcgtaggacttgactccttgttcatacctgataaatcgactaatgtgataaaaagaacgtattcctctcccttgataaaaaaaatatgtataataatgagagattgacaggattttcagatagtgtataggggtaggaatgtttcctatgactccatcattaaacattgtttgaaatgatcaattacaatggttggaaaaataccgagggtgtcgatccagtatgcgagttcccctttgtttactctctaaaaataataagtatgagggagataaagaacaccagaaataaaaagaaagtgaatggtcgatttgttatggtatagtacaggaatgattctagaaggttcttaaatgttaacttgattgatgagacctagcgatgagagcctaatagatatagttgagtgctttggtatggaatctaggatgttgtgtgggctagcggaaattacatagtggtcaggatttgactagaactgtttagtgcatggatttggtttgtatgatcagggtaataagctagagagattgggagttcctgtgttttcaaaactcttccacgggttcggcttttatgttttgcttgagggtaatcaaagctaagtctgggggagttgatatacctcgattttcactgcttttagctatgatttaggtatagtttttagagttcttttgttatttgtagagtcttttctagtctttttcaggtctttacatgtttgggatgcatttggagattatggagcattctggagcaaaacagacaacctaagctgcagaagcaatccggagacgaaatttgacgtaggtgtcgatcgacacaacccctggtgtcgagcgacaccaatacctaatgccaattcaattgcgcaacttattgatgttttgaagatttccaaattcggtccagaactttctcttatttctaaagaagtccctgcacgttttaggttatatacatatattttaaaggtcattgtttagacctaactcttattatctattctgtacttgggagaaaaagcttgttgacactccctttagagaagatctttctaaactctattctcttattgtttcttacattgatttcttattcaatcatgttttgttcttctatgatcatgcttgagtagttctcttgttgggtttaaggattctcattagggatttggatgaattagtagatcgaaaaccctgttaggataatatttttagaattcttaatcttagattgttcttaatgctagttttagagtaactaactagaacttgattttaggataataggtatgcacaccataggtatctattactggaactatcttagatgagcctagtatttagatgcgtgctagcgtcgattacttaggtgaacttatcaaacctgattataatgcttgcttagttctaggaatttacaagagagttgggatcaatactattaagcatagtgagtttggcggaacaccaccggttactttatattagtgatttgtgttctagaaatgtttgttaataatcctagtttactgctagatcaactattctgatatttcctgagaatttccctaaacccgacgtcttaatcatatgaatctacaaccaattttaattgctttcttgtcttttacttttataatattttctatttagttttattcaaaactgttaatctattgtgtgatccgagaactttgtggaattcgatccctaagtgctataacaacctctttatttgagagagtagtcattagggtaatttgactcatatcaaagattcaaatccaaaaactcatacggacttcgactacaccatcaaagctttgagaagcaagaagaagcttagttagcgtttttggtgtgatatatgactagatgttgtgtgtatgatagagtataagaacttgtaacgcaactggatcccaaaagataaagtagtgtttccttgtcagaagattcaaaaccaaaaacatcatacggactttggctacaccatcaaagctttaagaagcaaaataagctagaaccgcttatttgggagtcaaatatgagtacagctttggtaaatgatttaagtataagctagaactgcaagtggatcctcaaagctaatgttgtgtttccctgttaaaagatccaaaaccaaattatcatagggacttcggccacaacaacaaagctttgagaagcaaaataagctttcttagcatatttggaatcaagtttggttagtagtcgtgtgtttggttgagtatatgaactagaaccgcaaccaaatcccagaagctaacgtagtgtttccatattagaagatcaaacaccaaacaatcatatggacttgggtgcactatcaaagctttttgaagcaagaagaagcctaatgagggtttttggagtcgaatatgactagatgtcaggtgtacgattgagtataagaactagtaacgcaattggatccctgaatctaaagtagtgtttccctattagaagattctaaaccaaaaaatcgaaggaacttcggccacaccatcaaagctgtgagaaccaaaaagaagcttggttagtgctttagaagtcaaaatgactatatctcatgtgtatgattgagtataagaactaaaaccgtaaaagaatcctgatagctaaagtaatgtttccttattaaaagatctaaaacccgaaactcgtagggacttcaactacaccatcaaagctttgagaaataagaagagtcttggttaacattttggagtctaatataactagacttcatgtatatgattgagtataagaactaaaaccgcaaccggatcccagaaggtaaagtagtaatcccttgttagaaaatccaaaacaaaaacgcataaggactatggctacaccatcacagctttgagaagtaagaagaagcttgcttggtttttaggtgtcaaatataactaaatgtcctgtgtatgattgattataagaaccgcaattggatcccaaaaactaaattagtgtttccctatttaaagatccaaaaccaaaatttcatagggactttggctataccattaaagctttgagaatcaaaaaagagcttggttagcgtttttggagtcaaatatgactagatgtcgtgtgtatgattgagtataagaactagaacttcaaccgaaacaaaagctaaagttttgttccctttaagaagatccaaaaccaaaacctcttaggtacttcagccccaccatcaaagctttgaaaagcaaaaaaaccttggttagggtttttggagtcaaatatgactagatgtcatgtggatgattgagtataagaaatagtaacgcaacttgatcctagaagctaaagtagtatttccctactagaagatgcaaaaccaaaaactcaaatggacttcggccacaccatcaaaaaaagctgagatacaaaaaaagtttggttattgtttgtagtcaaaaatgactagatctcatatgtacgattgagaatatgaactaaaaccgcaataggataccgatagctaaagtaatgtttccctttaagaagatccaaaaccaaaagctcataggaacttcagctacacgatcaaagctttgagaaacaagaagatgacttggttagcattttggagtctaatataactagatcgcatgtgtatgattgagtataggaactaaaaccgcaaccggattcgagaaggtaaagtagtaattccttgttagaaaatccgaaacaaaaatgcataaggactacaactacaccatcacagctttgagaagtaagaagaagcttgcttggtgttttggaatcaaatatgactaaatgtcgtgtgtatgactcagtataagaactagaaccgtaacaggatcccaaaatttaaattagtgttttcttgttaacagatccaaaaccaaaacttcatagggacttcggctacaccatcaaaacttttagaagcaagaagaaggttggttagcatttttggagtcaaatgtgagtagatgttgtctatatgattgactacaagaactagaaccacaatcgaatccccgtaactaaagtagtgtttccatgttagaagatccaaatccaaaagcatataggaactctcgcaaaaccatcaaatctttgagaagtaagaagaagcttagttagaatttttagagtgaaataagactagatgtctcgtgtatgatagagtacaagaattagaaatgcaatcggatcccatatgctaaagttgtgtttccaggttagaagatccataaccaaaaacgcaatcggttcatattctttggtttctggaagagagttaaggagagtgttcgtaacagagaaatagagagttagtgtagagagtgatgggtgatcaaggaagacgattcccaacgagatgtcgatcggggaagctataaggatgggtacatcaaagactgctaaaaatcctggaagattatttcattagtgtcataatggatctgttgaggtaatttcaattttcatatatgttttattgtgtttgaaacattattatgaatttcgttttgtgttagagagtcagtggtataacatgtttactctttctctcattcgaaacaatgaacccgaaaacataattttaattttttttcccatactaaaacgacgtcgtttcctcaatacgagttaaacgacgttgtttttaaaatgcccaaatgtcatgccatcgacctgttgtcgctgactcacatttgttaaagatcaactaacaccgttaaaatttatattgaaattggctaatttaataaaggttatgttttcaatttcaattttatttcggttcaggttgaaatagactggggggtctgaatcttaggtttttcccagcaaaagtctgggttaataaaggttatttttcccaaaagctttgtgaagccagaggaaggttggttagagttttggagtcaaatatgactaattgtagtgtgtatgattgagtataagaaccaataatttttaaactaagtttaattctaaaatcttgtggtgtttgcaattgatccctggcaacggcggcaaaaatttgttacgggtaaaattcctataacaagtttaccctaaattaaactgtaaatccacatgaaatcatagtagtatttagggatcaaatccacaaagatcaagaaaacacaaaaaaagacttacaaagaatgaaactaagcttgtataaaaaggagtactaagaactcaaaggcgttttgcaaaaggaaaagaatacataatataagaaatagagttttagagaacacatcatagatatatagtaaagccatgctagaatagattaagatcatgtatgattctagatttctattacaaattaccctatggttaagtgatattatcatatgaaggatttcttcacatcataagtgaagaacgactacttactttatgagaggaaataaatcaaacattaagatcacattttaatagattctaaaaaaacaaataattgtcctcaagatttgcctttaactagattgatccacctcatccaatatccttttgagactagaggtgattttggttttaacataattgtagtgtttcagcctaagctttaaaacacaatcttagagttagtaaacaatagaaacatagcaaataacctgcactctaggtatcaaaacacatctttgttggggttcttcaactgtcgtaattgaaacggtaccaatcctaccgatcggtatactccataataaagctactcattcatgatcaaggtacatcttatctttgtagagagaggatcatgagtactaaaggagttttcctcgagagatcaacaaattaaagcaataaaataaattaaagaagattaaggaaggaaagaacactttacaactaaataaaacgtaaaagtaaaaaccttctatgcggctacaaataaaggagtatatatcaaagggacgtatgcctaaaagagatagaggctattaataataaaagctcatagattggtggacagacccaactgattggcagaacagttgattcttcactagttggcgcaaaacctttgccgaacgggcctgaccttctcttcataagctatatttcagcctattttgttcttataatgctcattttagttttacagaattcctaaaaagccttataaacacgaagaatggtttgttctttgataaaagactaaataaaacaagtaaaacctatcacttagcagtggttggttcaaagaataatcatagaatattatttggtgcaaagtgtcttcggaggtgcccttccctctacaatcggagttggaagctttaacttggaatgaagaattttctttcaagaaaagattagttgtcatgaatttgtaatagattgttctaccatgctctgtttttctcttatgtattctctttatttgatttattataataacgacgtaagaaaaaagaaaagaaaaaaaaaacagattaatttagttttatggaattggtgactgcagattttctgaatctggctgaatgtcttaccatatagactcataatgatccaaatgagtaaaattcaattaatattataagtttataacttcgtagaaaaaggaaagaaaattaaaagaacatgaatgacaaaagcatataaagaaaaactggaacttcaaattcgaattacataaaaatttagacctcgagctgagatcacgtcaaactagattgttactacatatatcctctctcattgtttgtaaccttgcaagtcttcccaagaaatacttaaacgtgtatggatatgacgaatttcacgtaagctcgtatatcttccttacaaaggcctagtatgtcgtcctcttgcccggccgcacaaacgcgaattcttcgggatagggtactcatctctcaaagacgtagatgacgtgaagacacgtaagtaaagttgttgtcccaagtactgtcttgcccaaaattctgatcttaagttccacattccaacgttgtctaatgcaatgtatatggctgtccatgattttgggtacacctgaattcccgtaaatggataatgtttataattagaacaagaaaacacaatgtgttaatttgacaatgaaagggggaaaaaaaaagggctcacttggactgtggaacgtgaaactgcatcgcgtaaattataaccatttctgcttcctgtcttccactgtccaccatccatcctgcagttgatccaaccacaacacactttgtttaactcgtaagaaaacaaagaaaataataaatgaagagcgtgaaaatagacagacatacccgaccacccaaaaggagtaaccattgagatgataactttggacgatatcttcttggttctcgaatacaatctcgataaaggttcgatagtcgacttgcaaaactgaggtgtcaaggtataaacctccatatgtgggtttgtctgagatgctgttgatcttatagacaccgctaatcttgaagaagtcagccagttttagaggggtatcagctggcacaaatgacacactattgacaccatatctttgtttcccgtttatctgtccggctgaactaccgaacacaattgtcctaatgagcggtataagaccataatggtatgagccttgcgggtttggtcttggtccactagctgtcaaattggttctacgaaagaaaaattattcatagcacttattggagaggagcataaaacacttaatcacatatgcaagaaagataagtacctgatggcacgtgcttggttcaaggaccaatcaacctgaatagtgggaccgccaggaataggaccagaagcaggggtagacgagccactgtagcgaagaaccccggtggtggttatgattttatccgtgaatcgagacgaaacaaccacgtagtagtcacgaggagattggtcagcagtaattagaacggagtaagactggccaacgtgaacgtcaagagaggaaaacatggtttgaagtgtgtgcgtcccttcgacttccacaagctt

SEQ ID NO: 1182 - DNA, 55021 bp, Arabidopsis thaliana
tcgaatccttactcattgtagaattttgtggaatcaaattttcattggagttgtcttgtgtcacctttcaggggttggtcaaagaaaagctggccttttgactcgatatatgaaggtactttaataatcaacttatataccatctaataaaacataacatgtggtttttgttctacataattttgatttataaatgtacattttgtatgcttcattgtacactttcaggaagtccatgcacctgttcttagccattggatagtcaaaatagtggtcattgccttcttctttggcttagcaatggctggaattgtgagttatacattttctgatacataagaaaaatgttatgttatcaatttagccatttaaatgatcatctcgtaatcatcctattcgtggaccatataggcattgtcgactcgtattgagcctggtttggagcaacagattgttcttcctcaagactcatatcttcaggtttacattgaatcttgctaatgtaaaagtatcaaatctaagatatctaacaagtgctcctcttttccattttagggttacttcaacaatatttctacatatcttcgaatcggtccacctttatactttgttctgaagaattataactacaggtattccacgttctgttagctactgatataatttgttccaactcattattaaaactcaatttgcctcatgtctcagctcagaatcaagacatacaaatcaactttgttccattaacaagtgtaatcctaactctcttttaaatgaggtatatttctcgtctgcatttattttcatttctcctcatagtataatttggttagctgtctttaatatatggtactattaactgctacagcttctttagctgttggcattaattgtgtctcagtaattgaataggcatattgttagcagagaatctgttcttattctttttgaggatctaaatttcattattttccatagattgcaagggcttctttgactccggaactaagctacatagctaagccagctgcttcgtggctcgatgactttcttgtgtggttatctcccgaggcgtttggatgttgcagaaagtttacaaatggtaccttttgcccccctgatgaccaggtaggtatttgtttttaatttcactgccgaggtttagagtcaagatactttaaatttagtggtcccatatacagctacaaacataagtagagttgaatgaactgacatgcagaaaaaagtagattcagtttttataagcattctgtttaatgtcccacattgtttataaatgggactaatcattgcattgtgttatatgtcccactgttaaaacttaaaagtcacatgtgcatccccactcataagctagcttttgggtggagtgttctaaaaagtggtctaggtggtcgcctaggccccgtttaggtgataggctcttagatgacacctaaacaaacgttttgaccgcctaaattcgttttactgtattcttttttccattttttaactacataaatttaaattataagtcgtaacttaatatatattgtttgatatgaattaaacaaatgtttttgtctaatttttgtttaaaatttgatatttatattttttaatagatagttttatatagtttttatcaataatattatatttataatatgttatgtaataaacgcctaaaccgcctaaaatcgcctgggtcaccgcccgcttaatgtctagcgctttcttgaacactacttaagctcttatccaaattcaaaagtagcacatggatataaaatatcatacttattaccgaggtccaaaaatgttttacgacttactgaaggctaatgttcttgtatttgtgtcacatttctagcctccttgttgccctcctggtcaaacgagctgtggcctaagtgaagtatgcaaagattgtaccacggtaactcactcttatgatgtgattgaattagttaccattgtatttttactccccgcaatgattttgcattaataaaaaatttctggttgtttagtgcttccggcatgcagatttaagtagtgaccgcccttccacaacacaattcaaagagaaacttccttggttcctcaacgcgctcccttctgctgattgtgctaaaggtggacatggtgcttattctagtagtgttgatttgcaaggtttttgcactgtcccctctctctttcttaatccattttatagtcatcgattctgtcattgcagatactcattctgatatatgtatgttcaattttcttatcaggctatgcaaatggtatcattcaagcttcatcgttccgtacttatcacacaccccttaacaagcaggtactttgccatctcataatatataaagcaacattgccatgtttggtatctctctttattatcgtgttactttatactgcaagtttgttttcaggttgactttgttaattcaatgagagctgctcaagaatttagtgcaaaagtttcccgttccttaaaggtaaaaagaatatacaaacttgtcttgataattcatcctaagcatggtctcttctaaagtttggtcttagtgaacttaatgtctaacttgtagtttactctattttcagatggagatatatccttattcagtgttttatatgttctttgagcaatatcttgacatatggaaaactgcattaatcaacctctccatagccatcggttcgttaatcttctaatctctgatcttagcttgagtttctagttggtaggtattgtgactaaacaaatgaactgactttgaaagttccatcattttacagctgccgtgtttgtcgtgtgtttaatcatcacatgcaggtataacttattctcactgaaatttactccaacctctgtgttagatatggttaagtctgattgtacatatctttctttttctttctgtctgctttctgactcagcttttggagctcggcaattattttgctggtgatcgcgatgatcattattgatctcctggtaattcactctcattgctactcatgaaaaaaccgataactgttttcgtacactcaagttactaatgttgtaccctatgaacacttgacttgaaaaatgctagggagttatggcagtctttcatatccagctaaacgcactatcggttgtaaatctaatcatgtccgtgggcatagcggttgagttttgcgtacacataacacacgctttctcggttagtcccctctctgtctgtactagcattatacacaagcaatttgctattgtcactctgactgtacgaaatgctcagataagcactggggacagaaaccatcggatgaaagaggcgttgggtgggatgggagcttcagttttcaggtattttgtcagtcttgaacacgactaatgaacttaaaaagcatgtcatctcgtaaacaagtcatgcttctctatttatcagaaatcgcctaactaacaaacagaagtataaatagttataatacaaactaaagtcctcattaacatatgttcaagatattgaatttattctaaaatgtgtatcatgtattgttggcagtggaattacattgacgaaactagttggggtgattgtgctcggtttctcaagatcagaagtctttgtggtacgtgcttgtgatctcttgaagcctcttttttttctccttgccttcttcgcatttggcttcttaatttgttttttcttttcctgacaggtgtactacttcaagatgtatttggcactagtccttctcggtttcttacacggccttgtatttttaccggtaagtcatggtcattcaaacattagactaattttagaatttttgttgttgttttgacatattgatttgaatggatgatgaaggtgttcttgagcatgtttggtccagctccaagacatgtagaaggggaaaggcaagatcatcgaccttcggtttcatcagtaccttaggtgaattagtatttttgttttgtaggttttgtctttaattcatagtatccatttgtaaatggttaaaattgtttcaccccacagccacagataaaaacttaagttcagtgcatagcggaaaaagaaaaaaagatcacaccaaatgttattcttttgggccggtgttactgttttccattgtttactaattcatgatttcttcgtcttagtttagcatccatacgagtgagcgtgagcctctctctatgaatgaattagtgcgggggagtcttaagtctaactgcgttattttacagaacatccagtcttataagcaaactctacttgtaaaaaaataaaaagggtgaaactttggtgaagttttggtgaagggtgaagggtgaaactcccaaagccgaattcgatcttctctgaaaacataatcacatttgtttggaaaatctgttagttgggctttggtcctattggtttacgtgatagtcagaaatgcaggcagtttgattacctctggcattagttggaaagcattccaaacatggatacacattgtggtagtccattggagagaagaccactctgaagcatttcagtgcatttctataaggacaaaccggataagctgtctactgttctaagtaggcatgcgattaaaaactgaaccggtttttctgaaccaaattgagatctgagagttcggttagatagttaaccgcttttcttttgtggacttttagtatttttccaacaaacttaaccaaaaaaaataccgaatattcatgaaattataacaatattgctttttttttctggacttttagtatttttttaaccaacttagaccaaaataaaccgaatttcatgaaattataacataattctctcaaaagcacaaacgaaaccaaacataaatttttgtaaggattttaaacacaaccgtttttaacccctccaaaaaaaacaaccgaataaaccgataaccgaattcattttttatttggttaattttggtaaccttgctccttaaccgaattcggtaattcggatctccaacaaagtgtagagggtggggtgtatgacatggcttaatatcttgatctcactggttcctagcaacgtaacaaggtgatgacgtggtttttacatttttcaaaaatctcttttgcccagagagagaagaagagacagatcggaaggagttgagtaagaatggcgaagctggtgctcttcaccgccgtaattatcgctattttctcccatggatcctccgtcgatgacaaatgcgccgcttgtaacgccgtcgctgtacgttggaatctctaactttcctctctttgatttctcaaaattttctgacaaattagagcgagttatatagcgatggcaaatatatttacgtacatgagatttgctagattttgatttgattctattaataaatttcgaatttctggtcattggcattttctgggggaagtaaagtaaattcgagctgatgttgttgttttgaagctttattgatgtttgatttaggacaaaaatccattagttctgtactaattgtattggtttttctaaggttaatttctgctttttgaaactgttatagtgaaaggagttcaggataattttccgtggacacatttttctgtatattatctctgttgtgattgaattagcactctggagattcaagtttgagtctttattattactattgagctatttgttcggtttctgaggttgtttcgtaagaattgcaatctagaacttggttttgtttcaatatatgaagatgttctttttcaaaatgttacttttcccccagttcatgcatttggtcattatgaaaagaagacttgttttcgtgattttgagaatgatttaatccttcctttataatactaataagggtggttgatgttgtgcaggaggaattagagttacagcttttaaaggtaagaacatcttaatatctgtcatcttgtattataacattgacaaagcttgcctgcttctgttacattgcttcaattttacaagcacatttttagtaacttggtattataaactcttaaacaggaaaagccacgaaaccatcttgatatgagaaaccggctcaattctaaaggccagcgtgaaggaaaggtcattgattacaggtacaacattgttgcctctttgtgcattatctgtaaacgagaccatgtctgctttgattcgtgtactcgttgtttttatatccacatcctgaaaatcagtatgataaaaatggactgaagttttttgtgcatttgcatgaaagcgtgactcgagttttgaaaatgtgattcttaacgagggtaacatgtatccgtagttaggagcaatgacgaaagggaaagaatctgataggttgacactgctaagagtgtctgtgaaacaacaaccgattcacaatgagttcttaggagtagctatgttgctttttttaggcaggtttctcacagtggatgatcctctaattttctttctttctttttcattcaaatagaataagcgacctgagggtggttgatttgttggacggtctgtgtgatagaatgcaggactatactctacaaaaggtaagcctagttcttgtatatttcttatcacgctgctgttccaggaataatatatctctctgataattgtaaattgaccaatgagattcttattgccacacttctgcaggtggaacctaagaatagacaatgggtgaaagtaggaaattttgacaatctaacaagtaatgtgttctttcctttccttttaaaatttgcgctccgtgacatatttgcaattgttcatcacatagctgcttcaatacttacgttatttgataagtacgcttaggtgcatcgtttaatgagtcaatggaagctgtctacttgatcacactgtcaccgtgtctgctgtccgctttatctgtttataacttctgttgagcaaatgagtaactgttagagagctttcatgatgctgaaaattctagaacaagtgcagtgacggttttaaagttctagaataagctgtgaaattctcatctctagttatattagtggtttagagacttgtttgggatttaatgtttcatctgtgtgtgtgttgtcatatagataaacaggaagcgaaagcgcatgcaaatgacatttcaacttattgtggaaggtaagacaatcaagaaccttctcttactcgagcctaaaattcatcgaagtctcctaaaatctgtatatgttatttctttttacagattgctggaggaaactgaagatgaggtaaacattctggtaaccattctgttaagtgacagttataaagtcaagactaaattaaggttatgtgatgagtgaccgcagctaggtgaggtgataaagaatggctccctaaaagcaggagaagtccgaaaggttctgtgtcaaactttgagtaaccactgccgacaatcaaggttagcacaatagtctttcttcctatacatttctgcctcaaaactatgttaagaaatctgatatggtttttctgaattcagtgaaacagactcagaggatgaggaggacgacgatgcagatgaattataactcaatccagtgaaaagttcacgtcaaattaagatcccatcttggtagctatgttatagatacatccatccacaactcatatgtaacttaagacacctttcactttttaagttatgtcgaaactcgggtctagattcttatttatattgtggcaattgttcgttttccctcaaaaccttaattagctagagagtatcgaaatagtctaaattttatatgaagagctagtcgagattttacattggatgataatctatatgcgatgatcatagttataagcttacactgttgttataacatgatatggggcataagtttttcaatgcttctttagaatcaaaacaagtgggtatagtttgtagcgtataaatgatgatcggaagaattgttgtaccgcttgaatgatcactgcacatagcacgctccaacttgccctgaaaatctataagtagtgatgccattcaggcaatgagccttgttgagaagctttcctagcatggaggctttgttcacctcattgtaattattgggccactgagaatgttatgatgttttgaagaacatcaaaattatgatatcttctaaaggtggaaagagaaagaaaaaaaagaccatttgatgatcgcttcaatcctactatattatttgggaagtacattttaaatgtaaccttaatttttgtaagtaattacataggtatgtcattagaaataaaattttaaagagtaaattaatttatctctttaaggattaaaaagtcaaatactaatttaattaattaagtttaattgaaaaacgaaatacattatcaatttccaaaaataataaccaatcaaaatcaacatataagatttgatatctaaattttaattaatttaatttaattagaaaaacgaaatacattattaatttccaaaaaagtaaccaattaaaatcaacaaattatatttgatatctaaattatcatattaattttttattaattattatagttcacttctcatctttatatgattctatttttgtggaaaaataatatcatcattataaaaaaataattagagtttttttgcatatgccacaatttgaatcctagaattgacgggtttagatcgatattaatacaagatggtatactacaggtgaaactcttaaattaacaatcaaactacaagtgtataatcttaaacactaaacaatatagataatatcaagaaaacatatacaacttacagtttactatacatttaaaatcaaataaaataatgtcatatatttttaaatcatctttacaataaaagtttttagtttaactaaaatataagcctacctgcggtatacagcagattaatatctagattatagggcttattggatctaaagatgggtcatcaaagattttctaaactgaagcaaaatatactgaatattcaaatatctatctgttaccaaattataaacaaataagtcaatttaatattttatatacgaaatcaattaaatcttaatcacataaaaattagcacaaaaaagtattcaacaattaaaaaattatcaaatctctgtgttatataagttttgatactatattcgaataatgtaatataccttttcaatttgtattctttaactaatttaagctaactaatatatttgctaatcttatacctatcaaaaccgactatcgtttcttatctctatagtagttttgcaagacttttttggtggatttggataaaagtgcattcgggtcatatggtacattcccctattaaataaatatggtgcactcctatgttattagctaaaatgtttataatataattaagagtcatatcattaataaaattaatattaataaaataaatggctttttggcaaaacgaatttggagggacggttttttaatcaacattaataaaaaagtaaaatataattaatccaccgtttcaatacggattaaatctttaatttattattttttaagaccactaatattaaacatatcaaatcatgctaatttagaaaagattatataaaaccaaaaatgttatgtggtatgtataatgttactatatataaaattaaacaataaaatataaatgtattagagaatgatacaatttgcaaaacttttatatataaaaaataattcttaaattttaaaaattactactttaaaaaacaaatcacgggacggataaagaaattacagaacgagttttattttggaattgggttatatggtggatgtatttgaatcaatatttataaaattttaaaatattattaatatgctgttttaatagggattaaaacttcagttttttaacaattgtctcatggattcgtggtatagcgttacttaataacaattataaactgtaaaataaaaatattttataaaaataaaatttgcaagttttaatagatacgacttttaaaaaataaatcgtcccgcggtataccacgggttaaaatctagtagtaatatatataggcagtgagaacgtaacgatgtgttggagagcatatgaaagttatgatagcttttataggatcaactaggttatgaacccacgagtaactgttttaattattaaaattttaaataaatttttgtgtgaagaaaaatatttattgaaaattttgaaatatatgttttatatgtctacttaagttaataatttaaattccttgaattttaatattaccatgacaaatagtttaatttaaatacatgaataaaaacaattctaatacaacttataggttttacaacatttatcaaaagaacatttttttggttcataactttctctgtagttgtagatattctggatgaacgcgtctttttacgtaagacgttttgattgaatctcatgaaataaattgtcgtatggagaataactttgacgactttctcattttggtatccgcaaattcattattgtttttcctttaactttgcttcattagttagtataactcttttaaaaataagattttatacagaagtatattcataaccttatctataatttctttttaacaactaatatttttctcacattcttttcaatatgtatatgaatttttgtcttcacaatttttctcggatagctatcactctctctatctttttgtaagaactcgttttatttgtttctctttcttatgattttgcaagcactccatatttattctttgaaaatcccttcctttccttgttagtataaaagtttttcaagcttgtcgagaggtagctaagttatgtcaataaacttttcgtttgaatttttaagaaaaaaacatttttgctctattttgtgttctattattctaagaaaatattttaacttctaaattggttcttaactctatcacttctcttttttgatgcagtttagatcctcttcatcttcacgcttcccaatcttaaagacatcaacttatatctttgggaacttgattcaaattgatacgattaagaacaccaccatcaaaccatatccttgtttctttaacgtttcacagaccaaacatacttcaatccctctttacttcaccttcttgtgaaataatctttcatatacttctttcctacggtatctctttccatctttttatgattttgtctaagatgtatttgtcataccttccaaacttttcagatgctccataatttcttctttgaatatcccttcatttccttgttagtaaaaacctttttcaagctcatcgagaggtagctgagtcaagtcaattaactcttcgtttgaattttcaagaataaaatcttgttttgctctgttttgttttatatttttttaataaaaggttttagcttctaaattggttcttaactctatcactttctctcttttgatgtggttgtttaaatcctcttcacctcacgcttcacagactgaaacacctcaacttatatattctggaacttgattcaaatcgatacgattaggaacaccatcatcaaaccatgtgcttccaaactttaacgcttcacagaccaaacacaccttaatccctcttcacttagactacttgtgaaaaaatttcacatacttctttcctactgtgtctatttccatactcttatgattttgtttcagcagtatatgtcctacattccaaacttttcacatacttcatatatcttctttgaaaattctttcctttccttattagtaaaagcctttttcaagctcgtccagaggtaccttagttaaataaataaattatttgtttgaactttccagaataaaatctttaatcgactatcaatggtccatagatgtttatttatatagacaccactgctttattatttaggactttattagtttttttatttgttaagaagaggttttcatttacgtcattaagcttttccttttcgtttaaactttaactttcttagactttaaaaaaactttggctcggttgtttatcactatctttttcttaatttttagaaaacttcttcatttatttgaattctaattatctatattattttagaattatgattttttcttaatttatttggaagctaacatagtgagactaataatgacattaatatttctatattgtgctaatttaattgtacattttcttatttccaaatctttttttttccttttcataaatattttaatatagaaatttgttaaaatttaaaaatgtaaattaacatagtggccaaaaatgctaattaatgacatgtccaagtgcaattcgttgttttaaatcctatgtggacgcctttagaagcaaatagcctcaacttttctatagtatagattataggaaagccacaagaaagtgatggacattataacattaaggaattgttgaatagtttataggattgtgtacttatatgttattgtaaagacgcttttgccctctccagataattcaatatctacattttatttttaattacaaaaaatcggtttcactttttcgtttttttcttccgagttccgcaaaactacaattaaaattgatttcccttttggtttagaattttgatgaattggagagtaactgatctgatttttgtctaagactagagtctttgggttacctagacactatcccttagggtttagattctttcaatgaaagtttgtttaaatggatctattaggttttagaggaaacaggtgttgacggatattgtgatgatagaataggtgagtagggcgtaaatgaagtaagtgcgctggtgaaaactcggaaaagttgtcgtgacgaagaagaagacgatgatgaagaagagaacaccataaactggagaaaggggcaaaattatcattttcaactccaacaagtacccatttctataagcccattagaaagttatatttctctaatttttgagccaataagtgcccaattctataaaaccctgaacttttatagatgaaaatataacactgatatatatttgattatcttaaaataacacaaaccccattgtagggcaagtgtgccaacaaactcaatgtaatgtcattagcccatttgtttagggctttaataaaagtatattcaagtaagaaaaaagattcccagctgcacaaagtataacataatgcatgaccacacatgccaagtaaactaaaagacactcaacttgatgcaacgaatccttatacttatactctgttttttaatcttcttcttgggctttcttttatttctcttcttttacttattgggctttaaactacgtcttagtcggttccttttctcaaacatgttaaggttttctttcttcttgtcgcctctatataaaggctctcttgtagttgcagaactcaacttattattgaatttaaaacggagctttaagcttctcttctctcttgaatctcggctattccaaggaatcaacaactttcaagttcgtctttgttcggtattcacaagaatcaacgaactgcatacacccctttgttcggccattcacatcgaatcaacgagcttaggttttctatcaagtcccgctgcgccacaactacctaacgtaaatggattgcatgacaacatatttgaagtatatagtatcatatggtcaacatcataaacatagaatcttaggttaaccggttgactcactccggcgtgtaccaccaaattttttttaatatttaaaaatatagagttttatttggtgttgtataatcaaatttcacattctataactgagataaatatatatcgcatatatatatttaatacattgattcttataatagttagttttttcaatttcaaaactaaactaagaatgtaaaaaaatagatattgacacacggtacaccgcgggttgattttttgttataaagttagagatttttagtacatcacatacctatattttttaaaaaaattaaaatttaacttttaaggatgatctataaatagatgctattgtttttctttatttaaatgtatgatacactgcggaatgaaattttataactaaaaaaattgaaatcttaacttaattttattttgggaatattgtttgttttgtttagtgtataaaattgtgtaatttacatttgattgttaattctaagatttcacccgtagtataccatctcgttttaatatcaacctaaacatgtcccaccttataaccctgtcccgtgaaattaaatattattttattattttcatacatagttcagatacttataatatttataacttattaagaaattaatattgacccaagtttcataattgtattttgattattatatctataattttacctctaatataccatctcatattaatattttttgaactatttataatattcaaatctcttataaaattctaatatttataattttataaagaaagaagatgcgatgatataaagtatttatagtcgtaacaaatggaccttttaagggatacgtaacaacttttttaagaacatcaaattggtttcagtttatattttggtttttttattgaattttatggaaatacagtaatatgttaacatatgttttggttccattatttgtgttttaaaaagataacattagaacccttaatgaagtaatcaatcctctgctttgaatctctctgttttgtttcttaaggaaaagagaaatccaatcatatattttattccaattttttagattttattcaatccatttgtttttttttccatttcggaggctcattgattttcagtaataatgaaacccaaaaaaaaaggagaacaaagtaagaaacatatgttaaggggactcaactgaattaatcttctcaaccacgcaactgggtggctcgagtgacttagttaactccaagagtgaaagctcgcatacggaggttgcatgactgagtatggcccattgtcttgatgttgtgaaaggctcgagttatgcatttttgcagctccaagttcactttttcctcttcccacatgaactttgaatgttctacacccactcaaagtaactcaccgtcactcctcttccatttgcgtatatatatggaagtataatcactcctttcttcgacagaatctgtcaaaatcaaacaaattaggattcaattctatagcttttagggatggggtttagtgttatcgatgcattacatcatcaacatttggatcagttggatggttaggtgcctctactatgaactttgctttcacatctccagcattttccatgaccaaatatcggaaatatataagaatcagagaatgaatgaaattttgcggttggtgtggatttatgagtgacatgtttgtactgacttgtttaggacaccgccaagagcgcaggggatgagaacattgcactcataaatgagcagttcgtcagaattcatagcgtctccaccattgaaatcattgagacatccaattgcatatttgtgttttatgagagcattgatgtcgataccttcagggttcctgattgcacaagtaatgtcgcttactacaaccactttcccacctttcttgtggatcaacttcgccgcccatgctccaacattcccaaaaccctatcacatatcatccaaatttctcaacttttcggtcacatattatacacaattaaggttgaggtatgagataaactgataatggttttacgtgaataacaaatgtcaaaccctgaattgatttcccatactcagcaaaaagagcttcggtggcaaagactacacctcgtcatgtgacagcttccctacctaatgaaccaccaagatcctacaccaaagtgatacaacatttaaatctaaaaaagctcaaaactttggtagtcacacagaaacatcgaatcatcaactatttcaaataaataaaaatgcttcgtggttgaatgatgatgggagaagatgctatgatatggggtatttagagtcgtataagttagctttttgaagatgttggttggcaagcataatatattagaaaccataacacatttggaataaaattttggaaattgtttaatttaaaggaatataccacatatttatgttaattgattagtagttgggatatcatagagatgtaatcgatttatggatattatgcataagaaataaatgaaagaagattttaataccaataaattttattcgttatctctacaaatcttagcaaaaatgatttgttaggtaagaaaattctattaattaggattcttccattgattatattttaaagtcccaaactaatatagaaacaatattgattcgttacatataaaaaaaaatcataaccgtaaataccgctaaatttagttgcaaacttaactaaaatagaatcaaactaatgatttctgagtttttttggaatttactgcaaatgcaaatttgaataatagttatttgtttctataaaataaaaaaatatattagtggcatattttgaaattaatgaaacacgaatattcgataaatcgcatatgcttaatttgcgctaagattgatttaattatggttagttgagattaaataagatttgtcagagtttttctcatattttggtaagatttcattagcacttaaaattataatggttttagaatcaagtaattataaatatggtaagttaggattgattattgaaatttactaattaggaaataatcattcatttactgcttcaagctttaagggtgtgtttatgcaatatttttaagtaatacttaataatatcgagtttttagtaaggatttaatgcaatatttaaattttggaagataaatttgttgattgtcctaatgaaaatatctggtctgattaaatttgtaaagactaaacataaaattaggaaattgataaatgatatatagatggtttagaatttttatgatatgaaaattttaattaaaaccggaaagccatattaaaaacaattaagtaagtgattttttttttttttgtattatcaattaaaaagatataaacttcttattttcattagaaaatacattattagaatctaacccaatacgacaatacatatgagtttcattagaaaataatatgcaaacaattgagtatataaaagtttagtctaaattttgcatatggtatttttttttaaatccaaaattaaaattttaaaaaatatttaatcaaataagaagtaaaattgtttatttagaatttttaagatatgaactattttcataatattaacaattagttttctaggaaggtaatatgtttaagaaaaattcccacaaatagcacaattttaagttttttgaacaaaaatagcattaaaagtttttttagacataaatagcactcaaataatcatttcagaaattcctaaatgtaacactaaaacaagttttatggacaataataataccacaattttatataaaatctattcgaccaaaataaattagaaataaatttaaaatattatatgtgggttcactatttccaatttagggtataatattcaactatttaaaagaatttttgattcattttaatattagtttatggtattatatttgggtttcctatttctaatttatggtatatattttcaccatttaaaagagatttttcattttaaaataagtttgtagtattatattagttttttttttccaatttagggtatatatttccactatttaaaagtttttttattcaatttaatattagattagtgtttgctatcatttttatttggggcattgatacaaatggtaataaaaaaaactttattatttaattaatttattgaggattaaaaactttatatgctatttttggaagtttcaaaaaaaggtgccatttttggaatagtaaagtttttagtgctatttgtgtcaatccccctatttttaattgataaatattttgtaattaatagttatttttttaatttatcaattaaaaatattatgttcttaaaaaaataatatgaaaatagttcatatcttaaaaattctaaataaaactttttaaattaaaaaaaaaaactaactattataagaatcaatgcattgtatatatatatatatatatattaaatatatttagattggatatagaatgtgttttttgattatataacaccaaataaaactatatatttataatactaaaaataaatttaaaacatattttggaaaaattacgtataagatatagaagagagtaaacaaaatgtagaagagagttacccaatcaaaaactcgaaagttataagtcgtttaataatgcatgcacgtgtgacgtgaagtatggttaagcaaaacgatgtaagttttagactttttggttgtgttgtaaacaacaaatggtaacgttttgaaatttggttgtgctttgttgatatgctttatcccaaattttatctctattatcgatttatttataatttcaaaacaacatcatttattgtgtacacaacacaactaaaccaactaaaactacatcgttttgcttagccacgtttatgtcatacgtctaagccagtactgttaaccagttaactaatatcgtgtaggtcaaagtaagaaacaactaaaagacttacaatttagatagataatttaaaacttagaaatttgctcaaatgactctaatttgaagtaaaaaggttaattaaccttaatcaaccttaaaaccatatttttagcaaaaaaaaatacaattatgaatacaataaataaaaatataaaataaaaatcacaaaacaaataaaacatgtcacattagttttttttttcctaattcagtcttattttccccttcttttccttgcatgtatcttcttcttctgcgaattctaatcaaaatcctaaacaaaattagattgaatccgtcattttcaaactcagcttctccggccacaacaacgacgacgatattagttcaattaggcgattttttttgttcaagcttcttctcacccaaacggcagatagttcttctttgtttcaagtttgtagctgtcgtgggttccggctacacaaacggcactgagcagtccacctttctcgatttcatagtcgcggtggctatccgtgtttgtgatttcatacccacggtggatattagttcgattaggcaatttattcactagtcacggtttttcttctccaacatcatcttctttgtccttggtttcctttgacaatcgggttctgtgtaggtaaaatattaactcatcaccaccgattttattatttctctttttcgattgataattgtgaaatacaattcttatattgctaaatcgtcattattgaagatttggagcattacttccttcggcagcttaacacttcattattccaattcatagttcataagaatctcgtaaggattttgggcaatttcaacacactacaagaaaacacgccagttgcgagggaagaaaccgtcgctagtccctcgcaaagagcacttaacgagggaattgcgacgaactccagttcctcgcaaaacgcgcgtcgcaaaatcaaattcgtagcaagttcctcgcaaatgttgcaaggaacaagttgcctcgcaaaatatacgcaatttgcgagggaagcaatccgtagcaaattcacagcaaatttcgggtctcgcaagtttctcgctagttgcgacggacgaccagactcgcgaagcacatgcaatttgcgagggacgtactcggtagcatattagctgcaacagtagcctcgctctttcctgcaagttgcgagggaatacttcagtagcaaagtagtcgcaaattctttgtcccgctaatgcctcgcaaaatttgcgatggatttgcgtggcttttatctgtagtcgcaaatccgtagcaaagtttgcgatggattcgcggtaaataagcgactcttttctgttttgttttaagcatgattactgttgaatatagggattactgttctacttaacaatatttaatggttatcttaattggatttttatactaaactttgaagttgaatactaattaagaaaccttaaactcatatttaaaagctgaaattttaggtttcaagtacagaaaaataaactgaatacagaatgttagaaggccaaataattttacataacaaaccaacaaaagattcaagttttgatgagtgaaaaagaaacttaatacaaaatgttagaaggcctcagatggagatgacccagtgtttgggttagctacaacagcctcaggttcgacagcctcaggtccgatcccagcagctgtggcattaggcgcatcaggtggattggagctgactggttcagttcttgaagaggatctagctcgaaacaaggcagcaaactccggatccttctcggcaaggtaatcaaagtatgcgtcaaaactggtgatcttctcagcctggtttgcaatgagggcttcagcagcagccagcttctgggaaagcacaaccggatcatctcgaggaagcaccggtccggcatgcgctgaagacgcctcatgctgcaatgaaccagccccataaatcctacctttcttcttaggagcaacctgtcacaaactcataaccaaaacaagcaaacatgatcaaagcaaagtcgaaacatatagacttaatgcaaaactcttaggccgaaaatacaatgatattattcagaccaacaacacaactgaatcaggccaaaaacacaaaaacacaaaaacacaacatattcaattcagtttcacaacataatcatatccatttacacacactgccaatttgcaaaccaaaaacacaacatattcaattcagtttgaatcacaatgacacaatgcaagcctgaacagaccaatccaatgcaagccacaacagaccaatcgaattcaagttaaaacagacaaatccaatgcaagccacaacagaccaatctaattcaagctaaaacagaccaatccaattcaagctaaaacagaccaatccaattcaagctaaaacagaccaatcctattcaagccacaacagaccaatccaattcaagctaaaacagacaaatccaattcaagctaaaacagaccaatccaaagcaccaaaaacagaccaatccaattcaagccacaacagaccaatccaattcaagctaaaacagaccaatccaattcaagttaaaacagaccaatccaattcaagccacaacagaccaatccaattcaagctaaaacagaccaatccaattcaagctaaaacagaccaatccaaagcaacaaaaaaaagctgtcttttatattgggttgaaagagataagatacctgtgcatagatcttgttctttgcctgaatagataacccgcctgaacccgtgctctctgtagtgtcgcctgaacacagaagtgactcttcctcttgaatcttcgaggacacttccttatagatttcctccgactttctgtcgatgaaactcccatcaggtttccggtgtgttttatctaagaggaggagaaaatctggagtactttctcctgtcatctcacactgaaacacataaacatataggtcagttgtttgaaatacaagctttttaaagtaagaaatttaattaacttacacgtttgcgggttctggctttgtatgaggtctgtccagaccggtgtttatgtatcccgaggccgtccggatcatgataccttgcattcctactgttgagactctttctttccgacttcggatccctccaaaagctaaccagacctttccaaacttctggatctatccaccgcggttttgcctcatctcccttctccttccactttcccttccaacgaccaacttgatcagacatcctatccttaagctttgcctcaaactccaatctaactctctggtttattgcagggtcccagttatatacttgctacaaaacaaagacaagacacattagaaatagacaagaccaaaagctgtaccaaacaaaacacaaaattatttcacttacagcaaatgtttcaaaccatctatcggccactgcttttgatgtatgtgaccaatttgcatgaggctctttgaaatctttttcaaaaatgcttcggacagtggctgcaactgaggtgtcatcgtcaaacctacaaatcgagactccatcagacaaacaaaactaaatgtgtctacaaactaaatagtgaagagaacagaccctagtggcttaccagagagtaccaggaggtcgattggggtctaatttaggcaaccctgcacgaccagggctagcaagcaactcttctatagtcaggtcattgagccgagcatgtagtggagtagtgtgattggcagaaccgcgaggagattgattggcagaaccggtaggagattgattgacaggcggaggagaagcaccattggcctgattgttggaattgattggggtttggagatttccctgagtggccgaaccgtttccttcactaggagaacgacgttgattttgttgctgagaccgaaaccgggaataatcgttgccattgaatgacatcttgcaaaaaaaaagagaacattagtaaaggagaattcgaaatacaaggaaaattagttctacaacgaaaatacaacgaaaattaacgaatacaagcaaaccctaattagatctacaaatagaaaccctaattagatctacaaatacaacgaaaatattcgaatacaagcaaaccctaattagatctacaatgaaaatcaaccggaatcaagaaaccctaattagatctacaaatagaaactcgattcatacagattaaaccgattcaactctagggtttgaaagatcaactcaaaaatcgttgcatggaaacattacctttgggttccagacggcggcgacgaacaggtagacacggcagagaggatgaacacgcgtcgatgaaatctattccagacggcggcgacgaagaacaggcgtggatgagaagctccagacggcggcgaagatgtagaaacgacggctgaagaagttcgagcccgcggcgagcagcttcggcagtcgtcggatcgagagagaataggcgaggaaagaaatttagggtttggatgagagacggttgggtttgagcgaagctcaaactcgctcgcgttgtatatataaacataaatcgcctcgcaaatccctcgcaaagttgctagggctttgcgaggaaccgactaaataaccaattaaatcgcttcaattttgcgagggacttgcgagtttccgtagtaaatccctcgcaaagttttagggttacacagagattcgattagggttttcagataagattgcgaggtccctcgtaaatcccccgcaaattgcgagggacttgcgtggggcgtagtaattcccacgcaaagctgtagggttacacacttacgaggaagcgtgtattcgtcgtaaatccctcgcaaattgctaggggtttgcgagggacagtgtaaaaaaaaaagatatatataaaattataagaaactttaaaattataagaataacacaatgcaaaattataataataaactttaaaattatataattataattttcaatattattagaaaaaaattctgaatttatttattatacttggttaaaataatgaaagtagacaatataaaatacaatatttattctgattcattttctgaatcattataatcattttctgactcaacgtggataacattgactctctgttttgtaggtcaatgtggataacatcttctgttgttatgtctggaatggaaagttctctaatgctttcttgttgcatcacaacatcatcaactaaaccgactatacggcccctgggattcactttaataacggataaccacacttcacgccgtgaccttacacgcgggtaagatagaaagcttacctgccctgcttgtgatgctaggataaatggttcgaacttggcataagtcttgtttgcattgacatcgaccacgcctaagttatttttccgtaccccacgaccgatcaccggatcaaaccaatcacacttgaaaaggacgcatttcaaattcaaaagtcctggatattcgacttctagaatttgctgtagaatcccataaaactcagtttcaccttcgacatggattccataatttgcagttgcccttcgacttccatatggatatgtatggaaagtatagccgcgagtgaagtacatcggagctgttgtgatcttagatcttggttcttgaacgagctcatgcaaccaaagtggtaatggttcgtttccacatccgttcgtaacctacacatagaaaatattaagtttatcatttttttaaagtaaataagtaatcgaatattcgaaatattattatacttacatagtattttaaccatccagcaaaatcacgatctttgtaagtttcatactctttttcttctaattcaggacatgcttcacggatttgtgaatcaaataacctacaaattacaacgcagctgcttaattagcttccttaattaatttcacactaattattaactataaaaattaggaataaaactaggttgctttatacctttcaaatttttgaatgtaatcaacatttcggagtatgtaattgtgagctgctcgagaaagcgcatggtcgtcccaccaaacttctttcaacttccctgcgagtctacctatttgggcaaaggtatctggaacatcgggaacgttatatgtaggtgcaacacctccatcatcatagcgtcgaggacgagtctttttggttctaacgcttggactaaagtaatacgacgtgaagtgagacgtttcctcggttaaacttcctgcgactatcgacccctcaactctagcaagattttttgcctttcctttaagagatttcatgaatcgctcaaaaggatacatccatctgaattgtactggcccaccaagagcagcttcatgtggaagatgaattggcaaatgttccatcacgtcaaaaaaggcaggggaaataatttctccaagttatagagcaacactgggatattcttgtctaattgttctatggtatctgttgtcagtgttcttgtacatagatccttgaaaaatactccgatgcctatcatgtatttaattaatgtaagttaataatgaccaagtaataattgagtaaaaaaaacatatagtatgtatatatataataaatatatatatattacctgcaattgcctcatgaatatttgtcggtagcaactctactaatacaaatggcaataatcgttgcatgaatacatggcaatcatgacttttcataccagaaaacttttggccttgttctacgcatcttgaaaattttgacacatatccatctggaaacttcacttcagcaacaacccactcgacaacgcattctttgcttcattagacaagcggaattttgaaaccggtaatttcccatctcttgtaacatgcaactcaggtctgctgcatatttccgccaagtccaaccttgatttcaaactatcttttgttttgccctgcacattcaaaagcgtattcatgatattaccgaaaaagtttttctcgatgtgcatcacgtcaaggcaatgccgcaagaggagacccttccaatatgggagttgccaaaagatactttgtttgtgccaattgtgagtgcttccatattcgtcaggcatattcgccgtggtgtgccaattacccccacgtttgcaggtttcctgagcaccataataatcgatctgttcaaacaaatcagttctagaaacataagatggcggaggaagacgaactattttattcttcctaaaacgttttttgttacgccgatacggatgatgcaggggaagaaaccgacggtgactatcaaaccaacatggttttctgcctttctttagttgaaacgcatctgtacgacccatacagtagggacaagataatctcccatgcgttgtccaccccgataacattccatatgccgggaagtcactaatcgtccacattagcactgcccgcatattgaaattttgtttgctcgagtaatcaaacgtatgaacaccttcataccacaacttcttgagttcatgaatcagcggttgcaagaagacatcaagcgctcgtttcggatactttggcccaggtactaaaatacttaagaacaaaaattcgctttgcatacacatatctggaggaagattgtatggggtcaagataacaggccaaagagaatattgtcgcccagacaaaccaaatggactaaatccatctgtgcataagccaagatacacattcctacactcgctagcaaagtcaggatataccgtttgaaagtgtttccacgcctttgcatctgatgggtgcgttatttctccgtctgcagttgtatgttgagcatgccatctcatttttgccgcagttctttctgattgatataaacgtttcaatctatcagttattggcaagtaccacatccgtttatatggcactcgcgtccttccgccagtagtctggtatctcggcttcccgcaaaaccgacattcctgcagatttacatcatctccccaaaaaatcatgcaatagtcaatgcatacatcaatcatttctgatggtaatccaagactcaaaactaacttctgtatttcataataactctcagccgatatattatccggtggcaaatattccttaattaattctgcccatgaatccatacagttttcacttaagttattatcagctttaatagtcatcatcctagatgtcaaagataacttagaatgtccttctctacatccctcgtagagtggttgatttacagcatctaacatatcgtaaaaatgttgagcatctaggttgggttcttcactaatattttcaagaaatgaagcaatagtttcatgaaatgcatccgtaaccatatcatgaaatctattttccaggttatgcccataaccaaattgatcaggtacttgctgaccataattcgcatcattattaaaattactaggttgctcgacaccacaatttgtattactagttcctgcgctatctctacaaccatctccatgacgtaaccatacatagtagtttggcataagtgatgttttccaccgcaaatttcccttgcaaatcgcctgttttcttgtagtgacataatcgtattttgaaaacaattcccttcaacaaataaagtttttcaattcggatttgcataataagaaattgttatagttcttttaccgtgttcttgtatagttgccaattcgttccggtaagtttatatgccaaatttgccggaaagttttttggaaatatattcccgcctttgttgttttttgtaattgaattattgtcttgttgtgatagatttattcaagttttcatgtatattcagtgacagatttgttgatcatttgtttgacaatttctttgaacattgtttttctctttgattaggtatggcgtcttctagtaaaaacatcacttacccgcctcgtctttatccagaaggtaaatcacctttgcaaaataggaggatgaaccatagctgctttgtttcacaaatcgttaagatcagattatgattaggttgtgatgtatgggaaggtttgttgaaatcttcactttgtgtgtttataaagtttgctgatgcgaaatatatatgggctgctcacactgttcactacttccttacaaatcagctgagcgtcaacaactttcatgagattatgtctgtgattgatggatggccaattagattttctcttactgaatttgtggatataacgagtctcaattgtgatcttcttgacaagtcaaccacttgtgaaattggacactatgagttttggaatgaaatgggtgttggaacatacgatggtcccttgtttattgagttgaagcatgtaatggatattagcaaggaatggagttatgagaagaggttgatggttggtaggttatgcttgttatctgttggagttcatgggatttatcacggttgtagaatccctttgtcaagcgctaaattagttcttgatccaaaggcatttgagaaatatctctggggtcgagttgcatttgagtctctagttatttctgtgaagattgttgactacaaaaaagacatatgtgattcatggatgtgtccgcgccttgttgatttggatttgtaagagcgtgcctggattgagagaactttatggaattaaaatagcaacaactactggtgttccactacttgattggagaataaatcagtcacatatcaaattttaaaaaatcgttgaaactgagaaggctgcccatggagaggtttgtgtgatcttctttagttctttatttagcttgctttagatctttaatatattctgagacatgtaactaacctaatcttttaattttatgttgttaataggtgtgggtcagacatatgattcctgtttctgaggaaaacatgtaccgtaaatggaatgacttgtctagagatcaacatatgacgtatgacaacttgattagagatatcatccacaataatttaagaaacaatgcgtggaaacatgcggaatcagtgcgtaggaggaaacaaaaagaatcaagaaatgaggatggtgagaatggtgtcatttccaaaagaaaagaaaggtaatgagtcaacgcctatagatgatgaaagagcacatgtttctagcagagaacagggaaaacacatatagaggtccaaatttttcccatttcacaatctacatatacatttttggtagactttttggccaatccctatactatttactaataacatataagtccttacaaattttatctcaaccaaatattcaataactaagaacttacaattcattaacttgcattaaatacttgaaaataactttttcctaaatttttacccttaattaaatctttctttattgaattatattcaattaaggctaattttctcaaatcttttaatcgccattcaatataattatataatttttttgtcactatatatctaatttaatttgactttatatataaaatacatatagttaataaaatattaattgttttttgcatatgatgtaattcaaattttttaaaacagacatataatactcaatcgatgaaaaaaataagtgcagaaggtctcacattgcttaaatattgagaaatcatttagaataatattataaaaaaggatttaaaaggatcaaaatgattctgaatatgaatgagcaggaactttgatttatcaaacatccaaaattaaaagtgttattcggtttactccgattttttattttgaataactaaaattttaaagtttcaaaatattttatatatttacactttattaaaagttaagtattacaatttttcacacttttcaaaaagttaaactttataagagttttaaatataaattattttaaaattttatgaagtcttaaattttataaatatttaaactttataaataattgaaacattataaatattattaatatgagacaatatgctacagtgaaattctagatgtaacaatcaatatacaattatgaagtttggatcgatattaaaacaattaattgtataatattataaatattcgaatttcataagcatatgacaaaatgatgtttagtttcatggaacgaggttatatggtgagacgggtttcgatcgatattaatatggatgaaatcctgaattaagaatcaaaatacaattatacaattttaaaaactacaaaaaactaatattaacaaaacaaatataagttaaaatttcaaaaatattagttatcataaaaatcgttccgaggtgtatcataatatcatacataaaaaaaaatagcaggtatctatattatttatatataaataatattaattaaaaaaatctctaactttctaacaaaagtatcaacccgcggtgtattgcgggtcaatcccgaaataataaaatttttaaatctttcgtacctttaaaagatactcaaaccacaaacaaaaaatgctgaattttaataataaactaatatacaacaaatatcagaagataaaacatgaataacccaaaaactttacatagataaaaatttctatcaaaaatatattattcaaatacaaataataattcttataaaaaaaatctataattttttaataaacatatctacccgcggtacagtatctagttaccttacaaaaaggatggattacatcacataaatagtatcaaaagtataacttatattagtttgaattatttataagaaaatgacacaaaataaataatataacatcaattttaataagtgatgtggtaattaacttggttagcgtcagttcaatctaattgatacaaatttgtattagtttgcatcattttaagctattgatacaactacaagaaaagcgatttgcaagagaattttacgatggaaaatatccctcgcaaattgtcacagacttgcgagaatcttgcgagggacaaatgacacgtcatgattccgtcgcaaaatttgcaggggaaaagtccctcgcataattgcgtcgaagttgcgagaaaattgcgtggaaatcagaattcctcgcaaatgcatcgcaaatagcgagggatttgcgtgcacaaaaaacgcctcgcaaattgcgacaaacttgcaacgtcactttattttgtagtaaacattgcaacggaattgcgagtcattggcaagttaggtaagcacgttttaaataattttaccggtctagttgctaggtgaacttccctcgcaaattcctagcaaaaaatatcagttcctagcaaatccctcgcaacctgcctagcaaatcccttgcaatatttttttggacctctataaataaccaacataacatttacgaaattataactcaaatcataacatctacttacaaacaaaattaatcttttcaaaaaaaaaacttctaaagaaaataataatgtcttggggtggagagcatgagatttacacattacgaagttggatgtacaatcatagagatcaagcgaccggtaaggcgacgagagagtattatgacagactacgcggtttcatgtatcaagcgacaaacgaaccatttgctcgtgagaacggtacaatattatgtccatgtcgtaagtgtatcaatgagtaatatttggaatttaatgtagtgaataagcatctttataatagaggatttatgccaaagtactatgtttggttacgtcatggagaaggttgtagagatagcgcaggaactagtaatacaaattatggtgtcgagcaacctagtaattttaataatgatgcgaattatggtcagcaagtacctgatcaatttggttatgggtataaccaggaaaatagagttcatgatatggttacagatgcatttcatgaaactattgctgcatttcatgaaactattgctgcatttcctgaatatattagtgaagaacccaacatagatgcacaacatttgtatgttatgttagatgctgcaaatcaatcaatctacgagggatgtagagaaggactttctaagttatctttggcatctaggatgatgactattaaagctgataataactaaagtgaaaattgcatggattcatgggcagaattaattaaggaatatttgccaccggataatatatcggctgagagttattatgaaatacagaagttggtttcgagtcttgggttaccatcagaaatggttgatgtatgcattgactattgcatgattgtctatttctaatgtgtcttatctttgttttgtagcaagcatataactgggactctgcaataaacaagagagttaggcttgagtttgaggcaaagcagaaggataggatgtctaatcaagtctctcggaggaaggaaaagtggaaggaaaagggagatgaggcaaaaccgcggtggatagatcctgatgtgtggccaggtcttgttagcttttggagggatcctaagtcgaaattaaagagtatcaacagtaggaatgctaggtatcatgatccggacggcctggggatatataaataccgctctggccagacctcatagaaagcccgtgcccgcaaacgtgtaagttaatcaactttttttttcttaaaaaaacttgtatttcaaacaacttacctatatgtttatgtgttttagtgtgagatgacaggagaaagtactccagattttttcctcctcttagatgaaacacacagaaaacctgatgggagtttcatcgacagaaagtcagaggagatctataaggaagtgtcatcgaagatttaagaggaagagtcactcctgtgtttaggcgacactacggagagcacgggttcaggcgggttatctgttcaggcaaagaacaagatctatgcacatgtatcttatctctttaaactcaatatagtgtcggacatatggcatcgacttaatatagttgcaacatttttttgttgctttggatttgtctgttgtggcttgcattatgtctttgatgggataattgcagtttttggtgttgctttgtatttctctgttgtggcttccattgtgtcattgtgttttacactgaattgattatgttgtgtttttagtttgcaaaatgtcaatgtgtgtaaactgatatgattatgttgtgaaagaagtttgcataatgtcattgtgtttttggcctgattcagttgtgtttttggtttgaataatatcattgtattttctgcctaatatgattatgtctgaagctataagttttgcattatgtctatgtgtttcgaatttgctttgattatgtttgctcggtttggttgtgagtttctgacaggttgctcctaagaagaaaggcaggatttatggggccagttcattgcagcaagaggcgtcttcagcttatgccggtccggtgcttcctcaagatgatccggttgtgctctcccaaaagctggctgttgctgaagcccttattgcaaaccaggctgagaagatcaccaattttgatgcatactttgactaccttgccgagaaggatccagagttcgctgcactgtttcgaaccagatcctctacaataactgaaccggtcagctccaatcagagacctgaggtgcctaatgccacaactgctgggatcggacttgtggctgtcgaacttgaggttgttgtaattgaccccaacagtggatcctctccatctgatgccttctaaatttttgtattcagtttactctattcactcatcaaaacttaatcttttgtggttaatttttgtataattatttgttggcttgtattttgtacttgaaacttaaaatttcacctttcaaatatgagtttaaggttctttaatcagtattgaaatttaaagtttagtataaagattgaataagaaaattattaaatattgttaagtagaacagtaatctctaaatgtaacagtaatcatgattacaaaacaaaacaaaacaatcgcttttacatcgcaaatccatcgcaaattttgctagggatttgcaactacaaaaacagaacctcgcaaatccatcagaacatttgcgacgaatgagcaagacttagaatttgcgactacttgttactaacaaagtccctcgcaaattgcgaggaatgagcgagaccgcatatttgcaactaatttgctaccgattgtgtccctcgcaaattgcgagtgcttcgcgaggcatttagttcgttgcataatttgcgaggaatttgctactgatttgattttgggacgcgcgttttgcgaggaacagttgttcgtcgcaattccctcgttatctgctatttgtgagggattagcgacggtttcttccctcgcaaaagacatgttttcttgtaaattcacttaattttattaacatcacgtttaaaaatgatataaaaatatacatcaataaaaagtgatgctaataactttttaagtattttaactatagaaaaaaaaactaaccataatttattgtagaatgaggaggaattgttattaccacaaataaataatcataatgagtttattatttattattaatttctacatttctttcaaatcatctaactaaatacatttgttttcttcactacaaatccttcttttacgctcacaatttttgttttactatgttatctccaaaaacgtttttaatatctcataacgtttttactctcattcaattttccaccgtcaaagacaaaatactttcttattttctagtcattctatctttcttttcttaaccatcgcgcaattattatttttattattattattcaaaaatcttccacgaatactacataatcaatatataaatgcattgatgatcattagagctgtgtgttttacttcacagtttggagaaatataaaggtatacacttacaaatgattatttttattccgaccaaataatcaatctcttttttttttgtacaacaaaaaactcaagttcgatgaggattgaggattcaaaggatcttaagttataatcaaaatatgatcctgattctacaaatgaaagagagatggcatagaagaaaattagaatttctaagaagaacgaacaattaatggaaggaagaagcatggaatagaaggaagatgtgtgttattatattattaagatttattgttcatgtgatgtattttataaaatcttgataaaaacattgagtagatattgcaatgagtaatttttgaaaaaaatatccaccatgatttgttattattaaaaaggtaataaataaaatcataattcaaaaactatatttaaaataattctttaactaatataacaattattattattcttaaattcagttatcttaactgaaacaaacactaacaccacttaaataaattgatttaaaaattaacatcatttttagctactgatacaacaatgacatcaattacaataatcgatgtaactattttgattattaacattagttagtaataaactgatgcaaccaatatataaatcacttatataagtgatacaaaactcttttaaattatttttaactaatgcaatatttataataaatgatgtaaaacaacttttttgtagtagtagcatttataatagtctgcattttgaaagtaatttaacttccacaattatgtcactgattataggttgatgaagaggagaaaacaagcttgttggatatttggaaaatgctagaaaaattgacagggacgattacggtgttggagagtaaattcccaactcttattaatcagaaagtgagtgctttagatgaagagcttagtaagagacttgcaactctagagactaatttgaaagggtttcatcccgctgatgtacccattgataatgtcacgtccaacaacaatgaatatgatgaggcacacaataaagaacttgtaagttgtatctcgctaaaaattgtttttcatatttagcatgaattatgatggtgaaatcttaaattacttgattatcgcagtcttggatggtagaagagaagccatcttctaaagatggtttgtctggtcaaagagtagtgaagaaagtcgtctactcaatgaagaacaagaaaaagaaaaagaaagagggagaaatataaaagaatctagttctttgtgaaaagaaatatgcaacaaatgttaagaagaagaaagtgggaatcatgcctaaaaaagtatctccgatacgtgagaagaagatgaccaaagtaaaagaagtgaaggtatctactccaaaagttttaaagaaggcaatgaagagagatgacgacgatgttgtggatgtaactgatgaagttgtagcaaatactctgaaaatgacttccaattctgaagacacattctctaatcctcaagtacaacaggttagtgaagtaatgactatcgtgttgtcgtcaattgaagaccaaattaaaatttggatggtggtactgctagcgggagacgggtgactcaactagccggttatcaaaaacctccttatgtagggaattccacagtgaagcgcgttatcacagatgtatcatcatcctctttcatacccgagcatcttcaaccagtttcagatgaaaaatttcaaagtttcatggattggctaggatttgatgagtaagtttctgttttgcagttctaatatccatgttttcggttctcttttatcattctttttttttccagggaagaaccatttcaaacaagcaattttgatgctcgattcttttggcaaattataactccaagaaaagacttgcaaaatatggttggctgaaagactattccattttatagtttacaattttcaacttgtgtagttgtaaacatttcgcttataaatgttgtttgaattattttgcagcacatgggagctacaaagattatgttccacaaaaggtttatgtgtgatcctttaaaatactcaaatcaccgcattgctttccttgatcaagatttgatcagaaagatggagaaagactacaaacacttttcctcggattctaaaacctacaagtggaccgactattatgcgaatcaccagaatggtacagctcacagttacacagcgacaaacaagaaatggttaattaatatggacacctttgaccttgtctttttgtcaataaaaagcattgggtggttttagatattaacttgaagagaaagaggatctacgtttacaacaacattcccactatcgttgatgaaccagaaatggttcagcattgcatgtttttaaggaagatgatcccagctatgttgtctgaatatattctaaagacgtaagaagagctacgcaatggtggaggtgaagagggtcacgaagaaggtcccgtgaatcacgatccaggtgattgtgcaatctacgcgataaaatacatcgaatgtttgacacttggaaagtcattcgatggattgtgtgatagaaacatgcagttctaaggatcaaacttggtgctgagatgtttgatgaattaagagagtttgctggtacacttaactgtgagatttgtcggaaagaattcgagcttcctcgccttaatgattcgtagaagctgtatttgtgtttttcttttgttatgtggttattttggtttttgttttagacattcatggtatgtgtttcataatttcatattattttgtcacaaatttgtacatttatgcaagttattatgtttttatttctttaagacttctatgttatatgcaagtagaaatgaatttcagactattgagtgactgactcaaaaaaatattgcagtacataaaatagtttaagtctaacaaacttcaaacatgcaaataaatcaaacaagacaataaaagaggtttaagtctataaaacttcaatcatgcaaatgaatcaaacaagacaataaaagaggtttaaatctataaaacttcaaacatgcaaatgaatcaaacaagacaattaagaggtgtacgtctaaaaaactttgaaacgaaatagtagtaaacataagcaaaattatctcttccttgaagtttaactcgtgcatgtcaaacgattgtggtctacttgattgcaattcccacaagcatgttgttttattggcttcgtcttatccataacaatcttcaatgcagatttgactcttgatctctttggtcttccgggttgttgtcgagattctggtggtaaacatatggtcgtcacaacttgttcgggaactagtatagcaaaatccctgggcatgatggcgttagcatatgatgaacatacataattcttgtgatagtaaggatgacacattgatattcgagagacttttcttttttcaccctccgcaattgcgtgagcacgtggtttcttttctagatcaaatatacaacacaaacattttctatccttcaaattaataacatggagagatgctccaaacctcacttgtacctgatgtgcatctatatattgcaaacttagcaacttggcatactatacacgactctacaaaacaattcctaggattgttattagtgaacaatgtttacatagatgtgttgttcaaatagctttagattagaaattcttacttgcaaaatcttttctactccgcgtgtaagagaggttgtcaaattcagtgcgtcattccttcagtctgaaaaccatctagtcatcatggacctaatttcttctaacagctgtacaatagggaaacttctagcaggtgacatgaccttattcattgattcaacaatgttacttgtaagcaaattgtacctatcaccagggaaatgtacacgtgtcagagtcgtacatctgcgtacatctgctctttgaaggtaagcatggagttcaagattcaaagcttgaatcagagcaaaattgatttcaatgtcgactaatctaaaagcattcactgccttctttaccaaaccaaatgtatcccgacctttaaagcagactaatatattttagtacaaatagtatgtacatattccctagctagatttaggataaaacgtctttattgtttttccaatggattggtgcctattagaaattatggcaaggctttcgtcatcttgtatcaaacaacttagttgtttaaaaaaccatttccaatattgattattattagtgtccaccacggcaaacgctatcgggtatagctgaaaattaccatcttggaccgttgcggtaagaagtgcccctaagtattttccttgcaaaaatgtatcatccacacctatcactttcctcatgtaaagaaatcctaaaattattgtaccaaacgctagaaacaagtacttaaatcgtttttcttcatcaactttaagtcgagtaaaagttccagaagtttctctccttagcatgtacaagtacgccaggagctgctcatatccactttctcgactacccctaaccaattgtcgtgcatactttagtttccgatatgtcttccaataatccatgtacacaatattattttaccgtgtgtattagcaagaacataaaatgcgatttaaaaatgtaatactaatagataaaaaatagtaaatcataccttgatttgaaagtgtttattcaacgtttcagcatcatgtattggcagaaccttaggtccaatcctaccaacgtaacctttgtacaagaatccaagtattttgtgtgttgggcgcgtgatgaaacaatctgtaacataacatatatgttctaacttaaataatatcacatgaaactttgtagagtcgcctacactcgaaccctccatcgacatcctttaacccagtagttgacaatataaatttgtagagtcgatttaccaacatcaaaatcaaatttctgtaaaacgacaagtatcttcaaacgtttcttcaagtgctcttttgtttccaaacattgtccaaccgccagctccaatgcagacacatcggttccatcagaatcgttgcagcaatcaaatacactttcatcatcttcaccatctaaagatatattattaacttcggcttcttccatgttttcacttggcaaatcgatttctccctctaccttatagaatatattacttggtcgtaaagaacttgtcaaaatacagttaatgaaaccatcaatttcctcctttgtggattgaactataactttctccttcacttcaactcaaagtcgagcgatttcattcttcatatgccccaaaaaaccttgaaattgtctattattaccaataataacatgtggtgtatctgcgggtaattttttggatattgagatcttgaaaactacttcgaatagtctattatccaaaccgtaatcatcatacaccattggaacgaaatcatgaaaattggtttgactgttaccttcaagaactcgacaacttttactattatcgactacaaaaagccatatggttttctcaaagatccatctgccacatacgagaataatctaatccatacccaaaccgcttattcttgttttgcctaaaacattatagtctgaagaaagcattattagaaaacatgaaaaagtcgaaactcaaaaaaagaaacaaaggaagaattgtcgatgagatcaagagaagaaacaaacgaatcaaataagatcccgaaaaggaagcgtaatcaaagaatctaattgaaacagttggtatgcgtaaaataaggaaaaaatggaaataaaactctataagaatatactttttattctcaatttaatgcattaaacgtcaaacatggcaaatttttaacaaatctgatgtcatcaactataagtctatcgtaacccaatgtaaataaactggttcacccatgctctcaaaccatgaaacatttttgataatacgtgtaataacgagatgtttcaaattttgaaaaccaatctgtaatgtctacataaaacaaatctgtcgcgaaaaaaacaatatgctataacctataaatctatcataactatgactaaataaacatgtggtacgaaaaagtctgtcgaacaaaaagtgtggtggacaaacaaatctgtcgcaacatgaagcacatatttttcagagacgaccaaaataacggagtggcagtttcgtaaataaaattacttttttgaatgatttagtaatgacattcctatgatattgtttttcttacaaagaaaataaatgacattttagaccaaaatattactcctataacccatatttttggtatgtcattctagtagttaaccctaaaatatgagtctttctagtaattttctttttaaaacttgctgttgattatgttgttagcgatcagagttagaatttttacatgatttcgcgtatccataattagtagaattttaacatgatttcgcgtatccataattagtttttggatgtaaacgcttttaaaatcatccaaattaaaaataaatgtatttttgggtatgattaggcattttgtagaatgtttaagttgacttgaacggttttcaactacaaacgataacataacatttttggtttgttgtcaagtcttagtcaaccaataatttttttgccactagaatattgtattaatcacagtaaatccaaaaaaaagaaaaaagtcatatttatcatgagttcaaaatttataattatataaaagaaaaaggtttatcagttatgcaaagtataagccaacacatcccaacacttgcatactttaaaaatgtctcgttagctacacgaaatattgtcatcacatacggacatacacgaacaaacataagtcatgttgccaacaccataaccatcctactttgatgcttcggtcgtcagaatccggcgttgaccaatgttgatcgacgtttaccgatgttgaccaaaaattatattcaatttttttttttttaataaacaaattaaaataagaatttattttataatttaaaaaaaaaactaataacgaaatatactacaaataatataacaatataaaccacaaaaacattatataacaaaattttggtttatatttggattgatataacaagatatacaaaatatatatataacaaattagacaacaaattcttttttttatactatattttgttatcatattttggtaatataagaaaatatacattttacttttgacaatcatttttcttctataaattgtagtgttcatatatatatttattaatttggtatatcatttgaatttgttaatatataaaaaatgcaaaggtcattagctgatatatattttttcttatataaatataattattacttttctattattttacagttctagtatacacatgcatttttttttcctatctctgttaagaaactagtagaaaaaaagaagcgctgacacagatttataaacaaaaacaaataaataaaagcgaaaagaaacaagttgaaagtttttttttttttttttttttttaatccaaactgaaccaaatagacatgtgaatgttgttgtgagattttttcctctgttctttgaagaatatgaggttgggattaatctcaattcatcaccgaatctgattccgccactttgttcttgcctctttcttctcctccatgccttctctttcgatattcatatctgcttgattatttctttagtagttgcagaagcttcataagcagcaaaactaaaaggttctaaagcttttgtcctaatttaatccattcgattcatacatgttatttcggtaaattttgctgtcttaattcgtaccatttctgtctttttttttcttggtcctactgaatcaaagtcatcatcagattggtccaattttagctttaagaaactcaactaatttactttcatctctttatcagatatgaagcaactctggactttcttcttcttgtctttcctttgtagtggattgttcagaagaacacattctgagaaaccaaaagttgtgaaaatcggttctatattcagttttgattcagttattggcaaagttgctaagatcgctattgatgaagcagtaaaagatgtgaattcaaatccagacattctcagcggaacaaagttttctgtttcgatgcaaaactctaactgcagcggttttatgggcatggttgaaggtttaaccctgtgagatctctttagttagtgtttaggatgtcatcaatattgactcatttgtttgtttgtttgtttgtttgtttgttgcagcattgaggtttatggagaaagatatagttgggattataggaccacaatgttctgtagtagctcatatgatatctcatatggctaacgaacttcgtgtaccgcttctttcgtttgctgtaaccgatcccgtaatgtcgccgttacagtttccgtatttcattaggactactcagagtgatttatatcaaatggatgcaatagcatccattgtagatttttatggttggaaagaagttattgctgtgtttgttgatgatgatttcggtaggaacggtgttgctgcgttgaacgataagcttgcgagtaggagattgagaattacttataaggcgggtttacatcctgacacggctgttaataagaatgagatcatgaacatgctgataaagatcatgttgcttcaaccgaggattgttgtgatacatgtttattcggagttggggttcgcggtttttaaggaggctaagtatcttggaatgatgggaaatggatatgtttggatcgctacggattggctctctacgaatcttgactcttcttcgccgttacccgctgagaggttggaaactattcaaggtgttcttgttctgcgtccacacacgccggattcggattttaaacgggagtttttcaagaggtggcgtaagatgtctggtgcttctttggctcttaatacatatggactctatgcttatgattctgttatgttgttagcccggggtttagataagttctttaaagacggtgggaatatatcgttttcgaatcactcaatgctcaatacgttgggaaaaagcggaaatctcaacttagaggctatgactgtctttgatggtggagaagcactgcttaaagatatcctcggaacgcgtatggttggtttaacgggacagcttcagttcactccagacaggtctcggacccgtccagcttacgatattatcaatgtggcgggaaccggtgttcgtcaaataggctactggtcaaatcattctggtttatcaactgtattacctgagttactctacacaaaggagaaaccaaatatgtcaacaagtccgaaactaaagcatgtcatttggccgggagaaacgtttacgaaacctcgcggatgggttttctctaacaatgggaaagaactcaagattggcgtgcctcttcgcgttagttacaaggagtttgtatcacaaattcgcggaaccgagaacatgttcaaagggttttgcattgatgtcttcacggctgcagtgaatcttttaccgtacgcagttcctgtcaagtttattccttatggaaatggaaaggagaatccgagctacacgcatatggttgagatgataacaactggtgtgagtgcttattacattctttttcatagaagttacttttaccatttctacttactgtaaaaatggatttactgcagaattttgatggggtagtaggtgatgttgccattgtaacaaaccggacaaagattgtagatttcacacaaccatatgcagcatcaggactagttgtagttgcaccttttaaaaaactgaattcaggagcctgggcttttcttcgacctttcaaccgtcttatgtgggctgtcacgggttgttgctttctctttgttggcattgttgtttggatcttggaacataggactaacgatgaattcagaggcccacctaagagacaatgtgtcacaattctctggtcagtttactatatatttcagagaagtagcttagagacaactgcttgttatcttttggctgatccatttattgtttgtttgatatctgcaggtttagcttctcgaccatgtttttcgcgcatagtatgtcgaaagaaaacttactgtgccactggttattgtttggcttttgactgatatgactctttcccttggttttgacaggagagaacacagttagtacacttggacggttggttctgatcatatggctattcgttgtactaatcatcaactcgagctacacggctagtctgacatcgatattgacggttcagcagctctcttcacccatcaagggaattgaaagccttagagaaagagatgatccaatagggtaccaggttggttcatttgcagagagttatttgaggaacgaactcaacatatcagagtcacgcctagtcccacttggaacacctgaagcctatgctaaggcattaaaagatggaccaagcaaaggaggcgttgccgcgattgttgacgaacgtccttatgtcgaactcttcctctccagcaactgcgcttatagaatcgttggtcaagagttcaccaaaagtggctggggatttgtaagtataaagatattgtcaccatttggtttggttagattctgttacttatgtataaatggttttacgtaggcctttcctagagactctcctctagcaatagatctatcaacagcgatcttagagctagcagagaacggagatttgcaaaggatccacgacaaatggctaatgaagaacgcatgcactctagagaacgcggagctcgaatcagacaggcttcatctaaaaagcttttggggactatttctcatatgcggcgtcgcgtgcctcctcgctctcttcctatactttgttcagatcatccgtcagctctataaaaagccaaccgatgatgccattgcaagagatcaacagcagaatcatgactcttcctccatgcgctccactcgtttgcaaagattcttgtctctcatggatgagaaagaagagtccaagcacgaaagcaagaagagaaagatcgatggttcaatgaacgatacatcgggatcaacacgatcacgaggtttcgatagagaaagaagcttcaattcggtaaatccattagactgaaactgtagttacagagacatatacaattatttttgaactgattacagagaaaaatttaatttttttcttagacatttattatagtatagtatatagtatttatatttcacaaaactctaacaaccacaaacacaaggttagagaactaacgattctaaaacgttgaacgaaaccataccgtgacaataaattagttgggaccataaaggttggtgtctctttcagagttgagagaaggccacgacattctaaatcctgatccaatcgcttcaccaactaataaattttctcaattttggacagacaaaacaatgaaacctatcgataataataaccacacaaaccccaaataaaccctcagcttccttatcccttcttctggggaccaaaaaaaacacagaagagcttcttcttcttcttcttctacatggcaggagaatattccggtagccggagttctaacacacagcttctcgcggaacttgaagctctaagtgaaaacctttaccagaaacctcaggtttcagttggaaacaggagaacaaactctctcgctctccctcggagttctgttccgtcgcttgttacctctgctgatgaagtgagtacagcacgagctgaggatttgacagtatcgaagccgcgggctcggcgtttatcgctgtctccgtggcggtcgagaccgaaacttgaggtagaggaggaagagaatgttactcagagcaacaggattgtcaagaaaccagaggagtcgtcatcgggttcgggtgtgaaggaagagaagaaagggatttggaattggaagccgattcgagggctggttcggattggtatgcagaagctaagctgtttgttatcagtggaggttgtggcggcgcagaatcttccagcgtcgatgaatggtttacgccttggagtttgcgtgaggaagaaggaaactaaagacggtgctgttcagacgatgccgtgtagggtttctcagggttctgctgattttgaggagaccttgtttatcaagtgccatgtgtattactcaccggcgaacggtaaaggtagtccagcgaagtttgaggctcgtccgtttttgttttatcttttcgccgtggatgccaaggaactggagtttggaaggcatgtggtggatttgagtgagttgattcaggagtcggtagagaagatgaattacgaaggagctagggttaggcaatgggatatgaattggggactttcagggaaggctaaagggggtgaattggctttgaaattagggtttcagattatggagaaagacggtggagctgggatttacagtaaacaaggcgaattcgggatgaaaccgagtagtaaacctaagaatttcgctaattccttcggtcgaaagcaatcgaagacgtcgtttagtgttccgagccctaaaatgacgagccggagcgaggcgtggacgccagcgagtggtgtggagtcagtttcggattttcacgggatggagcatttgaatctggatgaacctgaggagaaacccgaggagaaaccggttcagaaaaacgacaaaccggaacagagagctgaagatgatcaagaggaaccagattttgaagttgtggataaaggagttgagtttgatgatgacttggaaactgagaaatctgatggaaccataggtgaaagatctgttgagatgaaggaacaacatgttaatgttgatgatccacggcacataatgagactcaccgagcttgattcaattgcaaagcagatcaaagcgcttgaatcgatgatgaaagacgagagtgatggaggtgatggtgaaacagagtcacaaaggctagatgaagaggaacaaactgtgacaaaggagtttcttcagttacttgaggatgaagaaaccgagaagctgaaattttatcagcacaaaatggacatctctgaactgcggtctggcgaatccgtagacgatgaatcggagaattacctctcggatctcggtaaaggcattggttgcgttgttcagacacgagacggtggttacttagtctctatgaaccctttcgacacggtggtcatgaggaaagacactcctaagcttgttatgcaaatctccaaacagattgtggtaaggcctgaattaatatttacataatcaaaagaatcctacaacaacaggaatctgaaatctttattacaggtactaccagaagccggaccagccactggattcgagctatttcatagaatggcgggttcgggtgaggaactagagtcaaagatatcttcgcttatggcgatagatgagctaatggggaaaacaggggagcaagtggcttttgaaggaatagcgtcagcgattatacaagggaggaacaaagagagagctaacacgagcgcagcgcgaactgtcgcagctgttaaaacaatggctaacgcgatgagcagcggaagaagggagagaataatgaccggtatatggaatgtggaggagaatccattgacttcggcagaggaggttttagccgtctctttacagaaactagaggaaatggttgttgaaggacttaagattcaagctgacatggtggatgatgaagctcctttcgaggtttcggctgcgaaaggtcagaagaatccacttgaatcgaccattccgctggaagaatggcaaaaggagcatcgcacacagcaaaagctaacggttttggcgacagtacagctccgtgacccgacaaggagatatgaggctgtaggagggacagttgtggtagcagtacaagcggaagaggaggaggagaaagggttaaaggtaggaagtttgcacattgggggagtgaagaaagatgcggcggagaagcggaggcttaccgcggcgcaatggcttgtggaacacggaatgggaaagaaagggaagaagaagagtaatataaagaagaaggagaaggaagaagaagaagaggagatgttgtggagcttgtcatctagagtaatggcggatatgtggcttaaatctataaggaaccctgatgtgaaattgcattagttgatcttggaggtattcatactatacaataagatgcatttgtttatttatgttttgtatattattttttaagagtttcaaattttacctgcaacaaacattagtcaaatgtctttttaccaaatttttaaatttcaggaattggttcaactaattttccctaatgttatgtattgtttttttctggttttcttttctaagaaagtcttttatatattaactctaaagtgtacaaatgcataaaaattctacctttccaaaactattttgtacaaaactataaataggacatgataaacatgtagagaaaaaatcaactcaaaaattaaacccacgtaaggaatttatataataaataataattacatagctaaatcctattttccaaaaattgtgtatagactattaagtaaccaaactattagactgttaaatttggtctatccatagattaaaaggagaagccaattattctcacttttcattctttttcctcgccttcttatgccattgttctaatgcttttgaagtttgctcatcaaacactgatcgcttcattgtggatcccatctataaaatatatattgtaaaagaattatgcaatgataaaacaactaactctatgaaaacattcaaaggaagaaaaaaagatatataaatgttgcatacctgagtgacgagagcgtaaaggggcaatgtgatataactgcataggaattgtactcccaccctaaagccaagaccatatattcaattttcacaaactcgatcgaaaacttggtaaaaaaaattgtttatgataatactattactcaccctaggcagacacgaatgattataaggccaaaatggtgatgaaaacaggaccttagcccaaactcatactgcaacaagaataattataacattattataaaaatttctagaagcaattagtaccaacataaagtaaaaactagaagaagagattctgaaaagtttacccatatccaaaaaaaataagttatctcaaaagcattctgaaaagtatccaaaaaaataaaatcagtaattatactaaatcataggcttaggcattcggatttcggttcggattcagtttggataattcggatgagggagtttgttatccgttcggattatacgactattcggttcggttttggttcggatggtgtcggattcggatcactaaaacatcacatatatcattcacttatataaattttcacctgaaacagaacgaagtggatcatatgaagtactagatcgggtttttcaaaccaaaaatgttggtctgagacgttgacaactggcatcccttgaattactgcatgtctctcttgaatctccaatgccatgtacgatataatggcttgtagctttgttcctatggctagtgttaactttaaacataaaccacaattagttcataaaatgttctttaatctttttgaagtaagaatgagcttcgtatagtagataaattaatgacttactagaggaggaatcatggtgattacggcagtaacataccatcctataaagttttttgtttttatatatagatcaattattagtaagtcaagatatcataatgtagaagtacgataaactaaagactaaccgtgaacatcgaagagtaaaaacaacattacaaaggcccaaagctcgggtctgtcatcatcagtggtagatttcattagaaacaaataaagcaaactagactaaaaatgtgaaagaggatatgagttaccttattcctacaaccaccttgaagtcgtcttccaaagatcttttgatgtacttttgaaaatcaaacttcataccaggtgccaaatgaacctaaatacatagggttttagagcaacaaacaattggatattaatggagaattaatgtaagatattaatgcactcacacttatgaatccatgtcgcattgtcaagtaatcagacttcctcactgatctaagtatttgacggaagaagcacatctgaaaattaacctctagttccattagattagagatgataattgtgcaagaataacacttagaatttaagaaaatcgtacaacgtagaagaagaatttattgctagcccaagaattgacatgttctcggacaaatgatgtctcatgtgtgagtctaaatcttgatggatctgtattaaaaaaataaaaatagcaaggacagtaaaattttgattagctaggacagtaaaattttgatcaccatgcaaaatataaagttcactctaccattcatcatttcttgttcatggatgacctcttgctcccatactttccagccacgaatctatgtttacgaaaaaacgaattagttcaattaaaatcatcatcaacacatatatacaatgtgaaaaatttctaccaatataccttggctcttccaagcatcatggttatagcactatatataacatggaacacggccaagaagaatatgaatatatgcacttgatgtaatgcgtttaatgatataagtgcgacataatcctgaaacgataacaaaataataagttaataaaactacttaaaacttttatgctgaaacagtagttaatattactttcttgcaatttactggaggagcgtcggccaaagaacgacgttgaacagagtagagaatacgcattgcatggtctgttttcttgagctttttacgatcatcttcactaggtccatcatatggaccacaaaaagacattgcatggccgtatcttgatggaacacatatgctcgcaatgtagttttggccaaatgttagaagcagggaaataaatcccaaaaccataagctctacaatatgtaacataattttgagttaaatatatatatataggaaccaaaacttttcatgaaaataatagggatacgatccatcagttacatccctaaccatacgctaaccacacgaaaaattccatcttcactacataaaagaaaagatagcactccaaccagaagaccaaaatagattgaagacgaagacggtcaaagaaaataacagattgatttattctgttagcgtgtgaggcttatctattacggaaatcaacgtgtttttcacttttttgattactttgttaaactcatatattggttgtgtggtttgtagagcttcaatctgtgtgctcactgatatatttgtattatcgtctttaaattaataaagaaaatatatatatatatatatatatatatatatatatatatatatgaacgaaaacaattgttccttgatttcaagaaaccaaaaaaaataatttctatattgttaccatttttaatcttctcaagagcttcaaacaaagctttcttcttctttcgttcgaaaacctacaagcatggaattaagtgtaaccaaaaaagtagcaaatgcaaagcatatatacatccataaggtataatggtgttctctatcaaatcacctcgccgactttgtgaatgatgagttccaaaataatggagatcaagatgataacaccacaaactgtagaaacggcccaagtcggggtctggtctagctgtcttggaccttcgccacctcctccaccaccacctccagccattacttaaaaccgtgatgattatctttttatttttattttttagtatgtgtttggtatcagaatttcaatttcaaaagagaagagacaataaaaatgaagtcaaagagatagagagaatgaaaaggaaagggatgatgttgccattgacgagcatgcgaaaatagtagataagagtgtagacaaatccggtgagttattttttaaaaaatattaattttgttttttttatcaatttattgtcttccctattttacaggtttccacattatttaagtgggaatgtatggagaagaacgagtacggaataattggtggaggaaatttagaagaaaaaaaatgagagaattaaagagacgtcgttagcaaactacaatagacatcattaagcaattggattctagatatatagtattcgttagaataattaataaattaaactagcatgcaaaattaaaaagcatgtgcaattaaaatgctagtaagaagaaaataaactggacaaatcgtctttatgtactacaaagaattgttccatttcttactgcataaaatgtagaaaatagtgggaaaagtgataccatcgcctaatttatactattttaataggatataagtaaaaaaatctgtatcatattacagaagactcgcatcatattaaagagagacaatttttagagctaggcccgaacaaaatattcattagatccgtttcgactcagttttttatttgatttgattcaaaaatccgaatatccgtaagattttcaagcaaatcaaataggaaaatataatattcgtaaaaatcgatgcaaataacaaatattatccgctttgattcgtattttatatatatatatatatatatatattagaatatataattatgtatatatataaatatcataatatagtttgtatatttatatatttttgggtttatatttgtaacttcagtatttttcttctttggaaatcttgtgtttttatgttaagatgtaagtttgatcatttttctttcatgttagtggtatcttaaactatcaggttttaggtcatctccaacaacagtttctcaatgagtaactgaagattaaaaaaataaaaagtaatgaaaaaggtggaaagagaaagagatacgtttctcatatgagaaacccactttaatacttgtgtctttatgattggtcagatttttttatttataatttaaaatttaaataaatgatttatttattattaactgattaaaaaatataattgagagactcacaccatctttttgcgttggagatgcccttagtttttagaattagtttgatggtattttcttgatcagtgatatcaaaaatagttatgttctgttttttggaacttattttgacatcatgtcaaacaatttttttgagaaaaataattagatgtatcaaagcgaatttccgcaaatatcacaaaaaaatctggatattcgaatttttggatattcggaaatttttggatcaaaataatttttgcctaacccgcaaattagcatatatttgttagttttttttagacatgaccaaaattaaaccgtaaccgtatttcgggccgtaaccggactattttcaaactgtaaccgtataaaacggttaataaccgtaagtgttgacaataaaaatggaatagttacagttaaaaaaaatatactaactatacccgtcaataaaacgtaaccatatcaaactcgtagttaaaagtacggtgaaccgtacgattaactacatagataacaacatagttaaaaccgtaaaaatacaattttaaatatttgtaatacaaaaatatatatcaaatgttcaggaaaagaatttcaaaaaagtaaataatatcgcatataaaaataatctaaaacatacttttcatttttaaaagcaataaaaaagtcgaataaccataaacatatttaaccgtaatcattgtaactgtaaccgtattcaaccgtaattgtatctaaatataaccatcttaaccgtatatataatggttaaggttacgattaaagaaactttataaccgtaacaatggtcatgcctagttttcttatttaattgggttgtcgagttgtagccccacacaatttcctttttcttgcctcaaccccatcaatgttgatactttatttgtaaccttgtaagttgttaaacccctaaaatttgaatttcgagttataagagcaactccaatggtttagaaccaattggtttttaattttgaatcttagccttattttaaattaaaatattgcttttactaagttaagaaaagttaacaaaaacttaactaatttctactccaatggttaagagctattggtttcttaagaaacaaaaatttaaattattccaaaacaatgtcttataatacacgcaactacacaagatgtttataatacaattcaaatcaccgaggacttccaactaggcaactacacaagatgcttgttgacactatcacaaatccctgcaaaatgatgtaaagacattacaaagagattgggggacttccaaatatatgattgtggtgaatatgaattaacaaggatcacaaaacaataaaaacatacttcagtttatgtttattgtaccttgcaaagaatactgactagtttctgttactaaggtcaccaagggaacaataatgatatgacaatgatcaacaaggaaattgaaattagactaaccctgtaagaagagctgtagtactatcaatcgctagaagcataacttataaacttataggagaaatacttaaacaaaaaggaaaattcaaagctt

SEQ ID NO: 1183 - DNA, 109431 bp, Arabidopsis thaliana
gaattcgggatgaaaccgagtagtaaacctaagaatttcgctaattccttcggtcgaaagcaatcgaagacgtcgtttagtgttccgagccctaaaatgacgagccggagcgaggcgtggacgccagcgagtggtgtggagtcagtttcggattttcacgggatggagcatttgaatctggatgaacctgaggagaaacccgaggagaaaccggttcagaaaaacgacaaaccggaacagagagctgaagatgatcaagaggaaccagattttgaagttgtggataaaggagttgagtttgatgatgacttggaaactgagaaatctgatggaaccataggtgaaagatctgttgagatgaaggaacaacatgttaatgttgatgatccacggcacataatgagactcaccgagcttgattcaattgcaaagcagatcaaagcgcttgaatcgatgatgaaagacgagagtgatggaggtgatggtgaaacagagtcacaaaggctagatgaagaggaacaaactgtgacaaaggagtttcttcagttacttgaggatgaagaaaccgagaagctgaaattttatcagcacaaaatggacatctctgaactgcggtctggcgaatccgtagacgatgaatcggagaattacctctcggatctcggtaaaggcattggttgcgttgttcagacacgagacggtggttacttagtctctatgaaccctttcgacacggtggtcatgaggaaagacactcctaagcttgttatgcaaatctccaaacagattgtggtaaggcctgaattaatatttacataatcaaaagaatcctacaacaacaggaatctgaaatctttattacaggtactaccagaagccggaccagccactggattcgagctatttcatagaatggcgggttcgggtgaggaactagagtcaaagatatcttcgcttatggcgatagatgagctaatggggaaaacaggggagcaagtggcttttgaaggaatagcgtcagcgattatacaagggaggaacaaagagagagctaacacgagcgcagcgcgaactgtcgcagctgttaaaacaatggctaacgcgatgagcagcggaagaagggagagaataatgaccggtatatggaatgtggaggagaatccattgacttcggcagaggaggttttagccgtctctttacagaaactagaggaaatggttgttgaaggacttaagattcaagctgacatggtggatgatgaagctcctttcgaggtttcggctgcgaaaggtcagaagaatccacttgaatcgaccattccgctggaagaatggcaaaaggagcatcgcacacagcaaaagctaacggttttggcgacagtacagctccgtgacccgacaaggagatatgaggctgtaggagggacagttgtggtagcagtacaagcggaagaggaggaggagaaagggttaaaggtaggaagtttgcacattgggggagtgaagaaagatgcggcggagaagcggaggcttaccgcggcgcaatggcttgtggaacacggaatgggaaagaaagggaagaagaagagtaatataaagaagaaggagaaggaagaagaagaagaggagatgttgtggagcttgtcatctagagtaatggcggatatgtggcttaaatctataaggaaccctgatgtgaaattgcattagttgatcttggaggtattcatactatacaataagatgcatttgtttatttatgttttgtatattattttttaagagtttcaaattttacctgcaacaaacattagtcaaatgtctttttaccaaatttttaaatttcaggaattggttcaactaattttccctaatgttatgtattgtttttttctggttttcttttctaagaaagtcttttatatattaactctaaagtgtacaaatgcataaaaattctacctttccaaaactattttgtacaaaactataaataggacatgataaacatgtagagaaaaaatcaactcaaaaattaaacccacgtaaggaatttatataataaataataattacatagctaaatcctattttccaaaaattgtgtatagactattaagtaaccaaactattagactgttaaatttggtctatccatagattaaaaggagaagccaattattctcacttttcattctttttcctcgccttcttatgccattgttctaatgcttttgaagtttgctcatcaaacactgatcgcttcattgtggatcccatctataaaatatatattgtaaaagaattatgcaatgataaaacaactaactctatgaaaacattcaaaggaagaaaaaaagatatataaatgttgcatacctgagtgacgagagcgtaaaggggcaatgtgatataactgcataggaattgtactcccaccctaaagccaagaccatatattcaattttcacaaactcgatcgaaaacttggtaaaaaaaattgtttatgataatactattactcaccctaggcagacacgaatgattataaggccaaaatggtgatgaaaacaggaccttagcccaaactcatactgcaacaagaataattataacattattataaaaatttctagaagcaattagtaccaacataaagtaaaaactagaagaagagattctgaaaagtttacccatatccaaaaaaaataagttatctcaaaagcattctgaaaagtatccaaaaaaataaaatcagtaattatactaaatcataggcttaggcattcggatttcggttcggattcagtttggataattcggatgagggagtttgttatccgttcggattatacgactattcggttcggttttggttcggatggtgtcggattcggatcactaaaacatcacatatatcattcacttatataaattttcacctgaaacagaacgaagtggatcatatgaagtactagatcgggtttttcaaaccaaaaatgttggtctgagacgttgacaactggcatcccttgaattactgcatgtctctcttgaatctccaatgccatgtacgatataatggcttgtagctttgttcctatggctagtgttaactttaaacataaaccacaattagttcataaaatgttctttaatctttttgaagtaagaatgagcttcgtatagtagataaattaatgacttactagaggaggaatcatggtgattacggcagtaacataccatcctataaagttttttgtttttatatatagatcaattattagtaagtcaagatatcataatgtagaagtacgataaactaaagactaaccgtgaacatcgaagagtaaaaacaacattacaaaggcccaaagctcgggtctgtcatcatcagtggtagatttcattagaaacaaataaagcaaactagactaaaaatgtgaaagaggatatgagttaccttattcctacaaccaccttgaagtcgtcttccaaagatcttttgatgtacttttgaaaatcaaacttcataccaggtgccaaatgaacctaaatacatagggttttagagcaacaaacaattggatattaatggagaattaatgtaagatattaatgcactcacacttatgaatccatgtcgcattgtcaagtaatcagacttcctcactgatctaagtatttgacggaagaagcacatctgaaaattaacctctagttccattagattagagatgataattgtgcaagaataacacttagaatttaagaaaatcgtacaacgtagaagaagaatttattgctagcccaagaattgacatgttctcggacaaatgatgtctcatgtgtgagtctaaatcttgatggatctgtattaaaaaaataaaaatagcaaggacagtaaaattttgattagctaggacagtaaaattttgatcaccatgcaaaatataaagttcactctaccattcatcatttcttgttcatggatgacctcttgctcccatactttccagccacgaatctatgtttacgaaaaaacgaattagttcaattaaaatcatcatcaacacatatatacaatgtgaaaaatttctaccaatataccttggctcttccaagcatcatggttatagcactatatataacatggaacacggccaagaagaatatgaatatatgcacttgatgtaatgcgtttaatgatataagtgcgacataatcctgaaacgataacaaaataataagttaataaaactacttaaaacttttatgctgaaacagtagttaatattactttcttgcaatttactggaggagcgtcggccaaagaacgacgttgaacagagtagagaatacgcattgcatggtctgttttcttgagctttttacgatcatcttcactaggtccatcatatggaccacaaaaagacattgcatggccgtatcttgatggaacacatatgctcgcaatgtagttttggccaaatgttagaagcagggaaataaatcccaaaaccataagctctacaatatgtaacataattttgagttaaatatatatatataggaaccaaaacttttcatgaaaataatagggatacgatccatcagttacatccctaaccatacgctaaccacacgaaaaattccatcttcactacataaaagaaaagatagcactccaaccagaagaccaaaatagattgaagacgaagacggtcaaagaaaataacagattgatttattctgttagcgtgtgaggcttatctattacggaaatcaacgtgtttttcacttttttgattactttgttaaactcatatattggttgtgtggtttgtagagcttcaatctgtgtgctcactgatatatttgtattatcgtctttaaattaataaagaaaatatatatatatatatatatatatatatatatatatatatgaacgaaaacaattgttccttgatttcaagaaaccaaaaaaaataatttctatattgttaccatttttaatcttctcaagagcttcaaacaaagctttcttcttctttcgttcgaaaacctacaagcatggaattaagtgtaaccaaaaaagtagcaaatgcaaagcatatatacatccataaggtataatggtgttctctatcaaatcacctcgccgactttgtgaatgatgagttccaaaataatggagatcaagatgataacaccacaaactgtagaaacggcccaagtcggggtctggtctagctgtcttggaccttcgccacctcctccaccaccacctccagccattacttaaaaccgtgatgattatctttttatttttattttttagtatgtgtttggtatcagaatttcaatttcaaaagagaagagacaataaaaatgaagtcaaagagatagagagaatgaaaaggaaagggatgatgttgccattgacgagcatgcgaaaatagtagataagagtgtagacaaatccggtgagttattttttaaaaaatattaattttgttttttttatcaatttattgtcttccctattttacaggtttccacattatttaagtgggaatgtatggagaagaacgagtacggaataattggtggaggaaatttagaagaaaaaaaatgagagaattaaagagacgtcgttagcaaactacaatagacatcattaagcaattggattctagatatatagtattcgttagaataattaataaattaaactagcatgcaaaattaaaaagcatgtgcaattaaaatgctagtaagaagaaaataaactggacaaatcgtctttatgtactacaaagaattgttccatttcttactgcataaaatgtagaaaatagtgggaaaagtgataccatcgcctaatttatactattttaataggatataagtaaaaaaatctgtatcatattacagaagactcgcatcatattaaagagagacaatttttagagctaggcccgaacaaaatattcattagatccgtttcgactcagttttttatttgatttgattcaaaaatccgaatatccgtaagattttcaagcaaatcaaataggaaaatataatattcgtaaaaatcgatgcaaataacaaatattatccgctttgattcgtattttatatatatatatatatatatatattagaatatataattatgtatatatataaatatcataatatagtttgtatatttatatatttttgggtttatatttgtaacttcagtatttttcttctttggaaatcttgtgtttttatgttaagatgtaagtttgatcatttttctttcatgttagtggtatcttaaactatcaggttttaggtcatctccaacaacagtttctcaatgagtaactgaagattaaaaaaataaaaagtaatgaaaaaggtggaaagagaaagagatacgtttctcatatgagaaacccactttaatacttgtgtctttatgattggtcagatttttttatttataatttaaaatttaaataaatgatttatttattattaactgattaaaaaatataattgagagactcacaccatctttttgcgttggagatgcccttagtttttagaattagtttgatggtattttcttgatcagtgatatcaaaaatagttatgttctgttttttggaacttattttgacatcatgtcaaacaatttttttgagaaaaataattagatgtatcaaagcgaatttccgcaaatatcacaaaaaaatctggatattcgaatttttggatattcggaaatttttggatcaaaataatttttgcctaacccgcaaattagcatatatttgttagttttttttagacatgaccaaaattaaaccgtaaccgtatttcgggccgtaaccggactattttcaaactgtaaccgtataaaacggttaataaccgtaagtgttgacaataaaaatggaatagttacagttaaaaaaaatatactaactatacccgtcaataaaacgtaaccatatcaaactcgtagttaaaagtacggtgaaccgtacgattaactacatagataacaacatagttaaaaccgtaaaaatacaattttaaatatttgtaatacaaaaatatatatcaaatgttcaggaaaagaatttcaaaaaagtaaataatatcgcatataaaaataatctaaaacatacttttcatttttaaaagcaataaaaaagtcgaataaccataaacatatttaaccgtaatcattgtaactgtaaccgtattcaaccgtaattgtatctaaatataaccatcttaaccgtatatataatggttaaggttacgattaaagaaactttataaccgtaacaatggtcatgcctagttttcttatttaattgggttgtcgagttgtagccccacacaatttcctttttcttgcctcaaccccatcaatgttgatactttatttgtaaccttgtaagttgttaaacccctaaaatttgaatttcgagttataagagcaactccaatggtttagaaccaattggtttttaattttgaatcttagccttattttaaattaaaatattgcttttactaagttaagaaaagttaacaaaaacttaactaatttctactccaatggttaagagctattggtttcttaagaaacaaaaatttaaattattccaaaacaatgtcttataatacacgcaactacacaagatgtttataatacaattcaaatcaccgaggacttccaactaggcaactacacaagatgcttgttgacactatcacaaatccctgcaaaatgatgtaaagacattacaaagagattgggggacttccaaatatatgattgtggtgaatatgaattaacaaggatcacaaaacaataaaaacatacttcagtttatgtttattgtaccttgcaaagaatactgactagtttctgttactaaggtcaccaagggaacaataatgatatgacaatgatcaacaaggaaattgaaattagactaaccctgtaagaagagctgtagtactatcaatcgctagaagcataacttataaacttataggagaaatacttaaacaaaaaggaaaattcaaagcttgaataagttaaagaacgaaactattcacctcctttttcattaaccaataaaacatgtcatatcaaattatatttaaattatataataaagtaaagctataattacaaaacagaaaaaaggaaacaaaagataaattacattaacattaacgtaattaacgtcgttaatctaaactattaataatattcacacttacactaactttgtcttctcctcttttttttattttttttttattttgtttataattaaatttagcaattgttttaaaaaataagaagtttaataaaaggaaacaaaatctgacatcttctctttttttttctttatataaataaatatagattagggttaggtgctatctctttcttttaactcaacttatctttagaagttctttttaaaagcacaacaatttttttgaagaaggaacaatactttatttttaaatcatcaaattcacataaagaatttggttataaatcatcaaattcaggtaaatcatcttcgttaaagaaatatttctcaaggctgattgtgaacttataaagacaactaattataattgatatatgtgtgagtttttatgttaattcatctttctttctgttattgaacttgttgattaggaaacgttaagaacagccttcagattttgtggttgttaaacaaagacgaattgacaactttacgcaaggtaaaacacaaatatcaattaactaatatatatataatgacaataataataatattagataattaattgcagttgcaatggagagtaatcatataagtgaagagtttttagtcgaggaaaaagatgacccaataagtgaaaacgaagcttcatacaatgaatttgtagaagaagatgaaatagctaacaacgaggatgatgttgtaactgaagaggctactgcttcagaagcaaataatgataatgagaagaaatatgaaatatatattggaatggagttaattaagttcatatgaaattgcagatataacttataaaaagtatggaggtaatcatggtttcaatgtaagaaaacaacggaggatgaaaaaaaagagaaggtagtaaggcttctttatgtttgctcaaaacaaggatattggaaagaacctaaggtcaaaaaatcatatttacagctcataacactgaattttaagcgttttaagcccttatttttcatgcatttagcttagtttcatgcattttttcatgcattcatagtccatttttcttccttttcatgatttgcattgcattgcatagcatatttgcatttggagtatttttcaggtaaaataggtaattttgaaattgatttggacatttctatcacaaagagtggacttgctcgagttcgtgcatcaaaggaaagacaaggaactatgctcggggtacatgctcggtcggacgttgagtggaacacttggaaaaagatttgaagctccctgctcgagaggaagtcgagtgcatgtcattcgggatttctactcgtcccaaagtcgagtggtgctgcgccgccttagctattttgtctttttcccgatcatggcttcctacgatttcctattaataaacctcttatgcttttacccaaaagatattgtctttgtcccctgtatattagggttttctgagtttgtaatccattttcctgctattctgttgtgaatttgagtttgatttcttctataaagtggttcatcttgcttagatctacatcctacttgcttagaatgatttctgggttttgtcagatttctatgttttgtatgatgatgttcttcattgttcttgactagtgttcttcagagttcttaatgatgggttaagtttaggtggattcctctgtttctttagctagcaaagtgtttatatgcatgattcccttctaaattaggatttcttagtgctatttcctttctgatcaacttgagattgatctcagactttctccacccaaaatgtgtttgatgaaatgtctgaaccaacgaattccagagctttgtagattctagcccaagaaattagatgtttagactgcttattgacttagctatgcaatagattgttgcttaaggtctgctttgctatgtttcatcaatgagaattgaaattaggaagtggtaaagttatgaggatcattgtcacgagagtggattgatcttgttttgaatatattgtctagggatagcttgattgagtttgttagctagctaaatggattgaggagtcctctagaaccaactaccccattcttaagagcattgttttgtttgattgttcaaacttcgtgttattgtttaagctgcttgttttgttttgttattttgctcgactttcttgctcgaccaaaattagtatcttgctcggccgagtgctttccgtatttcttagtttcctctttagttcacgcatttgatagctcctgctctatagtttatttctactagtatagtttcatacctgaatatgatttgcatgttaacatgctgcttaggtttagtagaaatacaccaaacctactcacacttggcttaacttagtattttctgattgcatcaagattgttaacaatacactcatttggattgacaccttaaatactacaatgatatgatagtgttagggaattgatcttcgagatttacaaacccgtaaaaatcctactatcaacaaccaataacacggtgtggttctaatgctcatatgacttgctactttcagaagaccaaaaaatataaggttgtgtcattcgagccgaaccataaccatgatttagtgaggacacctatgaagcatttgttgaagggaaatcgagaattatctatctctccaaaacaacatgaagatgatgccgagatgtcagggacttcagcaaaagcaaccgttgaaatgatgagaatagaagttgggatccgagtaaatctgtttttttttttaagaaagattatcaaaattagatatacggaaagagaatggcaaaaatggaaaagagagatgttggagctgttttggaatactttcagaaaaagagggtaattcgttttttttattcaatgcaacttgatgaggatgatatgatcactaatatattctgggtagattatcggtctataagtgattacaatctttttggagatgtcatttgctttgacacaacttataagaccaatgaatatgatagaccctttgctccatttatcggggtcaatcatcacatgcaaacagttgtgtttggtgctgctctcttatatgatgaaaccagtgagtcatataagtggtttttcgagactattcttggagcaatttctagaaaacaaacaaaaacaatttttacagaccaatgtgcagcaatgccgaatacaatagtaaatgtattccctgatacaaaacatagattatgtgttagacatatttagcaaaatgatgcgaagaagttgagtcatgtacttcgtggagcataacaatttgccatggattttggtaagtgtgtatatgatcatgaggaagaagaagacttgttattggcatggagtaatatgctccagaagcataacttgacaaatgataaatggttgaagaatttgtttgaactgagagaaaaatgtgcaatggtatatggacgtcatacttttacagcagatatggtgagcacacaacgtagtaaaagtatgaataatattttgaaaaaaatacttgaagcatagttataacttgttgtgcttctctgaacactccgagagagtgttggaagatcaacgatataaggaattagttggtgatttcaatatgatgcatacctcgccggtattatgtgctactgtagagatgttggagatgttgcaacatgcagaggaagtgtatatacccgaaatttgtagcttgttccagaaacaatacatagttattggtgattatgttgccaacaaggttagtaagtctgagatggtatataaatataaagtatcttatcgtggtgtatcacaggagcatttggttaattatgatgtttcaaacaagacgatatgttgttgttgcatgaagtttagttttgctgcgattttatgtcgtcatgcatcgaaagtgttggacaagaagaatgttagaagaatcccatctacctacattctaaatcgatggagtaaagaggcaaaagcacaaaaaatatcttcttatcattcagagtcacctgatgagacagtcaagcaatcgattggaaatcaatatagccatatatgtcgtactttccgtgagactacatatgttgctgatgatcatatagaattgacgttgtgtgcaaaatgaagatgccattatgttgcttaaaaaattagagggaaaaaggagcttttaaaatataatgcatggatgctccaaacttgagatgttgaatttgtggaagaagaaaaagaagaagaagaagaaaaagacaaggatgtttcaaatgcacgtggggtaaagagaaagctcctgttggacgaccaaaagacaaaaaaatcggatcccatggtcgttttatgagtgttcttgaaatgaaaaaatcagcgtacctcaaaacaatcaagtaatgcaacaacaaagaaaaagttattatttcaggtacttgatataatatatatcatattagtttatgtctaattttcatcaaaatgtgagttaatctatttatactaactcttacttgaaattgctaaatacttcagaactctacccaattatgagtcgtaaccaccaacccgaccttacaaaatggatcatttttttcacaagtgttctaggtaaatacttaatttcttactatttatatttgaattatttgttattattttaataatttaaaatcttatattttgtaggaatttgaccaaagttatggaggttcattataaagttttgttatattgcttcttcttttttgttctccaaaatattatatatgctagattgaattttttcttctcttgtagaatcacaaaatcacattcgtatttttttttttaattttcttctagattaaacttttttgctcttttatattattttctctcatatttgtatttgcaaaaattctgtcgccattattaaacttcttgtttttaaaataattgctaaatttaattataaacaaaattaaaaaataaaaagaagaggagaagacgacgttaatgtaagtgtgaataaaaatattttgtttccttttatatgttttgtaattatagttttaatttattatgtaatttaagtataattttatatggcatgtttttattagttaatggaaaagaggtgaataaatgggttcacccctcggggtgaactcaagtttcgttcataagttaaatcgaattctttcagtttaaaaattgattaccatgctcaagcattacaaagataaaataaataaaaaaaataaaaagaagacttaattatgacacatgaaactaaaatgttgtaacagagagtgaattaaaactataagtttgacaacatctcattgattagcttgttcatgagagtcacttctatatcagtaagtggctattttttggcgaagagagattctaacaatttggtcttcgataacctttctttcttttcaaaatcctccttctcttgctctcgatccttctgccttagctcccaatccttctgctttatctccccaatagactgaatctccaacattacattccctttgtcttccacagttgttgtcttactcacaaccttttttgctttcgcttttgaagctttaacaccaataggacgagaaatttctctatctgcttcatgggtttgtggctgggaggttaaaagttgtgtagccttgtcacattttcttcttttggacattacactttctttagtagaaagagcggagagccaattctgttcaaagcgaagcactgtctaagcatgctcaagggtgaacttaccatgttcgctgttgtagatttcatgtgcacttaacatcattgtcattctgtccactagatttctgttttgttgcagcttcatagctccgtacaaacttgcctacaccttcattttagtccatctctgctttatgtgactcatctctctcttatccacaccattgagctttggacttgctccatcataggcaacaatatgtgatcaaaaggaataacctttttgttcattgccttttatcgcatccttacttgtgttgactgacgagctccaagtcttcactaccgaccatttccttctctctcttttcaccttaggcgtgtgttcagcttagcttggagggtcagtacattgtgtattaaagacaggaacatcttcatacagattggtttccagattgtaaacctcttgttgactagttaagaggttcatgaagcctgatccatatactagtttggtgtgtgttgtgggtgtgttaatggtttttggttacgtgtttaaataacaagaggaagagtttgtttttggtgtgtgttaatgatttatggttaggagtttttcaaaattaatggtgtgtgtttaaatgtgacataacaagcaactagcaagtatcaaccacacacaatcaatggtgcactaaagactgatgtagacaaaataatcaaagcctagtttctattttaaaaattaagcaaactatcctatttaagcaatcacaacagacaacaagcattcaataaaataagtatatagtcagctaatataattaaaggacctaaaaaatttgaattgtcggagacttataacatttatcaatcaaccacattcatcctaatcgttatttcatataagtcacaaacaatgtagattaaaggtcattaactagtaatccaacaaccaattcaagaaacatgcaactcttaagataacaacctgttttcagacagatgagaggttctaagagtattcaaaccatgatgcttcttagatagttcctcaaccttcaaggaagaatgacagaacctccccatttaattaaacccttgaaagacaaatgtaagggatccaacatataaggtaagagctttcacataccatcatagtaagaggaagcctcagccaatctacactcattgtctcattgtattcaaaataaagatggcagtcctcaccaaagctcctaaaatcgagaaacaaacagacaaagtatcaaccaaattcttattattgatacccataaccgattaaagttttgcaaaagatcagaccgaaaatagagaaatatatctaattcaagcaatcatttaacatcatatgaaccataatattttttattgcttattactcacattttcgaaccctaatttggtttgaaaaagacatggtaacaacatagaacactaagggggtgttattggtttgtgatttatatgaatttttgctaccatcaattcccaattgtgaaaacccccaattttttaaacatgcataaacccccaatttttgaaacatgcataaaccctaatttacgagctacaagtgaaaacagagagaaatcacatagattcataccattaaacatgcagattatgataacagcagctcaaacaagtaattccgacttgcaatttctctcaattcgacagatgaaatgttagagagattttgccggcaaaaagtttgagagagagagagagagagagagagagagagagagagagagagagagagagagagagagagatgaacatcacaatggataagaacaagaaactctaactaattttgatggattgacactcgtcggagtatagtcgtctccaacttcttgttctcgacatggagagagacagagagagacatcgagagaaagagagagatgacacaaaaaaataaacacgtttttttttccctctttttattctgtttgtctacccactcaacacacaccacctgtcctcttcttagtgttaagaaaacatcttaattaagatatatatcttagctaagatttgttatttttattatatttaatcatatatatgaaccaaagttggggttgctctaaccctttttcatttaatggcaaacaattttttgtctaatattgtatttagccggattaaaatcctaaattaacaattaatccgagaaaaccaattaggatagaatcatatccaaatttatattaatcccgattatcaaaccttctcctacataatgaaggttttaaaacttaaattacaatattaagggtttgataagtgagagcgtatgtattttttgttgggttaaatatatatacaaaaactttaacaggacttgatgaccaattgatcatatatttgatagtcatttcttctattttttcttaattcctttatgttttatattgatcatttaaaaaacattctaatatggaattttgatatatgtacctagattaggcatttctagatattttagttttcagaacaaaacgactaatatttagacccaaattaggcttttcagcatattttagtttacaaaatgaaccgatctgatatccgaatccaaattaggcttttcagacactttttttttccagaacgaatcgatcctatagaattatccagaaccaattgatcatcatctcaaaacttttgatattcatttcatttctcccaataattatttaatttgtttttcctataatatttacagttatttaaattaaatataaactctatgatgtaaggaggatgacataattaacaaaagtatatatatttttattttcatatatcgtaaggatgatgacataattaacaaaagtgtttatatgaccattttgtgacattctacattctccaaaattcatactttagcagcaaagccgaaagtgttatgaataatagatattatatggatgcccattaagagcccattagcatattctaaaagtctttacattactttgttaccctaatatgtatatcctatatatatcttcttcttattcatgaataatacacaacaacaatttataaaccctagttgttttacaacacgttaccagcactaaacccttgccaactaaactaacacaaaactttaccgtcgtatgtctccgatctcatcatttctttttctctccaacgtcgagataagttacctcatatctgtaagcagtcagttgatcatactttaatagtcgtgtttaaatattgcatcaaagacttgtctggttcatactttagtatcgagtatttatttaatcatatcgttacatgagatctgttgagtaacgcttgaatatcattataatatattgtttcattattaaaagtatctaagttatgttggtcaataaagtcatgatgtaatacttaattctcataaggaaacaatattactttacatgtttgattcatataatcttattatattgtgggatcatagatcgagtgatacacaaatgtttagcatattgaaactgttatttaattcatcacttatggctttatcacttataactagacgtttgcaacattgattttctgttatatacccatacttcaatataggttatatgcataattgattaactgaattttgctctgattgactcataatttaggattaataacttaaatgactctcataattgatggctaactagaatgactaacatttttaatgaaaagactttttaaccttaatcagtactaaaaccataatttgatactaaaaaccatattttgattaaaaaaagaaataaaatgattaataaaaagaaaggaataaataaaacacatgtaaaaaacccaaaggaataaaactcaaatcgatttgggcttttctcgattctctctttttcgcttttgcatgtctcttcttcttctttgatttcaaattgaaaccctagcaaatctccggtggtggcttctcgatacgccgacttctcttctccgctggtggcttctcgactaggcgacttctctctccagtggtcgctgcttgacttggcgacatctcttctccggtggtcgctgcttcttctcacacaaaacggcgtgagaactcttctttagttcaagcttttgtagccgccgtaggttccggctacacaaacagcagtgaagagtcgcggtggcccggattcacttcttcggtggtgtaggtaaactattgacccgccgccaccgcttttgaataagtcccttttatggactgaatttcgtttgattgtgatggtgattaatattttttgttgcagatctgcaaatttgttgcagcattagggttgtgggttttctcctttcttattttcacataatcgtgttcatcgttcgttttcaactttctgatttactccttatcaaaagcagcttctctgaccacaacaacagcagaggtatcgacttcggtgtaagtaaacttcagaacctgtcacctttgcattttttttttttcatttttcgattgattaatgtgatatttgattctcataatgataaatcctttttgttgcagatctttagcattacttcggcgcttaacagttgataattccaattcataattctttataatctagtaaggattttgggcaatgtcattagaatcgtttattgaaaataattttcttgagcaagtaaagcttttcaattaggattttcataaagagaaattgttattctggtaattcagattatggtggccaattacggctgaatttattttggaaaaaattctcgcctttctctgagttttgatattgattttgtgttgtgttctcacagatttaatcaattttctggattattctgtgacagatttgttatgattttagtttgctaatctcacaaggcacctaagatcttaagttatttgcttatgcaacctcgcttttttctatgattaggaatgacgtcttctagtcatacccgcagttatccactacgcttgtatgaagaaggaaaatcatcgttgcaaaaaaggagtatggcccacagctgctatgtttttcaaattaggaagatccatgaaggattaggtgcagatgtgggatgagttgaagaaaactgcacttggtctttttataaagttgactgaaagtggatttatatgggctgcacagaaagttcatttcttcctaacaaatcagttgcaagtcgacaacatgaatgagatgtggtgtttgattgatcgcaggccaataagattttcgctctacgaattagagaacataacgggcctcaattgcgatatgtttgacgagtctgacactcgtgaaattgattacaaagaattctggaatgaaatgggtatcgcaacgtctgttggtccattgtttatagagctggaacgtgtaatagagattagcaagacatggagtttggagaagaggatgatggttggtagactatgtttactatctgttggagtacatgggattcatcacggttctagagtcccgttgtcgagttctaaaagagtgcttgatcatgttgcttttgagaagtatccttggggtcgagtggcttttgactctctattaaggtctgtgaagattgtaaagtatgacagagaatcttatgtgattcacggttgtgttcagtccttgctggtttggatatatgagagtgtgcctggaattggagaagcttgtgggtttagaaaaacaacactgacgggtgttccgctatttgattggagatcttctagaaaacgtttcaactttaccgctttcattgaaaaggagaaggctgcccacggacaggtatgttttggagaaaacgtttcaactttactgctttcattgaaaaggagaaggctgcccacggacaggtatgttttgttttctagatcaaatctgctacttgtctttaaaaaaaatctgtgagtaaacttgcacaaacgttttaacttaaacttgtaattatatgtatgtaggtgcgtgtgaggcatatgatccctgtatctaaagaaaatatgtacccaaaatggagtgactcagctgagaataaggatatggtgcttgacaacttgcttaatgacatcatccacaaccgtttataacctcatgcgtggacacatgtggcagcacgacgtaagaggaaacagaattagggatcatcaaatgaggatggtgagagtaaagttatggagtcaaatcctgcagatgatgttatagcagaagtatctaataagaagcaaagaacagagaaagctcatataaaagtcctgtttttaccatttccacatttaccatatacataggtctatattttgacagtgaattaactaacattgttatatgcttcattataggtccatgaagaggagaagacaaacttgttggatatttggaatatgttggagaaaatgaatgtcacaatcagtgacatggacaagaatgcgagcagaagattggatgggttggagaagaaagttgcttgcttagaagagagtgtaagtaagaagtttgaagctgtggagactgatctgagagttcttaaagagtctcagccccctgtagtatccaatgaagctgccacatcaaacaacaatgatgaatatgaggcaaatagtaaccaacctgtaagtagatgtcagtttttaattttacatgttttgcatttttgatttgaattctgcctttattaaaccgtatatgtactgtgtttttttcagtcttgggtagtagaggagaagctaggttctgtcgatgggttgcctattcaaagagtggttaagaaggctgttaattcactgaagaaaaaggaagctgctacaaaggtccttactaagaagaaagttgcaaaatctaataagaagaagacaattgtcaatgtagagaaggtagaaaaaccaaaacctgaaatgaagaagacaattgttaaggtagagaaggtagatagtccaaaacctgaggagaagaagtcagttgcagctccgacaacaaagacatttgatgatgatgttatggatgtcactgacaaggttattgcagacaatctgaaaatagcttcaagttctgaagaaatattctccaatcctctagattgaatgggtaataaggcaatggctgatgcattgagagcacttcaagaaggactagagaatctagacggtgttactagtaagagttgatgagtgccacagctagcgggttctcagaaatatccgtatgtaggaaattcaatagtgaagcgcataatctcggatgaaccatcgtcttcttcggtacctgaacatcttcaacctgtttctgatgaccaatttgataggctgtaggattggctcaaaccagatttgtaagtgtctatttttcttcacatagaaatgttttgtgctatcattactcattcttttcttttctgcagtgaaaaagaaggcatgaacaccagcaattttaatgcccgattctactggcagataatgactccaagaagcgattggccaaaagaaaaatattgatggctgaaagactatgtaagtatagaaatatattcttaacagtttttgctttcaattgatttaatcatgtactgttggctggctgaaagtatatgtaactataataattgttgttttgattataatgcaacacatgagagctgcaatgtcattgtttcaccgaagattcaatcgtgatccttcaaaatatcccaaccagagaatagctattttggatcaagatttgatctccacaatgctcaaaagactataaacagtttcaaccgtattataggtgcttcaaattgagggagtattatgaggatcaagtcaatggtacagctcaatgtgacgcagcgacaaacaagaaatggtttgttgatgtggatcacctatatgccttcctctttgtcaacgtgaatcattgggtcgctctagatattgacttgacaaaaaaacggatcaatatttatgaaagcatcccgagcttgacttcggatacataaatggcgatacagtgcatgtttgtgatgacaatgattcctgctatgttgagttcatttgttccgtcaaagcaacgtaggaggagctactcaaagttggagtggaagaggattacaaaggtcccagagaatcttgatgtaggtggttgtgctatctactcaataaaatacatcgaatgcttggcgcttggcaagtcatttgatggcttgtgtgatgagaacatgcagtcactacggacttgctgtggagatgtttgaggaattaggcgagaatgctggaacactacactctgaggttcgtcgcaaggccttcaaattccctagcctaatggatgagtagaagctttgtttctgttgtttctcaatctattaagaaccatgtttcttcttaggatttttattttgttatgtctatgacttttaagacccatgttttgtcttaaactttgcagtacatgtatctaaacccatttcccttctcgagattttttggtttatataagcatctaactacaaatcaggttttagtgatggaaatcagtttttcagacttatagtcattttcgtaactctagtatctgattgaaagatattgtacaagttgtcattgaaagtgttggtatatagggatataaactcgttttccttttaatgtattgtgctcttgtattgtggtcgttgtagtgttggtttgcattgcatatttctgaaacaaagcaaaagcaaaaaaaaatgtattatgctcttgtattgtggtcgttgtaatttttattttttttgctttgtttcagaaatatgcaatgcaaacagccacgaagaaggtgataaggattattctattagaacagaatcatagaaatgaaaaaacatcgttgagattcaaataacacaaacaaccagaaaaggaaaaaaagtcataaaagacattaagccttgcatgtcttacgattgtgtccaatttgcttgcaattgtcacaagtgtgttgttttctagccttcttcttctccatagcaatctccaatgtagacttaattctcgatttctttggtctacctggttgttgacgagcttccggtggtaaacatatcttcgacacgacattttcgggaacagttatatcaaagttcctgggcatgatggcattagcataggacttgcataaataattcttctgaaagtaaggatgacacaatgatatccgagaaagttttcatttttcagcagctgcaatcgcgtgggcacatgggatcttttctagatcaaacctgcgacacgaacatatcttgtctttcaaattaacaacatgcagagatgctccaaacataacttgtacttgatttgcatctatgtcttgcacaattagcaatttggcatactctacacgactctacagaaaatacattgtcattagttagctataatcaccaatatacggatgtatataaattgtgtttgtattacaaatgaaacctgcaagatcttctctactccacgaggaagatatgtagacaaattcaatgcatcattccttcagttgtacaataggaaggctactcgcgggtgacatgaccttattcattgaatctgcaatgttacttgtaagcaagttgtacctatcaccagggaaatgcaaacgagtccacaaacgtacatcagctctttgaagctaagcatgaagagcaggattcaaacctaaaatctgatcaaatatcctttcaaaattgactaatctgtaagcgtttgctgccttctttgccaaaccaaatgcatcccaacctttaaagcaaactaatatattcttgtgcaagtggtatgtacagattcccggctagacttaggataaactatcattattgcttttttaatggattggtgcttgtcagaaataatggcgagactatcatcatctggaatcacactgctgagttgtctaaaaaaccattcccatgaggcatcattttcagtatcaaccacggcaaaagcaatcaggtatatctgaaaattaccatcttgagttgttactgtaagaagtgtccctaagtattatccttgtaaaaaagtaccgtcaacaaccaccactttcctcatgaaagggaatcctaaaatacttgcaccaaacgcaagaaacaagtacttaaatcgctgagtttcatccacttcaagtcgcgtgaaggtttcaggattttccctccataacatgtacaagtataccggaagttgctcgtaaccactttctagtgtacccctaaccatttctcgggcagatcttagtgtctgataagccttcgagtaatccatctatcaaaatgtattgactttagtgattagttggttgataacaaggtgtgattaataaacaaagaaagccaagaaattggaaatcgtaccttgatttgaaaccgtttagtcaatactttggtaacatgcattgggagaaccttaggtccaattccaccaacgtaattcttagagagcaatccaagtatttcgtgagtagcttgtcgggaacgtgatgagcgtttagtaatagaacatgtatgttccgaaacatacactctcacttgaaactttggatactcgtcaactagtgttgctcgcactctccaccaacatcccttaatccaacacatgacaaaatataatttaggagtcgatttcgaaacatcaaaatcaaatttctgtaacacagtaagtatcttcaaacgtgtctccaagtgatctttcgtttcaaaacattgaccaacggccaatcccaatgacgatagttctaaggtcgcgtatgtagcatctcctttatcttcttctatgtatacgcttaaactcctcttcctgcttggtactttagttttatcttcttcttctggtggaatcccatagaggctaaagttctcatcatcaaaatctgttccgtcggaatcatcacagtaatcaaatctactctcgtcatcttcactatcttcaactacttcagatttttgtccttcaacaacgtttttagtgagggtgtatacgtcaacgttttcaatgttttcttcgacaataccgtatacatcaacagcttttgtcttcggcaaatcgctgatatctaaaccatcaatgatttcctcttttgattcatctagatctttctcttttaattcaacacaaagtcgaacagtagcattcttcgtttgccccaaataagactgaaactgtctattattaccaatgattacaggtggagtatctgctggtaattgctttgatttcgagatcttgtaactcaaactaacttcaaatacacttttcttgacattgtaatcctcatacaccatttggatgaaatcatcataactggtttgactattaccttcaagtacacgacaaccttttgtactatcaacgacaaaaagctatctcgttttctcatagacccatttaccacacatgagaattacttgatccataccaaagagggaatcgaattgatatcaaagaagaatagaaacaagtgaagcaactaagatatcgaataggtagaaaaataatggattgtattgaaaatagatttggtaggcgttacataagaagaaaaagaaaacgacaatggcagtttttttgcttgaaaaccctaggaggatatactttgactcataattggatatttaatgcattaaattcaaatatggcaatattttgaaaaaatctgccggctaataaaagtctgtcgtaacgtttaaaaaacaaaaaaaaatgaatcaaaccggatttaacatataacaaaaaattttgaaattttaaaaacaaatatgtcaaaaagattctgttattactaaaaaggttattctagtcataaacaaatcggccagaacattgacatgagtaaatctgttatgctttgacactgaaaaagaaaactgttattactaggggggttattgaaggtaggattttaattgaatatgaaagaatttagaattctatttaaatctagtgttattcaattgactggttttagaattctattaaattctactgttattcaatttgttgattttagaattcttttaaattctactgttattcaacattaaaattgttttattagcaatgtgatttgattagaatttaaaagaaatcaaagacaaaaacatgaagaaacaaatcccagctattatggtgtgatttggatagaatttgtcaaatacattaaaatcttttacttttctattcattttaattcttttaaattcaattatctattcattttaattcttttaaaaaacaaatctgttatcactacgtgactgtctagtaattttattttttaacaaaaaaatctgttgtaaaacaccagatttgttaacaaattaattaaatctgtgatcacacaaaacaactctgtcatgactatataacatttttccgggttaacaaatctattataacacaacagatttttggttacaaatagaaaatatgttgctacaataaggaaaaatttgcggtatggaaaacaaatcagtgacacatttggtttcaacattcttaattttgaaatttaaaaacaaatcggtggagactatatgaaacaaatcagtcacggtaaaagaatatgaacaaaaaaatctggcgtaacataacatagtaaagtttgtggtacaaaacaagtctattgtaaaaaatctgtggttgaccaaaaaatctgtgatcttaaacaaatccgtcgcaacaagagccacagatttaccaaaaatgactatggcattttcgtaaataaatgtggttttattgccatgctggaattaaatagtaatgacatttctgtaatattgtttttctacaaaggaaaacagggatattttaggtataattattactcatataactcatatttttagcatttatttttggtcattatgtataaaatatggttcaatctagtaattttcccattgattaatatactttgttagtgatgggaccttatcacgtccaagtatcgttctaaaatttatactgctttataattgagtttgttatattctctgttttcaaaacattaaatccatacttcgacaaacgttttaataattattcagtttactttctttgatttggtatagtcgttgaattatcgattataattatttggtttaattagattggttagtatattattgcatatggatttaatatgacgagatcggttaattgtactattcgattagagataatatattattttattgttatatcttctatgcatcatcgtttgattattgtcacacatcagaactacatatttattattaggatatttcgttgacttagttctttggtttatgttcctcgtttgaaaacttgtggcataattaattagatatcattattctcgttgtttctggtttgttatgttaatatatgattcgttgattcatgcttagtagtgaaatgtatgttgctgtttttatttaatgctttgtagctaatcatatgttgatgttattttaataaccgattattacttttgtttaatcacatgtagtatattgattaatttttgaaaaatcatcgattatttaatcacacttctatattttcagcaaaatgtcaaatctcacgagagttacgtttgaggcccttgatatttctgggaagaattatttatcttgggtattggatgttgagatgcacctaatttttgaggaacttggggatacaattatcgaaggaattgaagcaagcagccaaatcaaagcaaaggttatgatttacctttgccatcagcttcatgaagacattaagaataaatacttaactttacaagtttgtaagcccatttagggcactttggagggagtaggcacttttttgggggttttctactgttcgacaaaaatcaataccatactacccctgcttacgtcagctgatgcgctaaccatggttaacaaagctttaatcacagccgttcatttgttttggagagagaatcaatctggcggctattattaagagttagagacgagttgttgttctgtggatagcgccgacaatctcgttatttttttgctccccagaaggaaacatgagcgaggaggtaaaatctaaaaatgtattgcggttattaaatctgatgattgttgtgaattcgtgttgatggttgtaaaatgttattgtatataggttttaatggagagttattgtatggtcatttgcggggaatgggaatgctcggatattcaagaatggtgttttgaaattaacaaaattctaatgtctagaattgttccaattactgcagggatgaatctttctgctttggaagatattgtttagaaagaattcatgaataaagatttgacattaggaaccccaaggtttagttatttaccgttcttttcatggattacacgacgggaagaagacacctccgatattaattactagtgaagttggtttgaagttcttcattgagatgtttgggaggaacaagggtttaaacttgtttgttactttcagcggaatgattgaaataggaaatccttgttagaaaattgttagagaagaagaagttgctggtttatctgtaatgaagagtaagaaaagagcaatttcctcatcatgtgaaggacttgcaagaagtgatgatgacttttgatgggaagcaccaactgctggttccaaagccccaaagattccgacaactcaggatgatgacgctgttatagcgaaagttgaagtacaaatagccatgtataacagacgcgatgaacaattacatagcagtggcagcgagaggaaaagtagaactagtggaagtagtgatgaatatgaagatttatttggggatagtgaggaagtggtcgaagatggagaaaatgtagatgaagttgctccgacaggttttgatatcgaattttggggtcactttttggatgatgagttagctggttctaatgcacctgagatcatgtgtagtgtacgagtgcctagaactcaagaagataaagattgcaatgatggcagaggtagtagtactgactccgaaacaagattggtatttacaaaggaagggtatatgcaagtaaacaagattgccaaataagcttagctatccacgctataaaggagcaattttactttaagcagtctcgtaccaagcgacattactttttgataacttgtgctgatgaaactgtcagtggagaataatgtcccatgagatgaagacgtgtggttactactagataaggaagggtgatttagagcacacatgcaacattgaaacaaggagacagtacatgaagatggcgacttcaagagttatagcatcaatctataaagccaagtacagtaagttctctgaagggactgtacctttggatatgcaacaaatggtacatcgtatgggacgtgttggaaagcaaaagagaaggctgtggaaaaggtgtttggtactgatgatgactcatacaagtcccttgcagcgtatttgtatgttttaaaagtttcaaatcctagtacacttatagatatcaaaacagagactgaagaaaatggatttcgcaggttcttgtatatgtttttggcatttggtgcatctattgatgggtttcgatatcttcgtagggttattgtagttgatggtacgcatttgactggtaaatataaagaagtgttattgacagccagtggataagatgccaactttcaggttttccctcttgcatttgctgtagtcgatagtgagaatgatgaatcttggacatggttctttcagaagcttgagcgtattattgcagacagcaaatctctgtcaataatttctgaccgacacccatctatctacatagctaagaagaatgttttccctctagctcaccatggggcgtgcatagtacacctagcaaggaatgttaatgttaaattccataacaaggggcttgctaatccggtaaagaacgcaggctatgcctatactgttaaacagttcaatgatatttattctcagataagcatgaagaacagtgagtgtgcttcatatcttgagaggttgaaaacagggcattggacaagggtctatttccaaggtgaacgatataatctaatgacaagcaacatttcagaaactctgaacagtgcattaaggaaaggtcgtggatcccctatactggaattgttaaggttcataagggctatgttaacaagatggtttagttcaagaagaaagaagtctatagagcatacaggtttagtaactccagaagtagataaagttttgacgaaaaaccttgccaaagtgagaggaagcaaaattggaaaggttagcacttggagttataaaattgttgggatgttcaatggaaagcatcaagtatgtcttgatcgtagacaatgcacctgcaaggagtacaataagttaaaaattccatgtgggcatgctatgttggcagctacaagtgttggtcagtcatatggatcattaatcgcagatttttacaagacaacagcttggagagcaacttacaagggtgttataaactctgaactcaacttggaagatgttgacgttccaaatgaaattggaagtcaaactatcttcccaccaaggacaagaaggccgtttgggaggccaaaaatgctacgtatcaaatccattggcgaatatccggttcgtatttgtaggagtcccattttttttacttaatctttattccgtatttaatttttaattttatgttgtttaacagaaatcaaagagtgtgaaggtgaaaattaacaggtgtggcagatgcaaaaagactggacacaacaggacaagctgtactaatccaatctgaagatgttttgaaatccgatatattgatagaacgatgaccattttattcttgtttttgtgtttggaaatggttatttttggataaaatatgttgtattctactttctaattttaatttcgacttattacatataaatctagcaaggtaatatattagcaaattacagataatgatgaaaaacatggacaggtacaggtggataagatataaataaggtgggactgaattgttatccgttaataatgaaagaaaataggaaatattaaacattaaataaggaagttactaattattggacaataaaaagtttcattgacttaattaagtaaaccgttgaaaaaaatcaaactaggggaatagaagttatcaataattgaaggaaaacgtcgatttggtgaaaaggtttttcaatgagtatttaaagggaaacatcccctcttataaaacttaactcctttcgattatatactcgaagactcggccccaactaatatcttggttggtaagtaatttaatcatggtaattgtttagtaatttaggaaacgcaaacatattatagaaaccaaactatatttacttataaattaattgattttaattgtgcagatatacttggggcgattgtagatgttggcagtttgaggaatgattctggcaacgttgaagacgttaatggttacacacttcggttcaagatcatggatcgctagtaagtaaaataactttatattgtttatataaaattgtctgcataaatttgtatacaagattgtgatcatacttattgcaacagcaaagaggtattgttgtgtgaagctcttgggcagacagctattgactttgaaaaaaactttcgattgtatggaaagacaaataggattgttgcactagggtggtggaaggttttgaagtcaaatgggtggccaaatggagcgagattgtgagccatggatccatatcaaaagtgtttcctaatctagagattcctgaagttgaagaaattaaaatggttatagattgatggtttattcatgaaattatattctttttttttgtaataatttctgatttaatgtttagcatgaaatatttatattaatatttggtttaaataaaaatttctttattcaaaatattttttaattttatttttttactgtttagattgtcaattcgttatatcaatctacttacatgatattaatttcgttatatataatttcatgaaattattagttataaaataaactgtccatcacaacacatccacaatttatcagaaatttctatttaaaatttaaaatcataaagtacatatacatagacccctaatcgaaaaacgtttatacagttgaatttaggaatcagtcatcaaaatcttaagttattaaacaaactatccataacaacatatccacatagagttacataatttatccctataatttaatggtgttcgtaaatagtaaaggctatctagtcaaatcaaattaaacatatacgtaaacctagactctaagccatataccttaatgactatacattaaaccctaaaccctaaaccttaaaccctaaacactcaactcctaacacttaaccctaaacactataacctaaaccccaaactctatacaccattccctaaaccctaaacctaaatgcataacccaaataactataacatcacactaaacatattcctaactctagcctctcgtgcaaataccataaactgtataccctaaagactatacaattaaccctaaacactaaatcttaaaccttaaacactatacactaaaccctaaatcccaatcctaaaccatattcttaatatgatgttacatagttgtgaatgacatattttaattaaattcgttatatcaaaaacaatttaatgaatcagtcatcaaaatcttaagctattaaacacattatccataactacatatccacagagagttacataatttatccctataattcaatggtgttcgtaaatagtaaaggctatatagtcaaatcaaaataaacatatacctaaacctagactctaatccatctaccttaataaatattcaataaaccctaaacccaaaacattaaaccctaaacactcaactcttaacacttaaccctaaacactataacctaaaccccaaactctatacactataccctaaatcctaaacctaaatgcataacctaaataactataacattacactaaacatattcctaaccctagcctctaatgcaaataccataaacagtatacactaaaccctaaacactaaaccttaaacccaaaacatttaaccccaaactctatacactacaccctaaaccctaatcctaaatgcataacccaaataactataacattacacttaaccctaaaccttaacatctaaaccctaaaaaaaagttgctaaacattaaacactaacactaatatttaaacactaaacaccaaaccctaaacaccaatccctaaacattaaacactaacactaatatttaaacactaaacaccaaaccctaaacaccaatccctaaacattaaaccctaaaccctaaaccctataaccaaaaatataattcctaaataaactttccctaaaccctaaaccctaaaaaataaataaactaacaatacttaccactaaaccaattaatcattattaaatataaacattatcacctatcgttagtattatggtatccatcataacaaagccatgtggttagagaaaccaaaaataattcccttatatattagggcatatattgttcaactatacatatcaacgtggtcatatacttaggcggaaattttccccaaaaaaaaataaaataaattataaataagtaaaggtgcgactaggtgtcatatgctccaaaaccttaaggatctatactatggttcctaaaatagtttgtgagaaaggtctgcatgcattgccctgttccaagcaataatctcaatcgatttatccgtagtaggagacaacaaacttctggacagatggccgaactaacttgtagtcaatagctggaatcaatcgttgggttacaaaaaaggtaagagctgatgctgtctttataaaagagtaaaacgtacgtttataaatattttaaaatctgtttttatacatgtaggggccgtcaacaaacttccacatgcctgcaggcattcttgcaaaaattgttagctatatagctgaaggtgggattggtaagttaaagaattggattttatccgggagggaggaaatggtagaagtattttcaccagactgcctgaaatcggtaaggttggacaaaactagagattttgtatattggtccagccttgatagtgtttacaatatatatttttttggaaatgtgtaaaggcaaaaaatccttatgccttgtatgttcgaagcctagtttcggctttcctatttcttgacatagaagaggcaattgagctcgccgcatatgctaaagaagtctacccactggcgtaattattatacattatgttgaagagtttagctggaaatgaggaccacgaagtttactcgaattttaaaaagagatacaattactaagaagcagagggattttgtgaaacgttgaagttccacataaaaacgttgcctccaaatcggtttggaacgtatagtgagacgtggtgtttcaccgacaacccaatgtgttgggaatctgaaacaacccgacccattttttttttaaaaaaatataatgaaatattcccataaatatctaattaaaccgcaagtcaaaaatactattttatgaataaataaataattcgtccaacaaaaccaagaataactaacaatcctaaccgggttccaataaccaaaaacaccaaaaataaaacaaacgagttcctagatcatcctctcttccttgccatgattccacgatcacactttatctttacctgcatcaacaacacaatgagatgcgtaagtattatcataaatacttagtgaggcgatcctcccatctacgagctatacacacaagcaaataaaaaggtataatcacgaatacaatacaaacaaaccagtcattgaacaattcacccaaaacacatccaccacacctacatatcatcacacaaaacaaatcacacaacccaatcgctcagataagctcatggtcacgcactcaccttaacaaattgattctaatagcaattaaacccaggagagtctctccttgcgtctgaaacaatccagaaacgtcctacaacaagttcacaaccaaaagcaaccttgaagcaaactggacaggaaaaaccagaaacaagcagtctcaaagacgaaaccctaaaatacaaacagacgagaccacgatctcagtttcaatctccgctggtcctaattcgcgtctgagaaaacgtgtctcacgaaactgcaaataactcaaccaattttaatccaaatccaattctgtaaactgaagaataacgataaaggacttgggaataactctaccaaatttcgttaccttttaccacgatttgatatgacgaaactgatttctcccaaaccctaacgattctgctccttctccttttctctctttttctcctttataaaacgaaaagtggctaaccaaagccctaatttcgagtttccttcttttataggcatactctagggtttccaattaacccaaccaattaaaccggatgatttaaaaacaaaccctaaccgattttccggttcacgggcgttacaattctcccccactaacatagattcgtcctcgaatctagcttcacccttccactccgaggaactccgtgcaaccatcactacagtccgcactccctccaaccagaccccctctaggtctctctatccagtcgatatactcacgatttactagtcattgttgctcacaactcactctccactctcggaccgcaatcttcgagcataaaccgtcactctcaggcctcggcctacggtatctcgggtatcacacatattatcttccccactcaaagtcaaaccctgagttgtgttggctcactctcagccacaaagtcatcgagttacgacacttggagaaaataataccacaaaactcgctctcgggtcgtcaccctaaagcgtgctctcggatcgtcacccgaagccaccgtacccctcgtactctaaagacaccatgtccctcgagttaccggtacctcaggagcataccccgctcctcacgagtcgttgggaccctcatgtccctcgagcaacaatactaaacgcttccgagcatatctccagactctctcatggattcgcgtaagacacctctatgcctcaccatccatcatatcccctcgaaaacatccttatgaccaactcccggccatctcgtaaacacacctttctcttaggttgtttactcaaactttccgaaaatagacaagtcctttctaggaaactttccatttttggaaaccgcacaacacaatcttaaataagacaactcaagtcaaatccaagaaaaaatactcatcttattaatcatcaactgtcatgatcgttacaactccaaacgaaaatacaaatgaaagagaaataagaacaacaactcaaaagctcaaaaactcaacaacactgaaactggaaaccaaggaaaggcaaactcatgcagcaacctgcttctcgaaccacttcttgaaccttgccttcatcctcgcctctggctcccaagtctcctctgtcacaccatcgcagtcccacaggactttgatcaaaggaatcttcttccgccgaagttccttgatcctcctctcgagaaccctcactggtctcgcctccaaagtcatgttgggctgaagatcctctggaatcttagccaacacctcatcatccttgtgaagacacttcctcagcatcgacacatgaaagaccttgtgaaacgcacgcataacatcaggcaactctaacctgtatgccactggtcccaccctctcaacaatcctgaacggacccatgtacctcggactcaacttagtctctgagatagacctgttcggacctcgcaacatggccatcttaagatacactctgtccccaacctcaaactcaagctctctcctcctcttgtcagcataactccgctgtcgatcctgagcttccttcatgttcagcttaagaacccggatcctctctatggtctcctgaacataatctgcaccatatatgctcctctcccccacttgggtccagcataacggtgtcctgcatggcctcccgtacaacgcctcaaaaggagccatcccaatactcgcctgatagctattgttataagcaaactctacaagactcaagtgatccgcccaatgacctccccaatcctagacacacatccgcaacatatcctcaagcgtctgaatagtcctctcagattgcccatctctctgtggatgataagccgtgctcatctgcaccttagtacccatctctgcctgaaaggctctccaaaatccagaagtaaacttggaatccctgtctgacacaatactcacaggtactccatgcaacttcacgatctcgttcacatatttcttagccaacaccgccgctccatcggtttttctgatggccagaaaatgtgctgacttagtcaaacggtccacgatcacccaaatagcatctttggttcgcgacacaagcaacccaaccacaaaatccatcgtgataaaatcccacttccactcaggaatgggtaaactctgcaacatgccacctggcacctgatgctcagccttaactaactggcaaacattgcagtctgcaacccaattagctacatccctcttcatccctacccactgatagtaccgcttgaggtctcggtacatcttagtcgctcctggatgaatggaaaacatgctcgcatgagcctcactcaagatctcccgtcgcaactcctcatccttaggcacacaaactcgctcatgcacaaggatagtcccattagctgcaaactgatactcagagccctctaccttagaagccgcaatcaacccctcatccttctcctgagccaaccgaactctagtcagaagatctgctcgatccacgagttccaatcccaatggctctcgtgccacagcacacaaccgcaaagcaccaatctcactcaccaaggcctcaacactctgccctggagccgcgcccacgcgcttacggctcaacgcgtctgcaaccacattagccttaccaggatggtaagctatctccagatcataatcagccaccagctccatccatcgcctctgcctcaggttcagctctggctgagtgaagatatacttcaaactcttatgatccgtgaacacctgcactttcccaccataaagataagacctccaaatcttcaaggcaaagattactgcagccatctccaaatcgtgagtaggatagttgccctcatgcttcctcaactgtcgtgatgcataagcaataaccttcccacgctgcattaaaacacaacccaaaccaactctcgaggcatcagtatacaccatgtaaggctgtccatgctctggcaatgctaacactggtgtactcgtcaacatctccttcaggctcacgaaaccctccttgcactccggtgaccacacaaaaggaacatccttccctgtcagcttagtcatcgactgtgccatactcgcaaaccccttgacgaacctcctgtaataccctgccaacccaagaaaactcctgatctcagtggcattcgtcggtctaggccaatctctgatagcctcaatcttctctgaatccactgaaactccctctgcagaaacaatgtgacccagaaaacccatttctctctgccagaaactgcacttactcaacttagcgaacaacttctactcccgcagcttctccatcactctcctcagatgtacctcatgctcctcaggactcttagaatacaccagaatgtcatcaataaagatgatcacaaactcatccaaaaactcctggaacacgctgttcatcaacctcatgaacactgcaggtgcattagtcaacccgaaaggcatcaccacgaacttaaaatgtccatatctcgtcctgaaagcagtcttgcgaacatctgcctccgctatcgggatctggtgataacccgacgtcaaatcgattttggagaaacaagtagcacccctcaactgatccaacaactcatcgatccttggcaaagggtacttgttcttcacagtgacctggttcaaccctcggtagtcaatacataagcggaaactcctgtccttcttcttcacaaataacaccggcgctccccaaggtgaagtactaggacgaatgaatcccttacccaataaatcctctagctgcttctttagctctgccatctctgctggagccatcctgtagggtgccttagacaacgccgctgtccctggttccaactcaatcatgaaaggatcagaccgtgatggtggtaatccctgcaacgattgaaacacatcctcgaactcctgaacaacccgaatgcctcgcagcccttctcgatcattttctctgcctgcactgctgagatgacgagactccctgagatacgtctcactccctgataaaccaaccttccctctggccgctcaaaagaaactctcccacggtggcagtcaagatgtactctgtaatgatccaaccaatccattcccagaataacatcatacaactctacagggctgataatcaaatctgctggcattgactcccttgcaatctgaatatctacacccttcgctctctccagaaccgctagaaactgccctccagcaaccttgacgtggagatgtcccctctccctgcagtggtagcactccctcgtctcagctcgctgcgtgcaacccgccaccttgtggtcaaggctcccacaagaaaaacatcctgcacgaccaccctggccagctctggaaggatgatcccacttcctcttctgcccctgcgcaggcttgctgcccttgctaggtgccacctgctgctgagtcttcttcggttgtaccgctggactcactcccacctcctgcctctgaaggtcctcctctacctcctgtctccaccagtgccgccttcgtggcgtaccctcaaatccggtcgaagtcccctcaagaacctcctcatctgggcctggtcatcctccatgccccgacccgcatacaccaagagtcggttaaactcccggtcatactcccgaaccgaccgctcaccctgtgtcagctcaagaaaacgcgcctccatacggtcgagcgcctccggcagaaagtacttggcattaaactcagccacgaaatctgcccaagacatatccgcctgcctcctcctggcagtcacactccgccaccacaaatgtgcatccccctctagaaaatgcactgctagatctacccgatactccgccgagcatctgctcgaaccgaagttccgctcaacccgcgacctccaactgtcggcctcctcaggactagtaccaccagaaaaataaccggtgccaatcctctgcaactgctccatcatcctcaaataagatggaacctcctcagcaaccacagcccgctgctgcacctccgccactcgtggcgcaactggagcctccactggtaccacacctggtaaccgctccaacaactgcctcaacaggcccgccaaaccaacctctggaatctgggctcctccggctgcagcacccatcaatcctgggccctcagcaccaacggcatacacaccggtaccgacactagctccaccagcccccactccggctgcaccagctatatcggcaccaagaccgtttctaaccccgggctccacaaactcaggctgcgaacccacactctgctcaactgtggcactgtggccatcactctcgccggtaccctcgaggactcgtcccctaccgcgaccacgaccacgaccacgaactctagctcctctaaccatctgcgctactcaagaacaaatggctaagaaactaaaacaaacgaatatattacaaacaacttaccgtggaatctcatttaaggctcggagaagatgatgctaggactccaacaacacacaattgactaaacactccataatcaatcctcaatatgctaacaccctatctcatcccacatcaatcaacaggaaaataattcatcaattaatttttctacacatcctagaaccgtaatcgctctgataccaaattgaaacaacccgacctattttttttttttttaaaaatataattaaatattcccataaatatctaattaaaccgcaagtcaaaaatactattttatgaataaataaataattcgtccaacaaaaccaagaataactaacaatcctaaccgggttccaataaccaaaaacaccaaaaataaaataaacgagttcctagatcatcctctcttccttgccatgattccacgatcacactttatcgttacctgcatcaacaacacaatgagatgcgtaagtattatcataaatacttagtcaggcgatcctcccatctacgagctatacacacaagcaaataaaaaggtataatcacgaatacaatacaaacaaaccagtcattgaacaattcacccaaaacacatccaccacacctatatatcatcacacaaaacaaatcacacaacccaatcgctcagataagctcatggtcacgcactcaccttaacaaattgattctaatagcaattaaacccaggagagtctctccttgcgtctgaaacagtccagaaactacctacagcaagtccacaacaataatccattggtttatacaaatagtgtaaatatatatatatatatatatatatttgtaataagaaaagaagctatttgaccattgtttcctgtctacgtttgagagggaaatttgccgccaaaacaatagatcctcaagtggttggaatactgaaaaaatatacatcctcgtttagcctattatgtatctatgttcatatgaaagtattttaaggttctcacgcagtctgaatattggcaacatataccaaggttatgaaaagtgaaggtaacatcattgtcttatctcattaataaagttgaattaaaaagaaataataaagaatttataatcttttacaaatcgacactgacatatccatgtttctataaacatctaataattaaataaagtgccaatgatacactagggtctggtatatgaatagttcccattgtcacgtggatagtacttatcttttttttgtttaaacccatatatatctatcacacttatccatggcaatgatacattataacacaactaataatccattggttttaaaattgtgtagaaatatttttattttttgtaataaaaaagaagctatttgaccatcgtttactgtctacgtttgagagggaaatttgccgcgaaaacaatagatcatcaagtggtgggaaaactgaaaaaacatacatccacgtttagcctaatatgtagcaacgttcatatggaagtattttaaggttctgacgcagtctggatattggcaacatataccaaggttataaaaagtgaaggtaatatcattgtcttatctcattaataaagttgaattaaaaagaaataataaagaatttataatattttacaaatccacactgacatatccatttttctaaaatgtatataattaaaaaaaatataaacctaagcggaaaatttgccatctatccgaaattaggttaaaaataggatattggtttaatgaataaacactaaatatctcttatataaaccgtaacataaaattagattaaacctgcaaatttatcttttaatgggagactcacaagagagcataacaatgtgtggtgttgaagaaagttgtagagaaagcaagggttcaaatgttgttatggaggtattttaaaccgtttatatgaatctagtcatctctttgattttttaactatgaacttacttttaattttgaaggtgatttcaatgtcagaatttcacattcctcatccgttgatggagatcatcgttagcaaggttggagaagatggtgttgatgcgttgaagaacttcttgctggctggtagagaggggagatatgcagttcttttaagaaaacattatcttccgttcgaatggacaaaaaccatcatttcatgtggtggtccatgtctcattcaaaatactacactttcttcaagaagtgtcttgaagcgaataatccttatgcaaagtttgtagagtaaagggctgacttatgaatcgaccatagggtactttcaaatgagatgccgttggaaggtgtgcaatggtaaacgcaatggtggtttgctcgacttgaatgaaatgaaagtgtgcgtggtgcagccaccttatcagctggacagaggtgggtaggccaaggtgctgtagatgtaagaaggttgggcacaagttgagcacttgtaccgagtaagggtttgaggatgaaattagaatgttggggaattgttcttgaatgttgtttttgggtaattgttcttgaaagtttattttggattgcttctaatgtaagtcgggtgagaactttaagcttctttgatggtatcttattctcatttaggtatcagtttgctatcttgtttatgttattaacttttggaatccatgggagtttatccatatgacattggatttgtaatgcaccatttataaatatttttagaattatgttaagaaatttggctaaaaaatttgttgaacgtttgaaattagcatattaccctaaattaaaggtttaacagtatggtaattagctaccaggtttgaaccaatttgattcccttagggaattagctaaaaggtttgaaccgatcagatgttctttaaatatttatttgattagatgttcttcaaatattaatttgactaaattggatatgtgtatgtggataacgataattacagtcaagtaataatatgttaagaaacaataaatattaatttaaaccaaaatatgtatatgtagatacgtctgtttggatacgtctatttgtatacgtctttagctaaaaggtttgaaccgattaaattaccttaggtaattttgaaaaggtttggaccgattaaatgttctttaaatatttatttgactaaattgaatacgtctatttgtataacgataattataggcaagtaataaaatgttaagaaacaataaataaaaatttaaaactaaatatgtatatgtggatacgtctatgaggatacgtcaatttggatatagataataaactaaatttgtatatgtggatacgtcaattagtattagtccacgaactttttagatttctaaatattttcgatatcaccacaatgcataatatacaatataaatcagaatttataaatcatatagaaagaatatgcgataaggatattcaaaccaccgcctgaccacatggagttaaaccgaattgttggaattttttttaaaaaaacgtcatgatgaattttgtaggaaaagttaattagatctatatataggaccttcatagcctatagcgttaggggcgtgtgtaagttgttattgagaatcgttccatgcagccgcttacaccacctaatgacatatcaatcaatcaactgtttaaacggctatttaatttatttcccacaaaacacattaaccaatgtaagctcaattattatttgacatatgctgttaaacctttacaataaaaattcgaaaagttgtacttttattccaataaatatcaattttaaacagatgatataggtatccatgtggttgtgattatgtaattatattgcataatagtcttataaacttaggtaaacttacttaaattagagtagtgctgagttttaggaggataattagttcgtacaacaaaggacattacaacaaaaaacattacaataggcgaccacctgcatattatgtgaaacaatatagaaaagtcattaataagagttcatataacctagaatgataccattatagaaacacctagaactagaaacaggaccttccaattcgcagttatctagaaaatcaattttccacaataagtcttgacacccatgatttcattaaaattttcactataattttttccctatcttcaagcaaacttctatttgtgacctaatagaagagacatctcgcaagctcagcaactcaacacataaatatagcattccggattcaaatttacccttaaactcatgtttaaagcttgcaataatcaaaacacaattatctaacttaaattcttggcagcattgcatgacatcattacatatactaattagttattatcatatgtgaacgatacgtgtaaatgacatcattagttaaattcttggcagcatcgcatgacatcattaccattttgatttcttcaacttcttcaaacgatggttccaggtaaacagatgaaactgcaccataactcacgattttaaccttctttttgcgcacaccaaccagttcaggctccctaaccaccctccatcgagcaagcgacacaacaatttttggatgaccatagcgccggtaacaggtatcaaattccaatgcctttctcccagtggcctcacagtctagaacctctttgctgcagtaggaaaacatctaacaatttgaaacacacaaaattataatatttttgggaatttaagccggaaaacttactatctgtccattaatttaaaaggaatgatcatcccctctacgccatcgtcgggatcaccagaatgagacagaatttcaacttcaacaacagcaccgacgagatctgtactttcagtgtaagtttagatcaaaccctaccctcaaaaatgttgttaataagaatcaattgataagttaataaacatagacttaccgaccagttagtcggtatcgaaagtcccctccaatatgttgtcgaaggaagtgaaattgttgaactggatagcggtgttcggatctacggatgttacaaccgtctcgtccatcaagtaaatcccatattcagccgtcgtagtcttgacttgatcagaattaggtataaccttgaagttggttaacacgatccatttattttcagagatcttgtcgaagtagaaggcagaaaagcgtcggtggattgtaacctccatcctcatcccctattcagaaactgaaaaattgttaaaatcaggaacatgcaaaaaaaaaaaaaaatattacggtttatttgctatgataactcttagttcgaatgaatcgcccctttggaatattttgtactttttcaagacaaggactcgtacagtccagccggtgattagaggggagagctcgttgagaagatggtagttgaacattttttttctttcgttttagtgattttatggtcaactaatggattaagcaacttccttaaataacatctcacataaccaataactcaatcgtttagaataccgactggttagtaataactatacgaattaaccggatatcgtttaggtatcattacattatggactcaaaaattatttttaaaacgtgtatccatagtaacaaatccacaaaataaagttatcgccatgcattacataactatataggtgaatccatcagatgttaaacgtctgaagatccaggtggataacaacaaatttagttagcatgtttagtattttcgaatattaaatctaaatatttgaactgggaagatggggagctcccattcgtaagcgagggaaaattaccgccaaaacacattcaaaaatcatcttgctttaccttggatgaatacgtatctatacttgtatccatggtaacaaatccacattcaagatataatgaccaacaatatttctcaatttttgaggatccatgacatgacaaacaatactatataccacatgaattacaacaaatgtctagaaatgattaaaatagtaaaatgatacatcgaaaacatttgaaccaggaagatggggaaatctaattcggatgagagggaaaattgccgccaaaacacaacaaatatcaactttttttttgggaaacaaatatccacgcagattgtaattctttttttattactacactgattaaaaaaattaaatatattttatacaaaacaatcaaaaccaatgacagacttgcaaaaattatacatagaccaaaccggttctataccacccatcgatgtctaagttattggtataataaggtctataaatagaaaaaaacctttaaaaattcttataaaaagatgaatcgtttaattgaagataaggtgggcgatttacggtaaagcaaggtttatgataatattaacttatacaatgattgagagtaattttctttatttaatatgtagcagattccaatgatggatatacacattcctcagctgttgatggagatcatcgttagtaaagttgctgaagatggtgttgatgctttaaagaactggttgctagctggaagagagggaaaagatgctgttatgtcgacgaaaaccgtaccctctgttcgcattgacatggataatcattttatgtggtggtcaatgcctcattctaaatactacaatttcttccaaaagtgtcttgccgcaaataatccatatgcaaagtttgttgagaagaacaaaggactgacatatgagtcaacaaccgggtactatcagatgagatgccgatggaatgttactcacgacaaacccgtgttcattgacatgaatattgagaaaaggtgcattatgcatcctcctttccagccaggaagaatggtgaggcgtacgtgccctaggtgcaagaaagttgggcacatgtgcaaaaggtgtctcgcttaaggtggacctcatgaataggaagatctaagagtttgtgtttttgttggttaataacatctaaggattttttgtttttgttatattataataagttttacgggaatgtaaaccaataaagattgtgatcgttaatttacaatgacatctaaggtccaatttttatttagtcatatgttttcattttcgttattggaaattgtttcgtttcttatccatgtaagaaaatatataaactccaaatccatggagttattcattagaatggcaattttgtatcctttgatataatgaaaattgtttagtttgttatccatataaatttataattaaatgaggaaaaaacataatagtggatatgtctagaaagtagcatcggaaggacagacgtgttgacgatgggtcccttgatgtgtagcttcacaaataatatccaacagataaatcaatgtaaagggtgtcagtagaaagtgaaaacctgacgtattagatctaaaaagaacgaatagattatgatatctactgcaaaaagggctaaggttatagtgtttagggttatagtgtttagggttaagagattccctaatttccctcattcggaatccatggaaaactatccacattattaaatcagcattaataaaacattttgttcaacatgatatatttgatataaatttcaggtgtccatgaatacatatcgacttgaactttgtttagtttagtttgttatccatataaatctataattgaatgaggaaaaaacataatagtggatatgtctagaaactagcatcagaaggacaggcgtgttgacgatgggtcccttgatgtgtagcttcacaaataatatccaacagataaatcaatgtaaagggtgttagtagaaagtgaaaacctaacgtattaggtctaaaaagaacgaatagattatgatatctactgcaaaaagggctaaggttatagtgtttagggttatagtgattagggttaagaaattccctaatttccctcattcggaaaactatccacattattaaatcagcattaataaaatattttgttcagcatgatatatttgatataaatttcaggtgtccatgaatacatatccacttgaacctttaataacactcaataaaattagttgtactaattctgagcaattgaaaattcagtacaacttataaatcaaaacgtatgtagataatagaatcgaaatgtttaagcaatgatggatagccgaattagaccttgataaatatactaacagaaattacaataatttcggaaataaaatgattaaaaaacataaaataaaataaaataaaaagcaaaaataaaacgagaatatttttcatagatctaagctgcgatctcaggtcttcaatgtcttcccgaagatcggaatttagatcccgcgactcctgtgacaacgaggtaatcacggaatcacaaaaatttagccctttctgcaattttagtgtagaaccctcgatgttatccactatttctttcaactcacggatctcctcaacgatacatgtatctgtccatttgaacaaatggttacgattttcctgtattatcgatagttatttcggatagcaagtagtataaattatcagataattagtagatttacttacggaagatcccagtggacatgcataaaacaaacgacctgggttccttggagtagctgatgttttcatcactacttcctcgccacaagggcagaaaattgggatacctccaagtcgatctatcaagttctagttgtgtggtgaaagttgtacgaggagactaagcttgtttctatagaaaaccctagaaatttggtatttatgaccatttgataactacgtcgttctgataaaagtgtaaatgattaaatattatataaattaaataaaaagtataattatggtttcatttatacaaatccactagtgacaaatccatgaatattgcagtagtccatgaatacaaatccacataaacatacataacacaaaccgtagaaaatgatgtagtgttttaatatagagaacaattatcgaatacctaaataattattttgatagtatttatggttgattcgattggtatgatggagacaaatacttagacgcagagttttaatatagagaataattaccggatacttaaattccgttattcagaatccatggaaacctatccacttgtgacaaatccattcattaaaagtaaaattatggactaaagtatacaaacccactagtgacaaatccatgaatattgaagtagtccaagaatacaaatcaacaaaatcatacataatacaaacggtagaaaatgatgttctaacattttttcgttattgattaacagcttgacacagagcgaatttccaacaaactgaaaattgatctaacacaaaacacggatcttaaacaaataagtgaggacaaagcactcggggcaaacatccaaactctcaaaatgtagtaaatgacaatctgggatagagtttaaaatcctgtacccctggtataattgctgtcctgttggagccatgtcttgtatctgagtcatgacctgctcgacgcaattaacagcttcctgaaaattattaaacatctccaaatacttttttagtattattctaccatcctctggattaccgcaaagaacataaaaaaataccaaaagcaaaataagaatgtaagtaatgtactgcggcttggccaagcatattcagagcttgaacagaggggccaactagagcagctagtcgtaagccttcgatgtatttggccgtgttgttgccagactgtaaacacaccaatttcctaagttgattgtcagcccgacccaatgctggtttttccaaatcattggcatcacgatgaggtcaatttcttcaaccaaactgatggagaaccaggaatggtccgcttgaactggttattccattggacgcgcaacttattttttgcagattgaaaggaacggtattttccttgtagataattgcccaaccaaggtttgataatgactgcgcgttctttagagagtgtcaatttgtgccattcattaaggaaacttcctagtacctccatgtgctgcaagttgtttagcatgaatcatgtaagtagcatattgatccgcatgaactaaaatgagttaatagaagtttgttttaccatggtatcaacccaattggtcggctgtgcaagctggagcaaaaatctgtgggatatcacaatatcaccacgagtgatgtgttccctgaaattattaagtaattttagtttttcgataaagcatcaacagatagagaaaagttaaaagggtaatcaaattacttatgaggctccttctaaagggtgtcaatgaaatctttgaaatttgttttgtccaaagtaggaaacaaatcaatctgatccgtggggggagcatttgggttttttttttgcaaaaacaaaacaagttgggcttctttttaagtgaaagcggttgacaactgttccgttgcaggtgatgaatcactgacttcaacataagctccactattggcgggaacatcctaagatgttataaatgaaatttaatattttgagaatgccataaataaaccaccattccaaatgagcagcagaaaattctacctcttcatcatcgttttcaatttcatcatcttctttatgatcatcgtctttttgatcatttgggttttttttgcaaaacaaaacaagttgggcttctttttaagtgaaagcggttgacaactgttcccttgcaggtgatgaatcactgacttcaacataagctccactattggcgggaacatcctaagatgttataaatgaaatttaatattttgagaatgccataaataaaccaccattccaaatgagcagcagaaaattctacctcttcatcatcgttttcaatttcattatcttctttatgatcattgtctttttgatcatcttcttttttatcatcctacaagggaaagagggtataaagtgagttatccacgaagttaattatatccacaattaagaatccatataaaatacgtagtccacgtggataatggatgataatgttacctgtgggttgatgggtggttcccattatataaattcaagactctctttcctgacctcatcggatgcagcaactgaagaacttatattcttgcacactgtgtcaagcaatgtgtctacattttcagccaaggacaagtctgaactcttaatctcctagataagatagaagatgtataacattagcatatgagtaacatccattctaagaaactcaaagtaaaatgaaaacagaaggaggtcgaagaaaacctcggtaacatcattaggagatggtttcgttgcggtatcgaaaacagcaggaggtcgaggagaaggcagatgctaaggtaaaatgcaaatgtagttaggtatataatagttacatattatggacttgaaaccgatattgaaaaatttacctcgtctcaagatttagactcagtatcatagattggttgatcagagggagggagctcggtgctattagcagatataaatttgggtaatataactgatggagtttcatcctgaaaaggcatatgcacataatatatgaccaacattatgtggggaacaaaatatgaaagaacttcataacaattaccagatgcttctgtggggaacaaactgaatccttgcaggtctccatggatatctttttccataactgatcatcaacaatattatcggaattttctgagactgtttcgtctccagcatgcatcgaaacattgaccccccttccaatgacgttaatggtggtgaagggggagttatgatgtttgtcgcctctacaccagtgttgacaggagattgagagactgtgcagaggtttgtttggatgcgtactttcttgaacggatgatgagtagccggcctggacctgtaagattgcaggagcctgatctttttcagaagatttagattctcagatcttaacttcttaacactctccgtaaattcatgtcttatagaagaaaactgagacttcacccacaatttaatgtcttctccttcattagccttatctgttgcttcatcatcattatcttctgcttcatcatcatcaaccaattctaacttacgcttccagcctcgcgtggatgtactaacttttgtttttgatggagttcttttagaagaagaagttggcgaaagtttctttttcctgataactatatatttcttgtgttgtactacaggctccttttcattgacataaatgagcggtagatcagcataaccaccaggccactcctttttggtgaaattatggcatttgcttatctgtttaatcaaataaagaaccttcttgtctctcacttcatcatcccactcaccccaaccatcctcattggtgtttacagacagcatagggataacagtcatctgaagaaacaaactcagaaaattagacctactaaaaatgtcatgaaagcacatgaaagaaaaggtacaacaacaatgattacaattacttacatcaggaacacgttcaaggagatgaacatcgttgatagaaagattgtttttcggtatcccaattgaatgtcattccaaaaaggttctctcatctgcagaaccaggaatttgtccagtagaccagaaatgttcctataagcaagaaggtgcagggctaagggaaagccataaatagctatactttgctgttgcatctgatttgtgaattgttggatgggatcttctagcttgattccaagacgagacctctatctcttagaatcagccattgaaggtttgtttctaacatgcctcatgatctgaatagtcttcaaaaaagattctctcccccatgggaaagcaaggaatgagtcaatgtcctctaacatcttaacatacttgaaagttggacgatgagtctggttattagcaataagaactccatcaacaatcaaaagcagagccagggggagttttaaagggttctcaatcccttttaaagcttggaacttagaggaaacatcagctagtgttgcattcttatcttccccaatcaaaacattccagtaatcattcgtcccattctcacgtctagggaagaagtcaggttcatactcctccggaaattcaccacacggcaaaccagttacagaaccaaactcaactaaagagaatctaagaggctgtccaccaaaaacagtccacatttcgtatttctgcttggtaactaactgtctacataacaaagcatgaactagtttgccggagattggacattcgctaacccttaaactaaacaaagacccaaaacaagagtctatgatggtttccatctccttggaacctttcaagacgtcacatattacagtgagaatgtcgggtctggagtagatattgagacgagcatcagggtaacggtcagttgcgaaatgccgtggagggagacgagtgtcgaggtcatttgtatcatcttcaactgcgcttgaaatcaaagggatgatttgtaagaaaattttggaacaacaatggattaaacgttcaaataactgtaactggtaaaagaacaaagaaaaacatagtcgattacctgtcattttttctgaaagaagtgaaaagtaatatcgaaggatttgaatgtcggattgcaaactaggaaatgagtctgatttactgggcgatgaattaaggattgctaaccgaggaaacaaaggttaatttcaacaaagactgttaaaatcatgaaggattcgccggaataatttcacgcttaggtcaaagagatgaaggtttggtcgggtcgttttacttcagaaagactgttaaaaatattatttaattcctcaaccacatgaaattaattatggttaacctattttggtggggcttatggtaaaaaaacttaaaaaagtgcatactcccttccaagtgctcctttgcataattgaaactcaaaaaagtgtccttctgcctaatatcccctaattttttaaccgtgatcacgacatcttttgctttagcgtgtgcacctttcaatatgcctgcaagtgtataatgaaacaagaatttgatatagaatgttcagaccaactaataaaaaaatagaatgttctgcatcaacccaataaaaaaaaagaatggaagccaaaagacgacatgcttactgtttgtgaatggaggaatgaagaatgaagattgaaggatcaacaagctcctcatagttcgtgttttgcacaaggtacaacatttcacagagttgcaagtacacgaaacctaactcgtaactagacatgaaaccaataccagcattactcgactctgtagtagacttaaaagataattaggctgtcaaatagagagaatggaaataaaaacaattcatcttacacacaaactcgaaggtagcttgaaaaatcaataagaagaagcaaaattttcatttccctatgggtaaaaaaagtacattggttaacatacaacgatataacgcatcactcgtaacatatacgagggaaagaaatctgtaagtaggattactaagattctaacctgcaagtcaagtagagacaagaagactgtacaagttcagctctgcatcctttggtgaagttttggtccattgccgccttcagaaactaagacggtgtaagaatcttgactgattgattaatactgagacgatatgtaaaaaaattaaacatacttcatagaatacaacagccatatcaaccacatcatctctctcatcaccaattctcaaggaatctttcaaattccttaactcatctatagctgccaaaacaaaagatgagccaaatgaacaaaaggaatgatatttgaaaaaaaaaaagcaaagtcatctctatatacatattctccttctcctatcacgtgagtttgaatgcccactctgaacactcgtcactatgttatctgacgcttggctctacaggcaaaagaaatattttcaaagggcacgaaaaaaagatatagcatcatagtgaagaaactctctggagtatacatacctgtcaagcggcattcttaacgaaggtaacatcattagaaaaattaaagttttccaaaatcctcccacataaatcacatgccctacaagctcatcattcgtaagtcggagctggtagaatcataaccgcaagagtttaaaaatctcgaaaacacttaccaaccaccgtcgaaggggcaaattccgggaacattcttcgcacaatgcttacaccacaccatggccctcctctaaaaactaaaactcaaagacaggggcttcaagcgaaaatacatacaacgtcagatatttttaagcgatctcacaaacctacaattgaactttcttaccagaaattgaacttttcttaccagaaattgaattcgccgtcgcctagattagcttgtcgtaagtttttcccccgcacaattaaaaagcaagagaaggagaaatttgagagtcacaaacaagttggctctaaagtgggaagtcgacttaacccactcctttttttatatacatagtactattcaatacaacagcccaacccttatttgtttttacgcccattaatcggcccattaataaatcggatttggcaaataaaccgaacttaatgtacaaaaccggaatcgaagcaaaaaatattgaacagaatcaaaccaaaaatttgaaaatatctaaatggatactacattctataaccgaaaaaactgaaggtcaatcggtgtcaaactgaaatattatccaaaatataattatatttttaaaaaatttagttattgtagactaaataattaaaaatacttgataatagataaataataataaatatttgaaaataactgaaaatatcttaaaatatcctaaacaaaaaactcaaaggaaaataaccgaatatataccaaattgatcatcatctcaaaacttttgatggtcatttcatttctcccaataattatttaatatgttttttataatatttgcaattatttaaattaaataaaaactctgtgatataaggaggatgacataactaacaaaagtgttcatatttttatttttatttatcgtaaggaagatgacataattaataaaagtgtttatatgaccgttttgtaatattatacattctccaaaattcatactttagcaacaaagccgaaagtgttatgaataatagatattatatggatgcccatttagagcccattagcatattctagaagtctttaaattactttgttaccctaatatgtatctcctatatatatcttctacttacttatgaataatacacaacaacaatttataacctagttttacaacacgttatcagcacgaagcccttgccaagcaagctaacataaaattttgccatcgtatgttagtgatgggaccttatcacatccaagtatcattctaaaatttatactgctttataattgagtttgttatattctctgttttgaaaacattaaatccatacttcgacaaatgttttaatatttattcagtttaccttctttgatttggtatagtcgattgaatttttatcattgctttgaattatcgattatagttatttggtttaattagattgattagtatattattgcatatggattcaatatgacgagatcggttgactgcactattcgattagagataatatattattttattgttatctcttctatgcatcaccgtttgattatcgtcacacatcagaactacatatttattattaggatattttgttgacttagttctttggtttatgttccccgtttaaaaacttttggcaaaattaattagatatcattgttctcgttgtttctggtttgttatgttaatatatgattcgctaattcatgcttagttgtgaaatgtatgttgctgtttttatttaattctttgtagctaatcatatgttgatgttattttaagtaccgattattacttttgtttaatcacatatagtatattgatttatttttgcgaaatcatcgattatttaatcacacttctatatattcaacaaaatgccaaatctcacgagagttgcgtttgaggcccttgatatttctgggaagaattatttatcttgggtattggatgttgagatgcacctaatttttgaggaacttggggatacaattatcgaaggaagtgaagcaagcagccaaatcaaagcaaaggctatgattttccttcgccattagcttcatgaagaccttaagaatgaatacttaaccgtgaaagatcctgagattctttggaaagatttcaaggacatgtttgatcaccaaaaaacgggggtattacccaaagctcgttttgattggctgcatttgagactagagaactttaagtttgtagctgaatacaactcagcgatgtttaagatcacttctaagctgaagttgtatggggaaaaggtcattgatgcataaatgttcggaaagacaaacaccacctttcacgcgaataatattgtcttacaaacacaatatcgtgaaaaatgatacaagaagtattatgagctcatatcctcccttcttctagcggagaagaataataagttgctaatgcagaaccatgtatcaagtcaaaccggttccactccattcctggaaggaaatgtgacatcccaccatgacaaaaaaaagttaccatagtggttgtggtcatggacgtggacgtggacgtggacgtggagatggacatggacatggatatgtacgtggctttggtcgaggtcgaggtcgaagtgtttcttttaagaacacaaattctcaccgaaagtaggaaaggaaggatgataacaaacatgaaaaaacccaatggaaatgtgaccaatgtatgtgaccgttgtggaggaaatggtcattggtttcacacatgtcgtataccaaagtatcttgttgagctttacaaacaatcattgaaacaagatggaaagaacacagagacaaatcttgtgtacgaaaaaggcgaagatgataccactcatatggaactcgatgattttctaacccatgatggaaacattgattcttagattttaattatgttttttagcatttacgttatttaatttttattttaatgttgttttggttttatgattttatttatttccttaaacatggtcgaatttttaattatttttgagaaattgcctcaaatggcattaaatgatgtttttgggacataatgagcatctaaatatttttgtgacatatgtatagcattctcatttattttcaatttttaaacaacgaataatataattaaaagaaaataaattgaaaatagatctccagctcacgcttccaacgcgatgaccattgacgagcccgacgaccatcgacgaaggcttcgtgctcgagctcgaggacatttccgacaaagctttgagctccgatctgcatttccgacgaggcttcataggtttgatcttcagtcagttattaaatcgatatatttctccagaaatttccaatttcttcatcttcttcttcactaattttgttgacgaaattagacgagtactgttgcttaatggtgttcttcttcaccgttgttgtttactgttgtctaatggcgttcaatttttgaattgattcgtgaatttgtgattttaattgattttgaacacctatgacatatttgcctcttttgaatcgatattgaacagctactcttgttgtctcatgaatataccatccacaaacataaaaaaactagcctaatctctaaaataattgtaattctttccaagtatttgaaagtttgataaagagccaacaaatcctgtggattttggagcagagactttgagttatgaggattattacgatgaaacaagagatagatatgataaagcttttctgatgatgattacttatcagtgtgatgctttggttgacaagtttaatgtcactcctttgattattggtttggttggacctatctctttacgttacatggctctctctctggtggttatgacgatgattgggctgataaagccattcgtgaatccgaacttcaatctgaagatggtagaaatcttttgacaatattgtgttgtttggtgtgattctatttgttactaagtttcactctttttggtgtcttgcattgcaggtgaagtaaaagatactaagaggcctaaaacacacaaagctgagccgtgtaacttagatggtaaaagagcagtgacgatatggtttagtatgcttaaaatgactatgcctttatcgagttctttggtgatatctttccttgcttgtcaccaagcgggagcaccggttccacccacatatattgtgagataggcacaagaagtaaagcttctatatttgtcttgttttctcgatattagagagcgaatgggagagtgatcagctgtgtgtccggtgaaagcaatatacagatatgatcctttctagtcatgtgtttttcagttttaactctctttctattttcctgtctatggtttttgtttgtaggtacttcatccatcagtcggaacttcatctatctctactgtacatggaatagagcaggtaaaaacacatttgtatatgtttttaggaggggaacatacatattcaggatgaccttcctaaaccagaggtaattacttccattcgacttttttgcggttgtaaatgtctgttcatttgtctatctatgtttgtgtttgtagaaactgatataacccgattttcaccgattttatctatgttttaggtatacgattttgagtctttatgttatttctcgagtctttttagtgtcttttcaggtattctatgcagtgggacaataatggagataaggagacattttggagcaaaagttaaggaaaagagctaaggacgattttggttcaggaatcagcgaggagtgtcgatcgacacactcttggtgtcgatcgacaccagtttcggcccagcagaagtccatgacgctttcaagtttacaaaagaggaaatttgccccagaagactttcctatttgcattattagtccctggacgtttttagggttttatatatattgtttttagacctaagagcaagtctagtaagggtttttagtagatttcttagatgggtttctatgttaaaatgggcccagatgatagaaaaacagttgaatccatttacgatcgttcctaaaattgggtttttcgcgacccaatagaaactcatacgtggcctcatttaattggataaactgattgacaaaaccaaaaaaaaaacctacacgcttattttttttttcttctctctctctcttcttcttcttcgccgacgacagagacaccaaagacgattgatttcaaatcgattctcttcgttccgccatggaatgcagcatcaagctcgagaaatctcttcgttctaaaaacccaggtccttcaaatacttcggcttttcaacttcatagttcctagaaatttttaaatttcagctcctcttgttttttcacattaagcaaacctctaaattttgcagttttctctgatagtccgatacatgattaagtaggttgctttactttactttagttggcgaatgtatgttcttgttgtcttctctgagagtatgaaagtataaagttttgatttttgggtgatgttatttcagttaaagccgttgaagctatcttagagactagtgataagcttgagcagtggagcaaagaaccagaatctgctattgattactgtttacaatttatttggttcttggaattgcttacacgagtgaagaatcagcaagttggttcttggaattgcttacacgagtaaagaatgtgtatgataagggtgataatgagtctaaagcgttggctttgattctgtttggttgttggagagattttgttggtgaatttgctcctgtacggttaattggttttcagcagtacggtttctcctcatgatctggaggtaagcatagttcattttaggtttttgtttgatgtttttgcttcggagtttctgttatgaaggctaaaaatttgatacttaatatatgtagtggttgcagcatagatcgttttagtaaagttttgtttctatattttatctgaggttatttggaggatttgcaacaaaggttgctgcttgttgattggatataatccaaaggcaaaggtggttgttagcttgagatcaaatgcaaggtaatttatcattttgtatttatttgctgtgatcaatgctttgctgttatttactgtgataaatgcttcttggttgatataaaactgttgttaggtaaacgtcaattgctcttgtaggtaaacgtcaaatgctagttcttatagcatttaaaactgtaaaactgtgatgattgcttggtaggctaatttaaatcaatagtatttagtgtggcattgattgtgagctgtctaacaaagccataatttgcctttaaaacacaaaaccgtaacctttgatttttaaaacacaaaaccgtaacctttgatttttaaaacacaaaacctgaaacaaagatatggattcaccaaatccatatcatcatacttcaagctttataaaccttttgaacagtcaagatgacagtcacattctcccaccaaatccatatgaatgctttgaacttggatcagcaaatgtccctgtgtatagcactgagtggtctgatgatgatccaagtgaagatgaactaccaattgctgggaagaaagggaaaaaagggaagaaagccaagaaaccaaggaggaattggtcatcaactgaagatgttgttctcataagtgggtggctgaacacttccaaggatccggtggtgggcaatgagcaaaagggggcagctttctgggaacgtatagcagtctactacaactcaagtcccaagctcaaaggtgtggaaaagagaggccacatatgctgtaaacaaaggtggtcaaaagtgaatgacgctgtgaacaagtttgtagggagctacttggctgctagcaaacaacaaacaagtggtcaaaatgatgatgatgtggtgtctttggcacatcagatcttctcaaaagattatggctgcaagtttacttgtgagcatgcttggagggagcgtagatatgatcaaaagtggattgctcagtctactcatgggaaagcaaagagaagaaaatgtgaagctgactctgaacctgttggcgttgaagacaaggaagctcgtcccattggtgttaaggcggcaaaagccgcagccaaagccaaaggcaaagccaagctaagtccggtagaaggtgaagaaaccaatgctttgaaggagatacaaagtatatgggagataaaagagaaggatcacgctgccaaagagaagctaatcattattaaagacaagaaaaataggactaagttctttgagcgtctgttagggaaaacagaacctctatctgacatagagattgaacttaagaacaagttaatcaatgagttgttggcttgagtttcagttgtaggtttagtgtctgtttctagattatggttgtctaagtgtctgttttaactctgtttttatgttagtgtctgttttaagtgtgttttaatgtttatgtctgttttagtctatgttttatgtttaagtgtatgactttggcactttctgtttcagtttatgagtttgagttatgttgtttctgtttcactttcagtttcagtttcactttcagtttcagtttcaggaaatggattctcttgtgttgttgttgtttttacgcaggagtgacaaacacttggtctttactcttcttcttcattttggttttttactgatgcaaaacatgtgagaaagaagaaaatgaatctcgatgcaatacagaagcagaaactgatgcttcttcctcagacacatcttgaggttaacttgttgaaataaaatcaaaagggaattagctctttgcaacagtgtaaggttttcttggactcctatgtttctctttagagagagagaactttttgtattcttttggtttgctcaattatattacatgtgaatttgtcataggacgagtctgcattagtatggtactctggcaaagaagagaagcagattaagctgagtcaagtcctgagaattgttcctggacaacgcacggtgagtttctctctgcaatattcatgtatgctcataaacaagtacagttccttagttataagttagtgtttgaaatatgtttctataccatttcaagttttcaactaagcaactttcatactaatatattgcatattttcgtgcctctgtagtattaatatagcgtgggactaaatctattgaaaatagtggattggttgaaagaatgagttcttccactttgtgcatcttaaagtgttttcttatcacaagatttctttttcatccagcggagagagtggagcaggaaagactgagacaacaaagatagcgatgcaatacttggctgctcttggaggtggaagtgggatcgagtatgagatactaaagactaatcccatcttggaagcatttggaaatgcaaaaacattgagaaacgataattctagtcgttttgtaagcgtccaaactccttgtttactcttatttcttttactctgtgtctttaaaacttctgggtctttatttatctcttaatctttctctgatgttaaatttgacagggtaagttgatagaaattcattttagtgaaacagggaagatttcgggtgctcaaattcaaacatgtaagcataaaccttagtgctgcttcacacatttttttcaattttcctttacaaaatctaacagcttttttcttgttgtcttatattttgcagttttactagaaaaggtaaattcctcaatatttttgctgcttcagtttctttcatgttgaaaaacgattcttaatattgacatcctttcatgttctgttgtcacactttaatagtcaagagtggttcaatgtacggaaggagaaaggtcatatcatatattgtgcatgatagtaaagaagatcaagaaagtgtatttgcaatttttgctgcagtatatagacgctcgtgaataatggaaaaccactattaaacctgagatcacttcagcaggaatgtccaacccctcatgcacgaagagtgtctccatttgtaacaatacttgtgagtaacaccacgtttcatgtttaagcgtatgtaggtaagtattgtttctaaccagaagtgaataatatagaaggtcttggcaatcatctgatttacggcttggttttgattgaagcaatttggttcagattggtttgcttaccaagatatatgaatgaatgacttgttttagctataagcatctttaatacagaactgttgtatacgtgctggaggactgggtttgctgcaattctgcaacctgaatagcttcaggacattgttcatactgggcttctcaatcttcctaggcctatcaattccacaatatttcaacgagcacacaaccatcagcgaatgggctctatgattgctctggttcatagcgttggaaaattcttccttcttcaccagtacactacaccacataataatataaaaacaatgttgtcttctttcttttttagtctccaagtgtttgccattctttagtgccgacatcaagtactttagtttgtcaccaaagaatgtactttagttttgtcaccacaaacttgattgttcttttcatttgaaccattcattattgtaccatttatttgcaccattcactactcttttattttgtatgaatgaatgtacaccgaataaaaagaatccgaacactactcctttattgttctatatataatctgaacactacttcaatatttctatcaactttctttatcacaataataaacactcttttctatcaaatcatttttatctcttctctctctttctataattttgctaaaatggcaggttcttcttcaaactataatctcgacgacatgttcgatgataagtttgatcaatgctttgatcaagcattagagagttatggtaatcgccaacgagtcaagccaaggaagaaaaaactttatatcgaaagaaatcgtgaagaaggtcacatccaattagtgaacgactattttacagagaatccaacatatcctccccatatattccgacgccggtttagaatgaacaaatcgttgttcatgcgtattgttgagagattctccaatgaagtcccatactttaaacaaagaagagatgccaccagaagactcggtttctcggcactacagaagtctacagcagcaattcgtatgctcgcatatggtattgcggctgatgcggttgatgaatacctctgaattggtgaaagcacgtcgttgttatgtttggaacattttgcagaagaaatcataaatctgttcggggatgagtatctaagaagacccacacgagatgatcttatacgacttctccatattggagagcaacgtggatttcccgggatgataggaagcatcgactgtatgcattgggagtggaaaaattgtcccaccgcttggaaaggacaatatacacgtggatcaggaaaaccaacaatcgttttagaggccgttgcttcacaagatctctgaatatggcacgcgttttttggacctccatgtaccttaaacgatatcaatgttcttgaccgctcaccagtttttgatgatatattacaaggtcgagctccaaaagtgaaatacgtagtcaacgggaaagactataatttggcttactacctcacagatggaatttatcctaaataggctacatttatccaatcaatttcaattctacaaggtaataaagcttctttatttgctacaactcaagaagcttgtcgtaaagatgttgagcgtgctttcggagttttgcaagctcggtttgccattatcaaacatccagctctttttcatgataaggtgaaaattggcaatattatgcgagcatgtataatacttcacaatatgatagtagaggacaaacgagatggttacactcagtttgatgtatctgaattcgtacatccagaatcagctagctcttcacaagtggatttcacttatgctacagttatgccttcaaatctcggtaatatgatggccactggagctcgagttcgtgatcggattaaacatgaagaattgaaagctgatttagttgaacatgtatggcaacattataaccagaatcaatcttaaaatgtactcgtttttttttcgcttttaaatatgtttttttgcttcttctttctatatcatgtatgtttaaaattttataattcttaataataatcatatttgctcaaatgaaaatatttaacaaattttcttttttcaaaatttttttgttttagaaacccacttaagaattccaccaatggaccataaaatttccaaaaactcttaaaaatttctaaactacaaaactatccaaatctattaataaaaaatacatagaaactatactttagaaactaatcactggatttgctctaagtttcttttatcatgtcttttatcaagttctctgcaaaccctattgtgaaagacataagctattcatctcctgttcttgacagattcactccagttattaatacagtgaagagatcttttctaactcttatctcctttgcagtgtttatgctttcatactcaattatgttgattgtttcattcaatatatctgagtaatctgcttgttaggaataaggtttctcattagggattcatatggtttagtagattgccccctttgctaggttatctgtagaattcttcatctttaattatgcttaatgctagatttagagtaattaactagatcttgaatccagacaatagatatgcccgccataggtatctgtagttggatctattatttgatgagtctggtttataggtgtgtaataagaatttgcctatctactaagatgaacaattgaactcgttaaaaatgcctatttaggttgatagtttctcggcttctccggttattattagctatggatatagggagtttcacggcacgcccaccggttattccataattagagttttagtttaagaatggttcgataacaacctaacttttattagatctactaaccaatagtttcctgagaatactctgttcctagctcttttcctaatcgtttacaacacaatcattctgctgttttcttactttgttttcttactatttcactcataccctcctaacttaatctcgacatttaactcactgtttgaacaaaagaactccgtgaatttgatcctaaaatactgtaattgatctcttatttgagatagtagttctaggtaatttgaaccatatcaaatttggcgccgttgccgaagttcttgggaatcatcattgagttttgtttagggatttcgtttagtttttacttctattttgttactcacgcgtttcttgttttcttcttttctgtgtttcaggtgtatgcctaggcaaacaaggagcacaaaacagaaggagcttatcaacttgtctgttcaggccttgggaaaacttgaacgcagcaaccgaaaaactcagaaattagcaatggctgacagagtcattagagctgatgcagaaggagttttaagagatgaagattggcaagcctacaatgaggctggtcagagattggatgatcatggactcatcctacctgaggacgccaatgaggatcaggcgcgcctcaatgcgcaaatagctgccagagacgcagcagggctcgctgtcgatcgacacaacagaggtgtcgatcgacaccatcgggagcagcacgacgacgcgattggtgtcgaccgacacaacagaggtgtcgaccgacaccaacaccagatttttgcagctattcctccagctgcggaaccacgtcgtactcttggggatttcaacaggcctgacttgttctatgctaatcgatcagtgattgtacccccaccattccaaaggaacgactatgagctgaagcctggctactttgctttagttggtcatcatcctttccatggcttatctcatgagcagccaatggatcatatcgagagatttgaggactttgttctgagcatcaaggctaatggagtctcagaggactacctactgtgcaagctcttcccttattcacttgctggagaagcagcttcttggcagaaacaacttaaagcaggttcccttaagacttggagaagcatcaagatagccttcttgaataatttctacgatgacgctaagtctgaagagttgagaaagcctcacttaaacaagttgtctaccttcacacaaggtccagttgaagctttcaaggttgcttgggttcgtttcaaggagtaccaacgagattgcccacatcatggtttcagtgaggtacaacttctaggtaccttcttcagaagagttgtttggagataccagatggctctagatgcagcgagcaatggtaacttcaacacacattacccagctgatgcaacaaccctgatagataacctcgcttgcagcaacagcaccaagaatttgattttgagaggaagaagattgatggagctatttcaggaaatcagatggcagaggtgaatgctaagctggattcagttcataacttgctcacagggaagaagcatgtccacattgcagctgcaaaagagactattgagcctgagcctgagtcaaaggaaggagtcttctacatagatggtcaggaataaaggaagtttgggcagccacatggcaacttcagtggcaacaggtttacatggaaccagggttcctccaactacactctaaagcctgctttccagaagacctttcctcaaagcagctttcagaggacctatggtaattcaacttaccaagcccccctccaccctcagcagagacaagaatggaatcgatgcttgagcagattctggagagccaatcaaagcttgttgtggagtttaatggcaagtttgatgttttctacagagatcttaatgggaagatcgacaatctgagctctcacttgaagaagctagatgtacaggtagctcaaactacacaatctatcaagagacaagagagttttcttcctggtaatcttgatgctaacccaaggaagagctgcaatgccatcttgattagagaaggagatgatgtgtgggaggaattggacactgaagacgagttggagctcgcagttgcagagatggtgtcgaccgacaccctcctgtgtcgatcgacaccatatgggacgcttttctcagagacgactcaatacgacggtgtcgatcgatacccatctagtgtcgatcgacactggatccggactgcaccttgtgaggtgcaagtacctatgcagcccgagcccgtttacattcctcctatcccttatccgaggaagcgtcgttctaagaaggagattcatgctgctaagtgcacagccataatggagaagatcctccatactcttcataaggatgcttctgagacatcttccgcctcactcaacaggtatgtcaagcgacttgttgacaaaggaattagcttagatgaagctaagctacttaccagagacatcagtgcaatcatgctgcctaaggccaagaaggagaaggtacagagagtagacatagctgagtacatccgcaccattactcctggttagaccactgagacgcttttagatccaggtagctttgttcttgattgctctatctccacaagcagattcagccgctctttgtgtgatctgggatcaagcattaacctcatgcctaagtctgttgttgagagactaggcatgactcagtacaggcctactcgcatcactcttctcttcgcggatcgttccaagcgaatccctgaaggaatctttgaagatgtttctgttaaggttggtaactccataatccctgctgatttcgtggtcctggactatgagaaggaactcaaggatcctcttatccttggaagagcattcctaactatagctagtgctaggtttgatgtgaagagagggagaatctctctcaaggtttgtgatttggagatgaagtttggcatggatggttcagagcttactaagcctgtcagttgcattgcttccagcatagacacacctcctcaaactgatcagaatcccaccacagagccacacaaaacgctccaacctgctcagctcgccaatgagagttgcaaagcaacggtgtcaatcgacaccactacccttgtcgatcaagaccttcgggtttcacagacagaggattctgcacattctcttcagcccacaccacttgaggacctatgtgataagttctcttctctctcttctcctgtttatctttgattaattctttggattattcgaagactgcttcacaagataacaagcgtagagttcctcgaaagcttttttgtcctattgttcttacaggtgacaagaagagtgtcgatcgacacaccccttcgtgtcgatcgacaccaaaagctgctccaaccagatctgtttacacaccgccttggaaggcgaggaggcagcagcattcctccaccacaccacccacatcctgaactccgccaagtcaaactattgactcaaaacaagcgcttggtgggaggcaaccaactggttttaattttcttttccctttcttttattttcttttatttttgatttattttttccactttctctggatttgaatgccactggggacagtgtcatttaagtctgggggaggttcatactaatatggcttttatttttgtttcttattaattttcgttttgcagttcatttagttatttcttttatttctttaaaaaaaaaaaaacgttttgtttagtttagttaggaatcatgatctatatttctcttgtttattgcttgattgatgagtattgcaggttcgagtcaatctgactattggaaaatctagatggtaaagcaacagacttgagaatatcgtagtttccaactcaaccactaaggctggagctaatctcactgatcttacttttacctcttcaagcggttagtattcatagatcttgactccttgttcatacctgacattgagaccaatgtgataaaaataatatgttcctctccccttataaaaaaaaaatatatgatgagagattgagacgactttcagatagtgcatagggggaagaatgtttcctatgaccccattattatacattatttggaatgatcaattacaaaggttggaaaaatgttgagggtgtcgatccagtacgcgagttcccctttgtttactctcgaaaaagaataactctgggggagagaaaaaacaccaaaaaagaaaagaatatataaagaatggtcaatttatcatggtataatacaggaatgagtctagaaggatcttgaatgttggcttgtttgatgagacccagcgatgaaagcctggtggatatagttgtggaacttaggcatgagatctagaatgttgtgtaagcttgtagagaagtacatgttggttaggatttgattagacttgttaagcatatggacttagttcggatgatcatggcaataggtaagagaatgttgggagttcctttgttttcaaaacctcttccacgggttcggcttttgtgttttgcttgagggcaagcaaaagctaagtctgggggagttgatataaccctattttcaccgattttatctatgttttaggtatacgattttgagtctttatgttatttctcgagtctttttagtgtcttttcaggtattctatgcaatgggacaataatggagataaggagacattttgcagtaaaatctaaggaaaaggaaggtaaagatgattttggttcaggaataactgaggagtgtcgatcgacacactcttggtgtcgatcgacaccagtttcggcccagtagaagtccatgacgctttcaagtttacagaagaggaaatttgccccagaggactttcctgtttgcattattagtcactggatgtttttagggttttatatatattgtttttagacctaagtttcttttatcaagtcttttatcatgttctctgcaaaccctattgtgaaagacataagttattcatctcctgttcttgagagattcagtccagttcttaatacagtgaagagatcttttctaactcttatctcctttgctgtgtttattctttcatactcaattatgttgattgtttcattcaatatgtctgagaaatctgcttgttaggaatagggtttctcattagggattcatatggtttagtagattgccccttttgctaggttatctatagaattcttcatctttaattatgcttaatgctagatttagagtaattaactagatcttgaatcaagacaatagatatgcccgccataggtatctatagttggatctattatttgatgagtctggtttataggtgtttaataagaatcggcctatctactaagatgaacaattgaactcgttaagaatgcatatttaggttaatagtttctcggcttctccggttattattagctatggatatagggagtttcgcggcacgcccaccggttattccataattagagttttagtttaagaatggttcgataacaacctagctttcttagatctactaaccaatagtttcctgagaataccctgttcgtagctcttttcctaatcgtttacaacccaatcattctgctattttcttactttgttttcttactatttcactcataccctgctagcttaatctcgacatttaactcactgtttgaacaaaaaaactccgtaaattcaatcctaaaatactgcaattgatctctgatttgagagagtagttataggtaatttgaaccatatcagaaacctcacccataagtcgaaaagtcttctatatgtgtgtcatattacatgttcaaaatctgaaaagggaagaggcaatatgtcattggctttgcttcctgttgtagattgtagtctgattcctattggcggtgcacattcaccacgaggtcctgatgatatatatgttaacaaatatttcttgaccaagactgagttaatgcagaagatgaggcaatgagcgttgaagtggaagtttgagttcatgtctagatggtctaacaaagatagagtgattttgtgtgtatagatgctatactgtcaaactatttattttaggacatgttttcagtaatttaggaaggtcttccctaaactatgaatttcaagcatttgatttttattcgatcatctaatgattagaatgatatcttcatatgtagtaatgatattctttgttccaaagtaaaactatggtttattccttacacccgaattcagtttttgctctagatatcattcctgaatatctaggatttcttcctaaatttcaaaaaatatctataaaaccatgtcatgatatgtttcatggttatcataaatatatatgctcatttgtaagatattcatgaatgagaagctttgtttactagttacatgtgtgacaatcctttcttgaatttttctgacaatctttcctgaatttttcgacaatccttcataatctttcaatgagaaattgtagcaaactcaatcacagttatctcaaaaaactattaaattgtctaatagaaacatatgatacttttctagtttagaaccatcatacaagtaccataacagtttaaaatggtttcacaagcatcatacatctaataaagaaacatagtcttaagaaatataaacacacttgttgaagatatcgataacaaatttgtttctgatgtcttctgaatcttgatcacgtagcttggagaaatcttcaatcctcattgccattaaatcattgcaacttcttctatcacggctcataaatcaagtgttctttttgtcgaatcttcagatttcattttgtaacctttgcctacaagctcgaccagcagacttaattctggatcatcttcatcttccaatgaaactttatcttcaagatcatcaagtagtgaaggtaagatgcaaaaatacattcagttgcatgaaaacaaaaacgttcagcacacttaatacattcaactacatattttaggaaggtcatcccaaattactataaatccttcccaaatcaggaaggtcatcctgaattattataaagccttcccaaaactagtttaaaccgttgaaagaagagactttcccgaattcaattacccagtgagacagacttgcccgattactcacgattatcaccgtgacctggggaaaaatgagaaaaagggggtgagtaatgaattactcagtgagaggatcctttccgtccactggaaatacgatacacgattccacctttaaaccacactcaacaatcacatagaaatagacacaacactcatatagtccgcatcactatgcaaaactataacacacaactcattcttgcttaagcaagatctccacatcatttccaagttcgatcatctccctgacctttgaacctatctagttccactggactcgttagtctttgagctacaaagaatccgtcaattcaatgcagaccatttccactgttccacttttcctcttttccactgttccactttttatcatctcaaaagttggtgattccactttctcatataacacatataattacttgttctcacaagtacaataattcaatcatcctatattactagaacagtcatcatatcatcaatcctaaataacaattcattattactaagcaatcagatctattcctatgcaatgaatcatgaagcataaaaatagaaacttgtaatcgaatcaccgcagatcacaccctcaccttcgccacttgctgatgtagaacacttgtttcagctgccttaaagacgccttaataactcttcaatgaaccgttaatgttttaatccctcagttgattatctagccagtagtaccatgaagctctacaccaaattttgtcccgatcggcatatttcagacctccaaacgtcgcctcgaagaagccaatacgaaatagatttctaggattcctgattatgcagttacttgtctaggaagaaacgcacatatcttcttaaatataacctcgattcaaactctgtctgttgcagtggattcatggaactctgacctttccaaagacgtcttattcaccatctaaagttttctcgtacgatggggatcagcctcgcaaaaccccaacttgaaactgcactttttccttcatcttcttccttctttgattctgttttgctttgccctagccttggatgctttgatcttcttcagcttgaatcccccttactgttttgaactaaatctccctctcccaatgtttttccttcacggtggtgatgatcccttctcttctgtcgcttctccttctcctcgatcctttcctttcttcacaaatctcctccaccttaagtttgtgacttctcttctcttctctggataactatggcgtggctgctcttagattagggtttctggttgtgatggtggctcaagtggtgacgaagaaggagataaatatacatacacatgtgtaaacccttttattttgtaatttgcttcacttgggtttcaatgggctccatggacttttgtttttaacaaaactaatagggtaggttcacgggattgggtttggggtgttacatttagaatctattaattttctggaacgtatacaaggagatatatgttgaccaattcacccacaatgtggaacatttagaaatttcatggtcttaatcgatgcatcaacaagatggtcacatgtaaacttattatcaactcgcaacatggtgttgcaagactatacttgcttaattgattaaattacgagaactttttttcagatttttctctaaagacaattcttcttgataatgctggtgaattcacatctcaggactttaatgattattgtatgcctgtttggataagtgttgaacatcttgttgcacatattcgtacacagaattgtttagatgaatcattgattaaacgtctccaattaattgctagaccattacttatgaaatctaaactcccaacttctatgtggggactccctatactacatgcagcgacattaattcgcatcagacctacaagtaataatgagttctccccattacaattggtttttggtcagaaaccaaatatttcccatttgattttttttttgggggatttgttgtatatgttcatgttgctccaccacaacgctttaaactgggacctcaaaggatgttaggaatatatgttggatatgaattaccctcgataattaaatacctcgagccgtccacaggggaccaatttaaggcttgatttgtagattgtaatttcaatgaatatgtttttccaacattagagggagataataaacatctcggaaaagaaataagttggaaagcattatcattgacttatcttgatcctcgtactaaggaatatgaactagcagttcaaaagataatacatttacagatataagccaatatgtttccagaatcatttactgacctgaacagagtgaccaagtcacatattccagatgaaaatgctccaattaaaattgatgtcccagaaggacaatatcaaactgctagtaagtctagagcacgcatgaagcgtggtagaccaatcggttccaaagacaagaatcctcgtaaaagaaaaggagtagaaattaataatggccagaccgaggaagttagagacattagacatgaataatgaagagattcaagtacctgatcatgagaatgataaagagaaagataatgaagagatctttattaattataccatgtctggaataaaatgaaaccgaaagcatattcgatgtcgatgatatttttgcatgcaatatagcagtcactacaggaaatatgggtattaatagcgggcgttaaccgctattagttttgtgtaatagcgtttccttaaccgctctgagatcgcccgttatcgtaggtcggacacatttaatagcggattcttgttgtgctatagttatttatataacgatagcgctttctgttctgcaattgttaatatttttaataacatgattcaaatgttattaaaactcattaatttgattttgacctatatcaaatatagcaaatgtttcgtgttattagtttgtttttaaattattcaaaatttatttattaaaaattattacaaatcatttttatttataatatagtttttatttcaatcatttaaaaaacaattaaaattaatatataaatatttaaatgattagaaaaccataacaaatttcattgtttacaaaaaccacaaaaacctatacatcaatctactactaacaagccttcacaatcattcctaacataaacaaaggtgcaccacctaaatcctcttctgtttccaactcatgatagcctctaggtggtactctcataacaacataccaattttaatcatcatcttccctagaatagaaaacctgttttgcttgagaaggtagaatgaatggatctttcaaataggctgtttggttcatatgaaggttaacaagggtgaaaccatcttcctcctttacaccattccctgtgttggcccaattgcatctgaacagcggcactttgaacatgtgatagtccataagtaaaatctcctttatcactccataatatgtaagcatatcagtgacttgtctcatatctcgagcacttgatctacacatgctaaatgcttcataagttactccactgttttgtgtcttccgcttaatagcatctatatgaaactgttgcccactaacgataaatcctttatgtgctaaggcaacatttcttggtccaaatgccaaccaccttgtctccttagaatgatttgttgagtctgaattaatctaccacagtaaattcagaacttgatcatgaagctgaagtactaaaatgatcatgaagctaagcaataagctaactagtcattaagcaaaacatgatcatgaagctaacaatctgtgccacggaaaccagtcatcaagctaagcaataagctaacaatctgtgctaaaaccattcatcaagcttcaagataagctaaccagtcatcaagcaaaacattatcatgaaactaacaatctgtgcctagaaaaagtgtcatcaagctaagcaataagctaacccgtcattaaccaaaacatgatcatgaagctaacaatctgttccacgaaaaccagacatcaagctaagcaataagctaacaatttgtgctaagaaaaccagtcatcaaacttcaagataagctaaccagtcatcaagcaaaacattagcatgaagctaacaagctaatcagtcaatataatttaacaagctgtataacaaataatcaagaagaccagctgcagctggaaaccttgattttaagccattgtgcaaactgcttagtatggtttttccataaaaatgttttattttttgcacatcgagcatcattagcttgtaattcttccaaatgcatcctagattttacattagataacagttctcagaaagaaattatactaaaaattagtagatcaaacataaagggtaacctcttactcgacataaggatccaaagatgccatgttcattagcacataacgatgtgcagtgtctctatctttatctgatagggtaacttctacacccttctgcagaggtcgaccttcaaccacgcttctatcagcctcaatatcttcattgcgattaactgtttcttgaactggtactgaatctttaaggaactctaaacaaaatgcaacgcattctccagctaaatacccctcagccatacatgcttctagccttgcatgattcttaacaaacgcctttagtgttttcatgtacctatatctcaatcaagaaatgaatattagttgaaaatcattgcaggaaatacatatattgaaccaaatgagtacatcaaacctttcgaagggatacatccagcgaaagtgtattggtcctcccaaacgtgcctcttttgatagatgtattggaaggtggaacatgatatcaaaaagggatggagggcagaagcgctcaagttgacacattgtttccacaaactctgtctccattatcaaaagtttctccgggtcgatgatgcgctgacacaacctgttgaagtaactgcataatctatttatggcaatcctaggacccttatataacaagcctcttaatgcagccggtaacaagttctgtactaggacatgatgatcatgcgattaaactacctatatttggaagattaactgaaacactattcgcaatattaccacaataaccatcaggacctctaaacttagataaccttttgcagaaaatcgtcttctctttcttggataaccaataggctgctggaggtaagtatgttttctttcccctgacctctgtgtgcaagttatttctgattccaatatcttctaagtcttttcttgctttcaaaccatctttagacttagcactttgaatcaagatagacaatatagcatccgacacatttttttctacgtgcataacatcaatattatgacgaacaggcaaatcctaacaagagaaataagaaactgttaggcttattcagatccacaataacagaatatcattcaattacaaatttactttaccttccagtaaggtagttcaaagaatattgaaccacaagagaaataagaaactgttaggcttattcggaaccacaaatcaaaattgttttccattccaaagaacaaagaagctatgattgaatgagaacatacctattgaagaatgcagggagattgtgataaatcgagttgagagactgagaaatcgaattcagatactgataaatcgagtgaaataaagtgcgaattagatggagagacagagaaagcgagtgagattgagagaaatcgagtgagagttgcagattttgtgctcaatacctcaagaaattcgaatgatacctcaagaaagaaaatgagaaatcgagaatgaaaagttgattttttagatccaaaaaacatgagaaagttattttttaggattttgtttattttgccttagccaaaatttcactttttcccacttacaattttcaatagcggaatactaaagattagaaccacaaaattgccccgcgtcaatttcattatcccgctttaataatttatagcgtttacaatatacaaaacgctatctttaaaacacgattaagtcaattatagcacatagataaaaaacgctatcttattatgctatcaatacccacatttcctgtagtgagttgatgttatgaatgaagaagaggaacaagtattgcggtttattgaagagtgtacacaacaagatgattggttgaaatggaaagaaaccatagagacaaaattaaaatctcttggaaagagaaaagtatttggaccagtagtccgtacacctaaaggtgtaaaaccagtgggacataaatgggtcttcgtgggaaagagaaatgaaaatagtgaagtgatgagatacaaagcacgtctagtagctcaaggattctcacaaagacatggaattgattatgaagagatatactctcctatggtggatgcaactacttttagattccttatctgtctggcaatacgagaaattttttatttaagactaatggatgtagtcacaacctacttatatgaacaactggataataatatttacatgacagtcccgaacggatttaaactgcatgaagcagcaaacactagttctcgagaacaatactgtataaaattgaactgatctctttacggattgaaacaatcgaggagaatgtggtataatcgccttagtgagtacttattaaaagaaggctataagaatgaccctattagtccatgcatttttataaagagatttgggtcgggatttgttatcattgaagtgtatgttgatgatttgaacattattggaacttctgtagaaaattttacagacagttgagtaattgaagaaagaattcgagatgaaagatcttggaaagacaaattttgtctaggattacagattgagcacctgaagaatggaatccttgtgcatcaaacgacatacactaaaaatgtgcttaaaagattctctctagaacagagcacctctgttgagtagcccaatgattgtaagagcacttgatgtagataaagatccattccgtcctcgagaaaaaaatgaagaagtgcttggtcttgaagtaccatacttaagtgcaatatgagcattaatgtaccttgctagtcatacaagacctgatataaaatttcggtgaatttgttagcaagatttagctcattcccaattcgaaggcactagaatgagatcaaacatctactttgatacttgtagggtacaaaagatatgggtctattcttctctaactcgtccaaagaagacttgattggttttgcagatgcaggatatctatccgatcctcataacgatcgatcacaaacaggacatgtgtgcacctacagtagtactcctatttcttggtgttctatgaagcaaaccattcagctacttcctctaaccatgcagagattttggctatctatgaagctagtcgtgaatgtgtatggttaagatcaattatccatcatatacgaggagattgtggcttacctacatgaaaggaagtccctatggtcatgcatgaggataatgtagcatgtattgcaaaactgaaggatagatacatcaaaggtgacaaaatcaagcatattctaccgaaattcttcttcacccataatctacagaaggatggtgaggaacatgtcacacagattcgttcaagcgagaatttggcagatttatttaccaactgctactttcaagaagttagtataaaatcttggattgcgtcgtctcaaagatatgtgatgtattcatgagggggagtaaatgcgtgttacacgcagtttctcttaaccatggtttccccactgcgttttcctggtaaggtttttaatgaggtaacatttattatatgtgcatttgcaattcctttatataatggtcttcagagggagtgttatgaataatagatattatatggatgcccattaagagcccatttggatattctaaaaatcattacattacttggttaccctaatatgtatctcctatatatatcttcttcttactcatgaattatactcaacaacaatttataaacctagttattttacaacagaaagaacttcacaaaacaaaagaaaatcgtgattgccataatccatcgactatttaataaagctgaacttttagataagagataaaagctcattactcattatggcatggttcagactcaacttgtgatcttcaagaacataatttcatatggtccttacaaatattagttaatattaattgtaatatggagcaagaaacatgtttcccttctttatgttttgtaattactcttctttgtcatactctcaaacctaaaagaataagttatgtttatgatttgccaaactctaactaaaaaacttttgcttggacatgaaaaagatttgtaaccttggaaaaatacaaagagtttgtcttactatttcaattttctccaagacccaaatcatagaacaaacttttgataatcggaatagagaataatgcaatttagctatacacaacctaaacctagtggaaattaagaggagaaaattcaggttgattcaacttgaagcctgattggcatgtagaggagggtgagaagagatccttgtgaaagaggagcatgtctcagaatcaccatgctgctgcttgcgagccagcttgcaaatgttaggcaaagagtgacaaacatgccaccttttccgcctagtatccaagtgatcatgaatccgactttaaattcccaagaacaataacactctcatagtaggaaataccgactcggtaagaacaacataagctcttgattagctatgtggctctagattccttattaacatcaacataaaacctgcaataacaacacaaggatacaatcacaaacatactttaccaaagctgagaaactagaaaaaaaaataaggaagaaaataagacacattcatgatatttatgcatcatccaagagcaagattgaaatagaagaatataggaaagactagttcaatcaaactccagacacagatggctaatcatgactcataaaaaatattagattttaacttattttctattacgcaaatcatgttgctagatgtaaagggttgtgttctcaactactatttgcgatttcacatcttaaaagcatcaatcaatcaaacaaacaatagtaaagaaagttagtaaatgtgcattttcttagagcatcattattggtagtatcttagattagtcttagcatagttcttaggaatatataaaattaattttgaaagttttgatgttaagagtttggttaagagattaatttttttggtaatatgcaatagtggtttcttaacttgtagttcttaagaaaaaaattatttaaaaataaaaatatttttatatttttaaaagtaataattattacaacttataaaatttgaaacatacatgacataaaagtttaaacatacatgacgtaaacataaataattcactgttggagtcaatagtttaactaattgtttttgtttatgtttacatcatgtttgtttaaacttcaacttataaattggataaatgtaggccacttaagataaattggataaatgtttgtttaaacttcaacttataatattgatattgtttaaggtgcccggaggttgaaacaaaatgcgtgccatatccaaagatcttgggaagctactgcctctaaaatgattgtaggttttccgaatccacgtgtatattggcctttctaagaagttgaggaattcttccacttccaatgcatataatcgatacttcccatcatcccaggaaaacctagactctctccagtaaagagtaatcgttgtatatcttctgctgtgagtttccttaggtactcatctccgaacaaaagaattattgttttaacaaaatgatgcatgcatgaatgcaaagtggttttaccaatacggaggtattcgtcaaccacattagtcgcgcaaccatatgcaagcatccacattgccgttgtacacttttgtaatgtagataaaccagaccttccagtagcatctcttcattgttgaaagaatgaaattttattggcgagtcgagtaatgatgcgcatgaacaaggacttgttcattataaaatggcgtcaaaattgagtaatagtgaaagttgcattttcaatgaaataattgttctgtaacttgatgtgtccttgttcacgatctctttcagtataggctcttctttttctttgtttggttgtttcttgacgatgaccataagagtataatgcattttcaaattcttcttcaaaaatatttttaaattcttcctcaaaatcatcatgggaagaagagagaataagtttattattagtcccatacatgttgtaatatatagcatcacaattcgaaaatatagggtacgagaatgctgaaaaaatatgtggttacataaaatatgtggctaaaaaaacttgtctgattgcttctgaccatgtaaacttgtctgattacttgtgtggtctttgttcctcaacttgtctgattgctaaatatgtggtatgagagtcgtatgcgtttttcatctacttcaataaactccctacaaaaaaaacataaagacacaaagcataaatcctacataaagatacacttcaacttgttagaataatacaatatcatgcataacataaagtcatcatacattaagacagaacacaaagcataaagtcatcataccaaaaaaacagaacaaaaagttatcatacctaaaagcataacataatacaatttcttgagcttgtcaagactgaaaatacatgtccctaatgagcttgtttcttagctcaacttctacttcactaaaagtgtttgatcttgctacaagaatgtcaagcaatttcttatcacataacttttctttaaatgtcaaatcttgtttctttatgtcccacatactctagaacctttctaaagccttcccttctacttcaatagttggtgaattgttgggagctttcgttttacccttagcagccttcacaccagggggacgaggttgggaagcttcttccgctttagcctcaacaagattacaggttgccaaatgtggagagccatcaatagcctttcttttttactcctaacaatctctttaatatctaacttctctccaacaatgctccaaagtaaacttcgtcttgtaatcatgttcaaaaatttgatttgctagcttcatcaaatcgtcatcattctgcacacttgccatttgagttgttgcaacttgatgggatccataaacttgtagaatggtttgagtgatttaaaaagtagaatgaaagagatgtgggttgtgttaaatttaagtcttaagatgcagttatataaagaaaggtgtaagtatggttttgtaatgagtttaattatttttaagttaagtttgtgttaggtgaaagttaaagttaagttgttagcagtcgcggatctagaaactttattttatgggagcaaaatataatagaaaaagcaaactaaaatatcaaataaattttaaaaaaaattcatatgaaaactccaaaacatgttattaaccaaaaaaaaaactttaaaacatcttacaaatgcactctacgctcttttaccatttgtaacttcttttatcacctcatcattattgacagattcaagcaactctttttcaatatagcacacaagaaaatcacttaaaaattagtcaccaattctattacgtgtagccgtcttcaacaacttcattgcagaaaaacatcctcaccacttgctgtagcaactggtaaagttaagaccaacttcaaaagtctataaattagaggatgtgaaatatgcttttgggttttcaccatcaaacaagaaagatctccaatatttttaagattctttaatcgttcatctctgcaaatattgtcaatgtggatatcaagatgctgctcaagaaccaaaatatccccatagttgaagtcatccggataaaactttaccaacctcaccaatttttccttgtcaaattgatggaatgaatcaaaggacttaaagaagccatacaattaagtagattagtatttacttccgttaaaacgatcattgaactcttgaagctaaatctagaacaatgtaaaaacaattaaccttgtaatgattcatgttggttatattggttttctttcttggtttccttggatcaacaaagatttctttcatgacaagcatttcaacattatgtttctcgcaaaatgatgaaactttatgaatcccatccatcattcctaagcttctgcaattctcctttagtagattccaccaatgacatgacattcaataaattaacacatttctcaacagcataattgtgagaactattgggtttaacccacatgggtgtttaatctctcaggcttattccatcaacaaaatccttctttcataaacacatcactcccaccttgctttcgtacgtcaacttaaaataagtagcaacataaacaaaaaggttatgttgatcctctatactcaagccaataaccatattttttctaaccaagcaaggttaaattgcctcaaaacattactcatcattgttttcttaaaagtatgaccataaggttgacatggacctttatcaagatatttgtgtcttacctcttctctttgatctagatgatatttcactatctcttttcttttagctggatccgatggcaaatccactacaaaaaactatgtatttaacatcaattatttaccatcatttgtaaaaatgacacaataattaaaaaatgtagtaagggatcgcatcactttagaaattgatgctaaatacttatgttttgtatcattctattattaaacgatgcaatttatttttaataataaaatttaaatcattagaaaagaaaaataaattcatcaccgcctctagtattttctttcccgctgatatagaatttctggagggttttccccaatttttccctaattctgtttcaaccataagtacctctccaattatcaaatctctttcaacccaaagtactcgctagcttgaattcgtaattgacggcataacttcactcgtttccctgattttgtggctctttatctccctcttggctccttgattgtgtggctcttcatctatgtctcggcttcgacacactcatctcctgcacaagctttgtccccatctttgattcaattacgctcatcaccttctccttaattcatttatttctcatcactttgattctcaggtgataattttatttctctgcatccgtttggttaatgttatattacatgagtttcacaatttggtaaatgaattcaccattgatatataaaactatactcattctgtttgtttctgtaattatttttaagttctaatttttattgctctgttgtttctacagaccaagaggacaaagtacttctcttgaattacctctctcattggcgtttccttgtacatctcttgaatttttgttttattttttgactacaaatcatcatggtactgaataacttatctgttgtctggagatttttaattgttatgtgtctttgtcgagaattttggtttagtaaattcactagtatatgacctcggagaatgtattgatgatgtattcaaaccaagagacttgtatgatatgggagaatgtattgatgatgatccagttgaggatattgatattagttagagatgttgtgcaagacgtttgagtatgtgatagcttgtaaaacttggattttggatttaacttttgctttttcctttttttttattctgttttatgtttcatattatataaatgtacaatttaagaagacaaatgttttattttaatgaatttacatacagatgtatacctatgactctgacaaaacgcaagatggagaggagaacttaaaatgttcactagtgtataagcttaggctattgttttttggaagttaacaagtatttaagctttgttatctacgtaaacacttcccaaagatgaaattgtaaaaaaaattctaatgttttaactttcaggagaaactagctaagaagattattcaaaacgctggagacactaatgggaataatagtaccccaaattcaaatgatgacttcgctcaggtatttgggagagagcggcctggtcgtgttcgttgtgttggacttggtcccactccttcgtcatttattcagaatcgcaccacgacaacattgagtaaggaacaagaagtgcttagcttgaataatcgagttcgtgagttagaagataaattggtgaagatgagtgatttggaagacaaagtggataagatgaatgaagtcatatatatatcaacctgccgccggcaacaacaattgcactacatgtagaaggtaattaattatatatacatatatatatgatatctctattttttgtgctttgtaatatttcttatgtttgcgtttaaggtttttcaaggactagtactatggatagaaggagatggcttcaagtagaaggcaatgacttcaagtagtttatattattttgctttgacacttgaatttcgtttatgacttcaagtagtttttttagtttttcgatcatcatttcaattccaaaaatacattgtaattttttaattatggatgataaaatacatttctattttgatcaattacaattttatctattatagaacatgattttataaaatattattattatccactattttaataaattatctaaaattaattcaaaaataatatacttaatttagtatatttttttgtcaaactatttagtatcatttaaaaacctaaataaagtgatgttaatatttgatatcgatttgaaagcaatgcaaatattaacgttaacgtcatttatgaaaactgactttaatgttcagtttaacgtcgtttttattttctgatattaactatatatttgacattatttatgaaatgattctagaatcagtaatagaaacgtctaacataaatgacactaaccaaaaataaacgatgaaaaaaattaattacagcgtcatttaataaagcgatgctaaatatatttagcatcactgaatttggcgtcgcttttttaaattacattataatgctagtatcacttttaaaacaatgctaaattagaaataaaatgatgttatgtgtcagtttatttgtaaaagaagaagagaaaccaaaatttatattttaaattagggttaagatttttaatttaaagttatttaatttttacacttagaataaacattaatgggctacgatcacaacaaaataatatgagttttgacttttaaggtttgcaaatagtcgataggggcattttattttgtttttaatgggagcataattcaaactacagaaaaattacattcaaaactaaaagacattaaaaagtatgtggtgacagttgccacccccttaattagtgttggtccaccttttgttgttagcattcaaagccagaaaaaatgcttaacctactcttaacaaccaatcattgaacaaactacactcattaagtttgattgaaagacactcacaaaacagacacaccaaaactgtaacacacatttatcacacaccaaacacaaagcattcaataagtgaatcatatctaacctaatctaaatctaaaaattcaatacaagggagggcgatgcattacctctcttcaatggtgaaaaggcttccatttcatcatcatgtcatctttcaaagtttctcattattataacctgaaaataaaacaaaacaatttatatgaaattcatgtcgtcattaccaaaagattatcatttacaaacgataatctcaaacaaaccaaacaaactagctttaactaaacttttataacaaaacagacacaaattatgttcttaaaactaaagtcttacctagattatgagttaagacatttaaaaacataacgattcattacctttattcaaggtgactaatgtaacagacatccatcgcaaaattatccctccatatgcctacatataaacatcaaaataaatctgagagatttttatcaaaatcttatcattttcaacacatattttttaaataaatctaacaatcattcgtatagcaacaagtaataatcaaattaaagtatgaacttaccctaattttacaaaaaccgaatcataaatacgaaagttggctaactctcaccatatgttttataacaaaacaaacaaaccaaacaaactagctttaactaaacttttataacaaaacagacacaaattatgtttttaaaactaaagtcttacctagattatgagttaagaaatttaaaaacataacgattcattacctttattcaaggtgactaatgcaacagacatccatcgcaaaattatccctccatatgcctatatataaacatcaaaataaaactgagagattttaatcaaaatcttatcattttcaacacatatttttcaaataaatctaacaatcattcgtatagcaacaagtactaatcaaattaaagtatgaacttaccctaattttacaaaaaccgaatcataaatacgaaagttggccaactctcaccatatgattgacacatcatcaatttagcatttgtgatgtgtctactaattaattaatgtaaacttttgacttctaattcatagtttaatgatatatttattattggattttacatataattttatttggacattaattgtactaatactaaatttattttatcattacatgttttttcaataaaattattttattggttttctcatactcgaagcttttttcgtaatcttaactcaaagtatgagtgtataatagccgttgattttggtttgagtagactattctcttaaatttatatctataaaataaaccactgaaggtgaagagtacgtaaagaggtttatcaacaaattcttaggtttctagatacccaacattaccatatattaaattggttaaggacgaacattgtttaaaaattgtatatataatgcattgttaagaacattgttagaaacatatatttgaatactaagaattaggcctgggcaaaatacccgaacccgaaaatccgaaccgaacccgacccgtaagatccgatccgaatgcactttggttccctgcctaatacccggtcggatctttctcttttgtaacttcggttctgggttcgggttcgggtaatacccaagaaccgaaagtacttttctcgatccgaacttatatacacacaatagcattaacccttacttgccttagcttgttcttcttcccaatttttgatttattaaaccctagagcgtatcaacacaaatcgcaacaagctggaaaccctaactcatttgtttctgccgtctcattcttcagagaagtcaagaactcgactcgatccgaggtacttttcatttttctacttctgtgattttgcttttgtttctttgagtcactgattcaaatatgtagtttataattgtaatttcgttttggttttgtatttctctgttgtattcttagttgatttcttctaatttatctgttttcattagttaaatttttcaatttatttgattctatttttgtatctgtggagaaaaaaaatctgagtttgtgtgagttttgatctccaaattttcatctcttaccaccaattgatctgttgtgcatcttaatttttttgaatataaatttacaagagcatcacttacccaaaagcatcgactccctcagattcaaattttggtgatttagctcaactttaggctcatctacaccacttctaactcaaacgttatattctattaccatgctctgtttttttttaagttataggactctgttttaagcatcgactttgtttcttttaagtaagcttgtaaatataccttcatattttgatatataacattcacattttatcaaaataaatttgtccgactctcttttatatgttgacagttgtgtgtgtgtatgtgtttgatccaattgttttaaaattattaatagtaagttcactggatcgtgaataatatagtttggtatgtatgcatccaagagtcttatagactattaattcattaattcctagtatgcatccaacgtgtgatagattgcattattaagtgtaactagactattaagttatagtttcatgctagtgctgcaacgtgtgatagcttactttattaagtattattcttattcaattgttaaccgattattgtttatattttttttcttttgcagatggattcttcagcaaatccaaacaatactgaaagtaacacaaaaggaaacgaagatgagggtaggactcgacctattgataacagtaaagggaagagaaaaagcgatgtcgctgatgatggtgatagtgctaacccttgtaagccaaagaagaagttgcaaacaaggtcttgggtttgggatcacttcacgagaaaagatggtgatgatgaccaatgcaaatgtcattactacaagaggttctttggatgttcaacaaaatcagggacttcaaacttgaagaaacatttggattgctgcaagcattactcggcatggaaaggacgccagtctcagaatgttattaatcaagagggaaatctacaaagtggaaaagtttctaaggaagtttttagagaggctacgaatgaaatgcttgttttgggacaactgccactttcatttgttgaaagtgttgcttggaaacatatatgcagcaaagctaatctctacaagcctcattcaagaagaacagctactagagatattattttaatgaatgtggccagaaaagcatctctgaaggatttggtttcagctaataaacgtagagtgtctcttacaactgacatttggactgctcaagctacaggtgctagctacatggtaatcactgtgcatttcattgatgagtattggcgtttaagaaagtttatcattggctttaagtacatcgcagatcacaagggagctacaatatcaagggttctacttgagtgtttgactgaatggggaatagagaggatatttaccatcacagttgacaatgcaactgccaatactagtgcactcaggaagttccagagagctttacaatcacagagagctgattctttggtgttaaatggagattttatgcacatgaggtgttgtgctcatatcatcaacttgattgtgaaagaaggtctgcacaaattgggtaatcatgtggaagccatccgcaatggagtgctatatgtgagatcttctacttctagatgtgactcatttgagcagaaagttgtgacaggtaagatgacaagggggagtttgcctttggatgtcaaaacaaggtggaattccacctatttgatgttaacaagagcaatcaagtttaaggtggcatttgacaagatggaggctgaagacaagttgtacaatgaccacttcttggaagtagtcgatggggaaaagaggattggaccgcctactacaattgattggagggaagtagagaggttagtaaagtttcttggcttattctacactgctactttggtcgtttcagcgtcaagtattgtttgctcttacaagtgttatggtgagatagtcaccatagaaaaaaatctgctgggaatgactcatagttatgataaagagttgagggaaaaagctgttgaaatgagggaaaaattcgacaagtattgggatggacaaaagaatatcaataggatgttgataattgctagtgtgtttgatcctagacagaaaatggaatttgctaaaatgtgctttgagaaactttatggtgtagacacttcagaagccaaggagatgtataattctgtttatgatgtcatgaaggctatgctgaaggagtacactgtcattttcaagggaccaaacacacaatcatcacagtctaatccgccttcatctactgctgccagagatacttttgcatgtgagttagctgaagatagtaatgttgagtttgaaaggatggacaggtcatataaagagatggttaatgaaattagggttactgatcctaaagatgagttagatatctatctgaaggcagaggtagaaaatcctaagactcttcctggaatggagtgggatgtcttgtcttggtggagactcaatagtcagaagtatccagttttatcagaaattgcaagagatgtacttgcaatgcaagtgtcatctgtcgcatctgaaagtgcttttagcaccagtggtcgtcttttggagccaagtagaagctgccttactcattatatggtagagactttggtttgccttgagcagtggttgaaaagtgaaatcaagctgagtgaaaacacttttctaacaaatgcacaacttcttgctgatatagaattacttgataagcttgagaaaggtaactttatctatgtagtttactagttttagttttagatgttgtttgaaaactctcttatgttctaacacaacttgggtgttgattgaatctttttcagagtttcaaactgaagtgaacttggactaaaagactaatcaaggaaacgactacaaggtaacttcatcactccattttgttttcttttacttctgaacttggtttatagctcaatgttaatatactagactcatgaatcaacgatcatttcgtatttgacttttacttggtttatggtttaatgtttacttatggttttttatttttcaactgagcttatttggttttgatgtaacaggaacaagtcatgaagaatctatcatgtttggatgttgctttggatttgaacttctttctttactttgaatgctttggatttgattctgaacgatggttttatgtcttgctttggatttgaacttctttcttctatttggatggttttatttggatgttttgaatcttgctttttggttgaacgtgtgaaacttttattatgtcatgctttattgattttacttcaagttttttttattacaaatttacaggttttatggtatatgtggttagtatcaagtatgttcgggtagttatgaactagtatccaataatattcggttacttttcggattttcaatggaagtaccaatacctacccaaacccaaaatataccggaccgaacccgaaccgaagttttcaaatacccgaacggggtctaaaattatagttccgaaaaatccgaacccgaaagaaccgatccgaacccgaaccgaatacccaaacgcccaggactactaagaatagtttttttattgcatgagtgaatgattagataattaaaagttatatttaaattaaacaatacaaaatcatttgagaaaatcgatgtgtcgcgcgggtgatcgcctaatcatatatatgaaagaagctgaactctcccaatttttcaaccacatcagcatgagagagagcgacatatggcatataatttcagaaaacaataaaatcataatatcaacgaatccacgtctcccgactttagggtttcacatttatgccttcgaattttaatggagttttacctcttcctcttctcgtccgtttaacgttcaattactagaaaaagccattgatttagtgtcaaatcaacaaaagcatagcgacgcagaaaaaaggacacgaggattagtaaaaatcgagcactaactatgggaagcatgtggtggctgcaatgacgagcgtgtgaagttgttgtttttttttttacaaaaaaaaaagaaagaaggtagtgctgatatgcgggtcatgggaagctttgcttggatgaatttgcaggctctctcctttccaactttgattttgtttgggctcccggctcagaatatgttcgaaattctaatggaaaatagtatgaatttctttatttggtggttattattcatcctatatttgatgatatatggtttatggaaaagagtatgaaaggttgaaatgtttatttctgaaaaacatagattttatttttccaccaacattatttcgttgcaacttccttgatcatatataggtgcgtgacatcctcacgaaagttttacttgacaacttggaaagtgtaagattgtgaatgtacctacgaaagtcgatggggttcaagaagctgcaaagatggagaaaattacttaaggagttaacgtattctttatctctatttttctcttcctttttaatgattcttgaaaagatgatatctttacttgaccttccatagaaaggggttccaagtttttagctaaatttcctaaaaatctatgatgttaaatctaaggaggctggtgttgcacgtatggtagttcattaagagttaatctgatcatgtctattaaaactttaccatagttctaaataggtatctgatcacagagcctgagaaagtggcccttataatgttgtacttaagattgaagagccaaagatttcaaatttgagttttacttttacttgaacccttatttttttaacactcttttaacaaaggcatatcatattactttaagaggagcttcatacttcagcatatataattctgagatgttagcaaggagttacataatctctatagctgacttacgcttcacccaaccaattataaaactccacatgtcacttatgacatcacctccatggctccatccatcctttgagtttcacaaaggtacaaaactcttttagttccattatcttaagttttaatgattcaataattatagaaagcgagaggccgtctccgttaagtaaccacacaatgaatcggtttcaaaagctataattctttttaaaccgtaagatagtctgtgcttcattcctttgttgcttcacagagttcgtctccgttaagaaaccacacgatgaatgagtttcacaagctataattctttttaaatcgtaagatagtttacgcttcattcctctgttgctacacaatggttgtctccattctttttgtcgaatgccttcgtgtcccaaatcgatggtttcttttccaaacttttcttatgttaaacctaaaatcccttttactcttcctaattcctttttgttattgtttgtgttttgacaaattggagataagttgattgagagttgcccgtgtcctcattgtcttctttttctttcttttcaccggtacgtgttcttagtattagttaaattactcagttctattcgtagtatttcagctggttaaaatttgttgtctctccaagagatgtcaagagagataattcaacttcggttgattataggcttatgttagccaagattgcatcaaggcattttcgctatggcggtagagtactctgactacaatgaaatcaagacattacaacaagtctaacacataagtctcaaagtagctagatacaccaatcatttccaatagaccaagtgaaggtctcatgtgacgtcttcactataacacgttttaattcacatatatatgtaatatgtgtatcggagtgatcataggtattatacgagaactgcattcctcagttgtaacctcatcaccgacacatgattcttgatcatgtcctcgggagtatggaccacaaaattttgtagagatagactgccttctcgctatttgatcaatcgctttgcttctttgtattttctatactggtttggtattatattcacttcaggggttcatttttatcttgtaccaaatcgtcttcaaccattatcatttaatgactagaatttgatgatttggtgcaagaatgtgatttgctttcatgttttttataactttttagcatgggatcacatatatggttatgcataaagcttaattttgttaactccaattttcattacgaattaaatatttacattcttatgaaaaacacgtgaaaattaattttaacttacaattctttttttctttatcttttcatctttcaattcggtaatcataataagaacttataaaaagaggaatgtacgcggaaggatgcaaacaaactaaaaagaagaatcaacgaacaactacaagcatattagcaccgctaaaatatagtatatcgaaagaaatgaactcaaccatcccaatacaactatagtattgtagttcaggcatatcccattcatataagaagaaagagctttaagggatcatactacgtgcgtagaagctttaagcctttagatcagtgaaatctcgatgttaggcgtaatgaatatttttctagaacccataaataactaaaagaaatcaaaacatatatccttttgttatcaccatgtctaaaaacaaaaacatgtaacataatctttttttaacaatttttaaaaaacaacccacgcgtagcgtggctgttcacctagtacacataattttcccaattcatgaacattggaacttgtgaggctccagctgtcttaagttcagtaatcacatccatgtacagaaatcaaagtcattatatcagtattatgtcagaggatcattcataacattaaggatacgtatagtataataaaaaaacttaacaaattgatttcttacttgtagacaacaataatttttaggagaagagaaagaagatcaaaagacttcgcaacacccttggcaactttggatagcagcaagtaagaaaatgggccaaacataagacttttaaaatagcaaagaaaacaaaactacctttcataatgcttgctccatcatagccttgtcctctcaccgttttcaagctcaacccgtatttagcaaacaaatcatcaatagcagacttcacggatgcagatgacgtttcttttacatgaactacttcaataaacctttctttcactgttccactcttatcaacaaatcgaaatacgactgccatttgttctttatgagaaatatcaacagactcatcaaccaaaaacagccatgatcaattttttcaataacagatttcactacttctttagtaaaaaatttcacaatctctttttgaatctttggagaaatcatcatgttatttttttggagcattattcaaaataactttacctgtagcatcattttgttctcctgtgtatttcacgagttctaagaaatttcctttattggcagactcttctgactcatcatgaccatgaaaagctatcccttgtcgcaacaaatatctagaagcatcaatcgaagtatttaaaggaatgtgatactctctcttcatcacatcatcctgcttaaacaacgcatgcacaatagattgaccttgattcatcaaattaacacatttctcaatagcataattatgagaactgttgggtttacccacatgggtgcctaatctctcatgcttaattattccatctacaaaacccttctttcacaaacacattactcccaccttgctttcgtacgtcatcgttaaataagtagcaacataaacaaaaagctctcctttgatctgctatactcaagctaataaccatatttttcaaaccaagcagggtcaaatcgcctcagagcattactcatcattgttttcttaaacgtatgaccataaggttgacatgaacttctttcaagatatttgtgtcttacctcgtctcgttgatctcgatgatagttcactatctcttttttttagcaggattcgatggcaaatcattgatattgatgttggatgttgaaggaattattttatgtaggtcaaattaatcttaagactactctctcaaataaagaggtcactggcagcacttagggatcgaattcacaaagttctcggatcacgcaatagactattgattatcgaattaagttaagtaaaatagtaaagaaaataaaaagaaacaaaagcaagcaatagctgattggatggaagtaaaataagataataaaagggtcatgcttagggtattctaaggaaacagatgatagtagatctagaaatagctaggatgtgatcgaaccgttcttaaactcaaatcgtaattacagaataaccggtggtttgttgtgctactcactatgcctaatgctaaagatccctatcgttggcttggtgaatctatatattaagacatgcatgataaatgagtttgataagttcacctaagtagaaaggtcaattcttattacacatctataaacatggctcatcaaatagtagttctcgtaatagatacctgtttgggcatacctattatttaagatcaagttctaggtggccaatctaaaactagcattaagaaaaccaaagatgaagaatcctacagatatcctaacaggtggcagtctactaaatcatctataaccctaatgagaaacctgaaacctaacaagagaactactcaagcatgaagattataacaatcaacatgattgatgaagaaatcaaagaagaaaacaagaagagattaaagtttagaaagatcttctcttaagagtctccactaggtttttctcccaagaacagaaatataataattgttaggtctaaacaatgaccttagaatctatatatatatatatatagatttctaaaacatgatgggccttctttaaaattaagaaaaggttctgtgccgaatctgcaaaacttcggcctagagaagtccataacgctttcaagtttacaaaagtgcaaatttgctctagaagactttcttatttgcattattagtccctgaacatttattaggtcatatatatagttttagaggtcattgtttagacctatcaagcttgttatcaagttttctttcagagacataagctattgatcccctgttttcagagattcattcagattccaatacagtgaagagatcctttctaactcttttctttattgttgtgctcatgctttcttattcaattatgttgcttgtttcaatctccatgtttgagtagtttgcttgttagggttagggtttctcattagggattcatatggtttagtagatcgcctctttgctaggttatatgtagaattcttcatctttaattgttcttaatgctaattctagagtaattaactataacttcaatctagacaatagatatacccgccataggtatctgtagttggatctattatttgatgagcttggtttataggtgtgtaataagaatcggcctatttactaaggtgaactgaattgaagtcgtttataatgcatgtctaagtataagatttgtcggcttctctggttattcttagctataggcatagggagtttcgcggaacgccaccggttattccaaaattagagttagagtttaagaatggttcgataacaacctagctatcattagatatacgaaccaatagtttcctgagaataccttaaacctaactcttaattatattgtttcacaacctccaatctgctggttatttactttgttttctttttattttactcattctcttctagcttaatcttgacactctactcattgtgtgaacaaaagaactttgtggaaatccgacccttattacaagaaaacaggcaaaaaacgactacgaaaagcgacaacatgtatagtcgtcttattttgcgacaatgtggcgacagtttaacgactacaatacgacaacaagaaattttgtcgtgaagtagtcatcaatttacgactaactagcttagttagacgatagtcgttattaaacaactatttaacgattacatttctgaagtgagaagttagtcgtcacgtagtcggtaattgacgactacgtttccgactacattagttagtcgtctatttggcgactatttgacgactacgtcgcaaccgagtcgcaaacgagtcgcatgaagtagttgaaaacgtgtttcgcattgctaagtaggtacacacctaacttgttagcgactacaacatgtagtcgtaaataagtcataaaaattcgtctatagattaaaagttcacgacacttttctttcaccaacaaatcaaaacaacaacaacatcaaagaaaaaaaaacgatttaaaagaaaaaatataagtttattttattgtataatggcgggaaactacaattatggcggtagtggcggttttttatcgagattggatgtacaagagatttgatgaagtgacgggaaatttgacagccgaatacgtcgcaggagttgagcaattcatgacatttgctaatagtcagcctatagtacagagtagtcaaggtaaatttcattgtccttgtggtgtatgcaagaatgaaaaacacatcatctcgggcagaagagttagtagtcatttgtttagtgaaggatttatgcctgattattatgtttggtataagcatggagaagaaatgaatatggatataggaacgagttccatggataggacgtattttagttcgaatcatgaagaagtgggtaatgttgtagaagatccatatgtggatatggtgaacgatgcatttaattttaacgtggggtatgatgataactatcatcatgatgatagttatcagaatgtggaagaaccggtctataaccatttaaataagttctacgacttgttagaaggtgcaaataatccattgtacgatggttgtcgtgaagagcagtcgcagttatccttagcatctcgactcatgcacaacaaggcagagtataatatgagtgaaaagttggtggactccatttgcgaaatgtttacagattttttaccagaaggaaaccaggctacaacttcacattaccagatcgagaagttgatgcgtaatttaggacttccatatcatacgattgatgtttgtcagaacaattgtatgctattttggaaagaagacgaaaaagaagatcaatgtcgattttgtggcgcacaaagatggaagcctaaggacgaccgtcgaagaaccaaagtaccatatagtcgtatgtggtatctacctattggagaccggttgaagagaatgtatcagagccataagacagctgcggtaatgcgatggcatgctgagcaccaatcaaaggagggagaaatgaataatcctttagatgcagcggagtggagatatttccaagagttacatccccggtttgccgaagaaccccgtaacgtttatctcgggttgtgtactgatgggttcaatccatttggcatgtctcgtaatcattcgttgtggcctgtgatcctgaatccatataatttaccccctggtatgtgcatgaatatagagtacttatttcttaccattctgaattctggaccaaatcattctcgagctagtcttgatgtgttcctccaacctcttattgaggagttaaaagagttgttgtctactggagttgatgcttacagtttttcattaagttagaattttaatctaaaagttgtactactgtggacgattagcgactttccggcgtatagcatgttatcaggatggactactcatgataaattgtcttgtccagtttgcatggaaagtacaaagtctttttatcttcccaatggacggaagacatgctggtttgattgtcaccgtagattttttcttcatggtcatccatcccgtaggaacagaaaagactttttgaaaggaagagatgcgtctagcgagtatccacccgagtctttgacaagggagcaagtttattacgagcggttggctagtgtaaatccaccaaaacaaggatgttggtgggaacggtcatgaaaagaagatgcgtggctatgggaaggaacataattggcacaaggaaagcatcttgttatcatgtcaagattggatattgagaaattttgttctcggccaggcttacatattgatagtaaaggtaaagctccattttcagcgtattcattgatagatgaagtcaaacaaagtttatttcaatgtgtgaaacatgatgttagatttccatatggttattctagcgatttggctagttgtgtagatctggagaatggaaagttttcaggcatgaagagtcatgattgtcatgtttttatggagcgactacttccatttatctttgttgaactccttgaccggaatatccaccttgccttatcaggtacaatacttactattttatttgccatcatttttttatctaattatttaacttgcacatatatttcaggaattggagcatttttccgggacctatgtttgagaactttacagacaagtcgcattcaaattctcaaacagaacatagttttaatcatttgtaacttggaaaagatttttccaccatcattttttgatgttatggaacacttacctatctatctcccatacgaagctgaattgggtggccctatccagtataggtggatgtacccatttgagaggtttttcaaaaagttgaaaggaaaagcaaagaacaaaagatatgctgtaggctcaatttttgagtcatatatcaatgacgagattgcttacttttcagagcactactttaccgatcatatacaaaccaaatcaaggtaaatacatttatttatttaactattttctatacttcgatcttcattcaattacatgaatcaggttaacaaggttcgatgaaggtgaagttcctatatatcatgtccctggagtacctaacatatttatgcacgtcggccgtccaagtggtgaaatgcatgtagaatggctttcagagaaagactaccaaagcgcacatgcatatgttttaaaaaattgtgactatttaaaaccatttgagaggtatttttaatcactattcgtttgtaaattttcactaagatcactttgatttatttttctttgtttgtaaatattgtatgttcgaggattgtctttctgcgaaatattcatgcttgccagaaaaagaactctacgcgagaagagctgaagaatatcatctatgggttaaagaatatgtaagtctacatcaatttcttgcattcgaaaagtgagaatcatatttatatgtattaatattatttatctattatctaggtaacatattggaacactacttcttcatgtcctatttggattcaagaaattgtgcaaggacctttgaacaaggtcaaaacttggccaatgtatttcacaagaggttatatgtttcatacgcaaaatcacggcgctggacgaaagacatgtaactatgaggtgtgtgttaaaggtgaaaattacgctgattcatctgatgaagcagatttctacggtaccttcactgagatcatagaactcgagtatgagggcatcgtcaatttgaggatcacactttttaagtgtaagtggtatgactcaaagattgggagaggcactcgcgaagccacagaggcgttgtagacgttctatctacgaggaaataaaataaatacgagccatttattcttggtacgtaattttgaagaggtcaaatatgtttctctgttaattattaatactcttatttgatatatgtataacttgtgtatacaggatctcaagcagatctggtttgttatattccgtatccatatacaaagaaaccaaagaacatttggctcaatgttttaaaagtcaatccgaggggaaacatttctggagaatatgaaaataatgatccgactcttttgcaaacagaaaatgatgatgttgttttactcactacaattgaagatcttgtactagaaaatccggtggaaggcttaaacccaataatccttgattacaatgttggggatgctgaaccagaagacgaattccgatgtaatttatcgtcctcggacgaagatgaagtagaatatgaagagtaataaatgtgtgaagtatatgtttaattatttgataaaacatttgaatgaattttgttttataatatatcattgaacatttaatttgttcatgaatatttcctatgtaaaattatttctattttaaaagtataaggtgactattatgctactacttggcgactaaattataatttggtgggcttccaaattacgaagtccaaaaccaatagagatgtgacaataatgcgactactcaacgactatcctttgctttgttgggtttctaaatatcgaaacccaaacccaataaaaacagtgacacttatgcgattaataaacgattacagcttaatttgttgggctaccatatatcaaagcccaaatccaatatactatatgacaaaaatgcgactattaaatcactacgttttaaattgttgggcttctaaatatcgaagcccaaacccaaatcatttaggtgaaagatttgcgactactctgcgactatagacgaagttgttgggcttctaaatctcgaagcccaaacctaataaaaacggtgacagatttgctactcttttgcgactacagacgaagttgttgggcttttgaatttcgaggcccaaacccaaatcatttagtgacaataatacgactacaatgcgactactacagtgttaaaaaccctaaatcgaatcatttctcattcctaacacttagccaaaatatcgaatcaaatcgatctctcttcttcttcttcttcctctgaaaccctaatcttcttcgatctgttcttcttcttcttcattcttcttcaatcttcttctatcttcttcctctctcaatctcttgatctctcgatctctcgatcttcttcttcttgttcgatctctcgatcttcttcttcttcaatctctattcttcttctttgatcttcttcctcttcttcatctctttgatctgccacttcttcatcttcacttaatcgatctctagggatctctcttctttcaagcagatctctccgtcgatctaataacgctggtcgaggtggctcccaaaagcggaagacgacgcctaatgttactcagagagacggcggttcaacgaccccaagaccttgggatctccctcatcaatacaacttcactctggcgccggcggttcaagttccagcgacgcagccggctcaagctgatgttcgtttgacgtcagccccccccccccccccacgtacccgactatccactaccgctacaactcttccagaactccaccactcaacctcagcgtggtggtgctccgcctcgatctgaagaggtccacttcaatccatcgccggaagagcctgctcagcaagatcctcagtcgccggatactgacaatctagctcacagccaccctttgtctcaagggaacaacttccaagaggaagctcctgggacgttgcctgagctacaagaagactcggcggtggctctgcaagatattctctcagtgccaaacatggagcagtggacttgtgtattgtctccgattcccaggccaaaaaccgagtggtaagttctcttcctctaatttgttttcgtgttatctgcatttgtagtgtgtaaccagtagacttgtgaatcctgaaacatagttgtgaatgatgggttttgttggatgtttgttttgtttgcgtaacatagtagatttgtgaatactcttgtgtgctcttgtgaatactcgtgtgtccttgttcagttctatacttgtgaatcgtgttctcttgttaatcgagtctcttgttaatcgtgttctcttgatgctctattgatgaagttgactttgatgtcttttaattgtgttctgttgctactcatgctcttgttatgttctatagtatgttctcttcttaattgtgttttgttgctactcatgctctattgttgaacatagttgacttttgaacttcgcatgttttaggattagacatttattatctgccttagttttatactgttgtgtgctcttgttcagttctatagtgtgtgttctgttgtgaatctgcctcagttatacctgtgtagtgtgtaacatagtagacttgtgaatctgcctcagttctatagtctgttctcataacttttattgtgttttgattttttaacatgtttacttctttcattgttgcatgtgcttggaggtttactcgcgacagaggatctaaactggttagaaagatcacaaggatttttaatcaaaagttcaatgctctctactataattggtcatgtgtgcctttggctaaaagagagagactgtttttagagttcgcggtaagcttcctgtatatctgctcctgttcagtcattgtttttagagttttatagtctgctcaagttcagttcactaacttcttccttttttgtagaaaactcaccactgggatccattaatcacaaggacagtccaatattacttcaatgagatcgtcaagaggcgcttgaaggatatggttagcaccgcaaggagaactcgagagcagcctccatggattggagaaactctgtggggaacaatgtgtgcttacaaggacacagaagaagcatagaaaaagagtcagacctatttcaaagctcgtctctctgaccctaacggtctcggtccacacatccactactctgggccaaagtcttatcaagaattc

SEQ ID NO: 1184 - DNA, 95173 bp, Arabidopsis thaliana
gaattcttccacttccaatgcatataatcgatacttcccatcatcccaggaaaacctagactctctccagtaaagagtaatcgttgtatatcttctgctgtgagtttccttaggtactcatctccgaacaaaagaattattgttttaacaaaatgatgcatgcatgaatgcaaagtggttttaccaatacggaggtattcgtcaaccacattagtcgcgcaaccatatgcaagcatccacattgccgttgtacacttttgtaatgtagataaaccagaccttccagtagcatctcttcattgttgaaagaatgaaattttattggcgagtcgagtaatgatgcgcatgaacaaggacttgttcattataaaatggcgtcaaaattgagtaatagtgaaagttgcattttcaatgaaataattgttctgtaacttgatgtgtccttgttcacgatctctttcagtataggctcttctttttctttgtttggttgtttcttgacgatgaccataagagtataatgcattttcaaattcttcttcaaaaatatttttaaattcttcctcaaaatcatcatgggaagaagagagaataagtttattattagtcccatacatgttgtaatatatagcatcacaattcgaaaatatagggtacgagaatgctgaaaaaatatgtggttacataaaatatgtggctaaaaaaacttgtctgattgcttctgaccatgtaaacttgtctgattacttgtgtggtctttgttcctcaacttgtctgattgctaaatatgtggtatgagagtcgtatgcgtttttcatctacttcaataaactccctacaaaaaaaacataaagacacaaagcataaatcctacataaagatacacttcaacttgttagaataatacaatatcatgcataacataaagtcatcatacattaagacagaacacaaagcataaagtcatcataccaaaaaaacagaacaaaaagttatcatacctaaaagcataacataatacaatttcttgagcttgtcaagactgaaaatacatgtccctaatgagcttgtttcttagctcaacttctacttcactaaaagtgtttgatcttgctacaagaatgtcaagcaatttcttatcacataacttttctttaaatgtcaaatcttgtttctttatgtcccacatactctagaacctttctaaagccttcccttctacttcaatagttggtgaattgttgggagctttcgttttacccttagcagccttcacaccagggggacgaggttgggaagcttcttccgctttagcctcaacaagattacaggttgccaaatgtggagagccatcaatagcctttcttttttactcctaacaatctctttaatatctaacttctctccaacaatgctccaaagtaaacttcgtcttgtaatcatgttcaaaaatttgatttgctagcttcatcaaatcgtcatcattctgcacacttgccatttgagttgttgcaacttgatgggatccataaacttgtagaatggtttgagtgatttaaaaagtagaatgaaagagatgtgggttgtgttaaatttaagtcttaagatgcagttatataaagaaaggtgtaagtatggttttgtaatgagtttaattatttttaagttaagtttgtgttaggtgaaagttaaagttaagttgttagcagtcgcggatctagaaactttattttatgggagcaaaatataatagaaaaagcaaactaaaatatcaaataaattttaaaaaaaattcatatgaaaactccaaaacatgttattaaccaaaaaaaaaactttaaaacatcttacaaatgcactctacgctcttttaccatttgtaacttcttttatcacctcatcattattgacagattcaagcaactctttttcaatatagcacacaagaaaatcacttaaaaattagtcaccaattctattacgtgtagccgtcttcaacaacttcattgcagaaaaacatcctcaccacttgctgtagcaactggtaaagttaagaccaacttcaaaagtctataaattagaggatgtgaaatatgcttttgggttttcaccatcaaacaagaaagatctccaatatttttaagattctttaatcgttcatctctgcaaatattgtcaatgtggatatcaagatgctgctcaagaaccaaaatatccccatagttgaagtcatccggataaaactttaccaacctcaccaatttttccttgtcaaattgatggaatgaatcaaaggacttaaagaagccatacaattaagtagattagtatttacttccgttaaaacgatcattgaactcttgaagctaaatctagaacaatgtaaaaacaattaaccttgtaatgattcatgttggttatattggttttctttcttggtttccttggatcaacaaagatttctttcatgacaagcatttcaacattatgtttctcgcaaaatgatgaaactttatgaatcccatccatcattcctaagcttctgcaattctcctttagtagattccaccaatgacatgacattcaataaattaacacatttctcaacagcataattgtgagaactattgggtttaacccacatgggtgtttaatctctcaggcttattccatcaacaaaatccttctttcataaacacatcactcccaccttgctttcgtacgtcaacttaaaataagtagcaacataaacaaaaaggttatgttgatcctctatactcaagccaataaccatattttttctaaccaagcaaggttaaattgcctcaaaacattactcatcattgttttcttaaaagtatgaccataaggttgacatggacctttatcaagatatttgtgtcttacctcttctctttgatctagatgatatttcactatctcttttcttttagctggatccgatggcaaatccactacaaaaaactatgtatttaacatcaattatttaccatcatttgtaaaaatgacacaataattaaaaaatgtagtaagggatcgcatcactttagaaattgatgctaaatacttatgttttgtatcattctattattaaacgatgcaatttatttttaataataaaatttaaatcattagaaaagaaaaataaattcatcaccgcctctagtattttctttcccgctgatatagaatttctggagggttttccccaatttttccctaattctgtttcaaccataagtacctctccaattatcaaatctctttcaacccaaagtactcgctagcttgaattcgtaattgacggcataacttcactcgtttccctgattttgtggctctttatctccctcttggctccttgattgtgtggctcttcatctatgtctcggcttcgacacactcatctcctgcacaagctttgtccccatctttgattcaattacgctcatcaccttctccttaattcatttatttctcatcactttgattctcaggtgataattttatttctctgcatccgtttggttaatgttatattacatgagtttcacaatttggtaaatgaattcaccattgatatataaaactatactcattctgtttgtttctgtaattatttttaagttctaatttttattgctctgttgtttctacagaccaagaggacaaagtacttctcttgaattacctctctcattggcgtttccttgtacatctcttgaatttttgttttattttttgactacaaatcatcatggtactgaataacttatctgttgtctggagatttttaattgttatgtgtctttgtcgagaattttggtttagtaaattcactagtatatgacctcggagaatgtattgatgatgtattcaaaccaagagacttgtatgatatgggagaatgtattgatgatgatccagttgaggatattgatattagttagagatgttgtgcaagacgtttgagtatgtgatagcttgtaaaacttggattttggatttaacttttgctttttcctttttttttattctgttttatgtttcatattatataaatgtacaatttaagaagacaaatgttttattttaatgaatttacatacagatgtatacctatgactctgacaaaacgcaagatggagaggagaacttaaaatgttcactagtgtataagcttaggctattgttttttggaagttaacaagtatttaagctttgttatctacgtaaacacttcccaaagatgaaattgtaaaaaaaattctaatgttttaactttcaggagaaactagctaagaagattattcaaaacgctggagacactaatgggaataatagtaccccaaattcaaatgatgacttcgctcaggtatttgggagagagcggcctggtcgtgttcgttgtgttggacttggtcccactccttcgtcatttattcagaatcgcaccacgacaacattgagtaaggaacaagaagtgcttagcttgaataatcgagttcgtgagttagaagataaattggtgaagatgagtgatttggaagacaaagtggataagatgaatgaagtcatatatatatcaacctgccgccggcaacaacaattgcactacatgtagaaggtaattaattatatatacatatatatatgatatctctattttttgtgctttgtaatatttcttatgtttgcgtttaaggtttttcaaggactagtactatggatagaaggagatggcttcaagtagaaggcaatgacttcaagtagtttatattattttgctttgacacttgaatttcgtttatgacttcaagtagtttttttagtttttcgatcatcatttcaattccaaaaatacattgtaattttttaattatggatgataaaatacatttctattttgatcaattacaattttatctattatagaacatgattttataaaatattattattatccactattttaataaattatctaaaattaattcaaaaataatatacttaatttagtatatttttttgtcaaactatttagtatcatttaaaaacctaaataaagtgatgttaatatttgatatcgatttgaaagcaatgcaaatattaacgttaacgtcatttatgaaaactgactttaatgttcagtttaacgtcgtttttattttctgatattaactatatatttgacattatttatgaaatgattctagaatcagtaatagaaacgtctaacataaatgacactaaccaaaaataaacgatgaaaaaaattaattacagcgtcatttaataaagcgatgctaaatatatttagcatcactgaatttggcgtcgcttttttaaattacattataatgctagtatcacttttaaaacaatgctaaattagaaataaaatgatgttatgtgtcagtttatttgtaaaagaagaagagaaaccaaaatttatattttaaattagggttaagatttttaatttaaagttatttaatttttacacttagaataaacattaatgggctacgatcacaacaaaataatatgagttttgacttttaaggtttgcaaatagtcgataggggcattttattttgtttttaatgggagcataattcaaactacagaaaaattacattcaaaactaaaagacattaaaaagtatgtggtgacagttgccacccccttaattagtgttggtccaccttttgttgttagcattcaaagccagaaaaaatgcttaacctactcttaacaaccaatcattgaacaaactacactcattaagtttgattgaaagacactcacaaaacagacacaccaaaactgtaacacacatttatcacacaccaaacacaaagcattcaataagtgaatcatatctaacctaatctaaatctaaaaattcaatacaagggagggcgatgcattacctctcttcaatggtgaaaaggcttccatttcatcatcatgtcatctttcaaagtttctcattattataacctgaaaataaaacaaaacaatttatatgaaattcatgtcgtcattaccaaaagattatcatttacaaacgataatctcaaacaaaccaaacaaactagctttaactaaacttttataacaaaacagacacaaattatgttcttaaaactaaagtcttacctagattatgagttaagacatttaaaaacataacgattcattacctttattcaaggtgactaatgtaacagacatccatcgcaaaattatccctccatatgcctacatataaacatcaaaataaatctgagagatttttatcaaaatcttatcattttcaacacatattttttaaataaatctaacaatcattcgtatagcaacaagtaataatcaaattaaagtatgaacttaccctaattttacaaaaaccgaatcataaatacgaaagttggctaactctcaccatatgttttataacaaaacaaacaaaccaaacaaactagctttaactaaacttttataacaaaacagacacaaattatgtttttaaaactaaagtcttacctagattatgagttaagaaatttaaaaacataacgattcattacctttattcaaggtgactaatgcaacagacatccatcgcaaaattatccctccatatgcctatatataaacatcaaaataaaactgagagattttaatcaaaatcttatcattttcaacacatatttttcaaataaatctaacaatcattcgtatagcaacaagtactaatcaaattaaagtatgaacttaccctaattttacaaaaaccgaatcataaatacgaaagttggccaactctcaccatatgattgacacatcatcaatttagcatttgtgatgtgtctactaattaattaatgtaaacttttgacttctaattcatagtttaatgatatatttattattggattttacatataattttatttggacattaattgtactaatactaaatttattttatcattacatgttttttcaataaaattattttattggttttctcatactcgaagcttttttcgtaatcttaactcaaagtatgagtgtataatagccgttgattttggtttgagtagactattctcttaaatttatatctataaaataaaccactgaaggtgaagagtacgtaaagaggtttatcaacaaattcttaggtttctagatacccaacattaccatatattaaattggttaaggacgaacattgtttaaaaattgtatatataatgcattgttaagaacattgttagaaacatatatttgaatactaagaattaggcctgggcaaaatacccgaacccgaaaatccgaaccgaacccgacccgtaagatccgatccgaatgcactttggttccctgcctaatacccggtcggatctttctcttttgtaacttcggttctgggttcgggttcgggtaatacccaagaaccgaaagtacttttctcgatccgaacttatatacacacaatagcattaacccttacttgccttagcttgttcttcttcccaatttttgatttattaaaccctagagcgtatcaacacaaatcgcaacaagctggaaaccctaactcatttgtttctgccgtctcattcttcagagaagtcaagaactcgactcgatccgaggtacttttcatttttctacttctgtgattttgcttttgtttctttgagtcactgattcaaatatgtagtttataattgtaatttcgttttggttttgtatttctctgttgtattcttagttgatttcttctaatttatctgttttcattagttaaatttttcaatttatttgattctatttttgtatctgtggagaaaaaaaatctgagtttgtgtgagttttgatctccaaattttcatctcttaccaccaattgatctgttgtgcatcttaatttttttgaatataaatttacaagagcatcacttacccaaaagcatcgactccctcagattcaaattttggtgatttagctcaactttaggctcatctacaccacttctaactcaaacgttatattctattaccatgctctgtttttttttaagttataggactctgttttaagcatcgactttgtttcttttaagtaagcttgtaaatataccttcatattttgatatataacattcacattttatcaaaataaatttgtccgactctcttttatatgttgacagttgtgtgtgtgtatgtgtttgatccaattgttttaaaattattaatagtaagttcactggatcgtgaataatatagtttggtatgtatgcatccaagagtcttatagactattaattcattaattcctagtatgcatccaacgtgtgatagattgcattattaagtgtaactagactattaagttatagtttcatgctagtgctgcaacgtgtgatagcttactttattaagtattattcttattcaattgttaaccgattattgtttatattttttttcttttgcagatggattcttcagcaaatccaaacaatactgaaagtaacacaaaaggaaacgaagatgagggtaggactcgacctattgataacagtaaagggaagagaaaaagcgatgtcgctgatgatggtgatagtgctaacccttgtaagccaaagaagaagttgcaaacaaggtcttgggtttgggatcacttcacgagaaaagatggtgatgatgaccaatgcaaatgtcattactacaagaggttctttggatgttcaacaaaatcagggacttcaaacttgaagaaacatttggattgctgcaagcattactcggcatggaaaggacgccagtctcagaatgttattaatcaagagggaaatctacaaagtggaaaagtttctaaggaagtttttagagaggctacgaatgaaatgcttgttttgggacaactgccactttcatttgttgaaagtgttgcttggaaacatatatgcagcaaagctaatctctacaagcctcattcaagaagaacagctactagagatattattttaatgaatgtggccagaaaagcatctctgaaggatttggtttcagctaataaacgtagagtgtctcttacaactgacatttggactgctcaagctacaggtgctagctacatggtaatcactgtgcatttcattgatgagtattggcgtttaagaaagtttatcattggctttaagtacatcgcagatcacaagggagctacaatatcaagggttctacttgagtgtttgactgaatggggaatagagaggatatttaccatcacagttgacaatgcaactgccaatactagtgcactcaggaagttccagagagctttacaatcacagagagctgattctttggtgttaaatggagattttatgcacatgaggtgttgtgctcatatcatcaacttgattgtgaaagaaggtctgcacaaattgggtaatcatgtggaagccatccgcaatggagtgctatatgtgagatcttctacttctagatgtgactcatttgagcagaaagttgtgacaggtaagatgacaagggggagtttgcctttggatgtcaaaacaaggtggaattccacctatttgatgttaacaagagcaatcaagtttaaggtggcatttgacaagatggaggctgaagacaagttgtacaatgaccacttcttggaagtagtcgatggggaaaagaggattggaccgcctactacaattgattggagggaagtagagaggttagtaaagtttcttggcttattctacactgctactttggtcgtttcagcgtcaagtattgtttgctcttacaagtgttatggtgagatagtcaccatagaaaaaaatctgctgggaatgactcatagttatgataaagagttgagggaaaaagctgttgaaatgagggaaaaattcgacaagtattgggatggacaaaagaatatcaataggatgttgataattgctagtgtgtttgatcctagacagaaaatggaatttgctaaaatgtgctttgagaaactttatggtgtagacacttcagaagccaaggagatgtataattctgtttatgatgtcatgaaggctatgctgaaggagtacactgtcattttcaagggaccaaacacacaatcatcacagtctaatccgccttcatctactgctgccagagatacttttgcatgtgagttagctgaagatagtaatgttgagtttgaaaggatggacaggtcatataaagagatggttaatgaaattagggttactgatcctaaagatgagttagatatctatctgaaggcagaggtagaaaatcctaagactcttcctggaatggagtgggatgtcttgtcttggtggagactcaatagtcagaagtatccagttttatcagaaattgcaagagatgtacttgcaatgcaagtgtcatctgtcgcatctgaaagtgcttttagcaccagtggtcgtcttttggagccaagtagaagctgccttactcattatatggtagagactttggtttgccttgagcagtggttgaaaagtgaaatcaagctgagtgaaaacacttttctaacaaatgcacaacttcttgctgatatagaattacttgataagcttgagaaaggtaactttatctatgtagtttactagttttagttttagatgttgtttgaaaactctcttatgttctaacacaacttgggtgttgattgaatctttttcagagtttcaaactgaagtgaacttggactaaaagactaatcaaggaaacgactacaaggtaacttcatcactccattttgttttcttttacttctgaacttggtttatagctcaatgttaatatactagactcatgaatcaacgatcatttcgtatttgacttttacttggtttatggtttaatgtttacttatggttttttatttttcaactgagcttatttggttttgatgtaacaggaacaagtcatgaagaatctatcatgtttggatgttgctttggatttgaacttctttctttactttgaatgctttggatttgattctgaacgatggttttatgtcttgctttggatttgaacttctttcttctatttggatggttttatttggatgttttgaatcttgctttttggttgaacgtgtgaaacttttattatgtcatgctttattgattttacttcaagttttttttattacaaatttacaggttttatggtatatgtggttagtatcaagtatgttcgggtagttatgaactagtatccaataatattcggttacttttcggattttcaatggaagtaccaatacctacccaaacccaaaatataccggaccgaacccgaaccgaagttttcaaatacccgaacggggtctaaaattatagttccgaaaaatccgaacccgaaagaaccgatccgaacccgaaccgaatacccaaacgcccaggactactaagaatagtttttttattgcatgagtgaatgattagataattaaaagttatatttaaattaaacaatacaaaatcatttgagaaaatcgatgtgtcgcgcgggtgatcgcctaatcatatatatgaaagaagctgaactctcccaatttttcaaccacatcagcatgagagagagcgacatatggcatataatttcagaaaacaataaaatcataatatcaacgaatccacgtctcccgactttagggtttcacatttatgccttcgaattttaatggagttttacctcttcctcttctcgtccgtttaacgttcaattactagaaaaagccattgatttagtgtcaaatcaacaaaagcatagcgacgcagaaaaaaggacacgaggattagtaaaaatcgagcactaactatgggaagcatgtggtggctgcaatgacgagcgtgtgaagttgttgtttttttttttacaaaaaaaaaagaaagaaggtagtgctgatatgcgggtcatgggaagctttgcttggatgaatttgcaggctctctcctttccaactttgattttgtttgggctcccggctcagaatatgttcgaaattctaatggaaaatagtatgaatttctttatttggtggttattattcatcctatatttgatgatatatggtttatggaaaagagtatgaaaggttgaaatgtttatttctgaaaaacatagattttatttttccaccaacattatttcgttgcaacttccttgatcatatataggtgcgtgacatcctcacgaaagttttacttgacaacttggaaagtgtaagattgtgaatgtacctacgaaagtcgatggggttcaagaagctgcaaagatggagaaaattacttaaggagttaacgtattctttatctctatttttctcttcctttttaatgattcttgaaaagatgatatctttacttgaccttccatagaaaggggttccaagtttttagctaaatttcctaaaaatctatgatgttaaatctaaggaggctggtgttgcacgtatggtagttcattaagagttaatctgatcatgtctattaaaactttaccatagttctaaataggtatctgatcacagagcctgagaaagtggcccttataatgttgtacttaagattgaagagccaaagatttcaaatttgagttttacttttacttgaacccttatttttttaacactcttttaacaaaggcatatcatattactttaagaggagcttcatacttcagcatatataattctgagatgttagcaaggagttacataatctctatagctgacttacgcttcacccaaccaattataaaactccacatgtcacttatgacatcacctccatggctccatccatcctttgagtttcacaaaggtacaaaactcttttagttccattatcttaagttttaatgattcaataattatagaaagcgagaggccgtctccgttaagtaaccacacaatgaatcggtttcaaaagctataattctttttaaaccgtaagatagtctgtgcttcattcctttgttgcttcacagagttcgtctccgttaagaaaccacacgatgaatgagtttcacaagctataattctttttaaatcgtaagatagtttacgcttcattcctctgttgctacacaatggttgtctccattctttttgtcgaatgccttcgtgtcccaaatcgatggtttcttttccaaacttttcttatgttaaacctaaaatcccttttactcttcctaattcctttttgttattgtttgtgttttgacaaattggagataagttgattgagagttgcccgtgtcctcattgtcttctttttctttcttttcaccggtacgtgttcttagtattagttaaattactcagttctattcgtagtatttcagctggttaaaatttgttgtctctccaagagatgtcaagagagataattcaacttcggttgattataggcttatgttagccaagattgcatcaaggcattttcgctatggcggtagagtactctgactacaatgaaatcaagacattacaacaagtctaacacataagtctcaaagtagctagatacaccaatcatttccaatagaccaagtgaaggtctcatgtgacgtcttcactataacacgttttaattcacatatatatgtaatatgtgtatcggagtgatcataggtattatacgagaactgcattcctcagttgtaacctcatcaccgacacatgattcttgatcatgtcctcgggagtatggaccacaaaattttgtagagatagactgccttctcgctatttgatcaatcgctttgcttctttgtattttctatactggtttggtattatattcacttcaggggttcatttttatcttgtaccaaatcgtcttcaaccattatcatttaatgactagaatttgatgatttggtgcaagaatgtgatttgctttcatgttttttataactttttagcatgggatcacatatatggttatgcataaagcttaattttgttaactccaattttcattacgaattaaatatttacattcttatgaaaaacacgtgaaaattaattttaacttacaattctttttttctttatcttttcatctttcaattcggtaatcataataagaacttataaaaagaggaatgtacgcggaaggatgcaaacaaactaaaaagaagaatcaacgaacaactacaagcatattagcaccgctaaaatatagtatatcgaaagaaatgaactcaaccatcccaatacaactatagtattgtagttcaggcatatcccattcatataagaagaaagagctttaagggatcatactacgtgcgtagaagctttaagcctttagatcagtgaaatctcgatgttaggcgtaatgaatatttttctagaacccataaataactaaaagaaatcaaaacatatatccttttgttatcaccatgtctaaaaacaaaaacatgtaacataatctttttttaacaatttttaaaaaacaacccacgcgtagcgtggctgttcacctagtacacataattttcccaattcatgaacattggaacttgtgaggctccagctgtcttaagttcagtaatcacatccatgtacagaaatcaaagtcattatatcagtattatgtcagaggatcattcataacattaaggatacgtatagtataataaaaaaacttaacaaattgatttcttacttgtagacaacaataatttttaggagaagagaaagaagatcaaaagacttcgcaacacccttggcaactttggatagcagcaagtaagaaaatgggccaaacataagacttttaaaatagcaaagaaaacaaaactacctttcataatgcttgctccatcatagccttgtcctctcaccgttttcaagctcaacccgtatttagcaaacaaatcatcaatagcagacttcacggatgcagatgacgtttcttttacatgaactacttcaataaacctttctttcactgttccactcttatcaacaaatcgaaatacgactgccatttgttctttatgagaaatatcaacagactcatcaaccaaaaacagccatgatcaattttttcaataacagatttcactacttctttagtaaaaaatttcacaatctctttttgaatctttggagaaatcatcatgttatttttttggagcattattcaaaataactttacctgtagcatcattttgttctcctgtgtatttcacgagttctaagaaatttcctttattggcagactcttctgactcatcatgaccatgaaaagctatcccttgtcgcaacaaatatctagaagcatcaatcgaagtatttaaaggaatgtgatactctctcttcatcacatcatcctgcttaaacaacgcatgcacaatagattgaccttgattcatcaaattaacacatttctcaatagcataattatgagaactgttgggtttacccacatgggtgcctaatctctcatgcttaattattccatctacaaaacccttctttcacaaacacattactcccaccttgctttcgtacgtcatcgttaaataagtagcaacataaacaaaaagctctcctttgatctgctatactcaagctaataaccatatttttcaaaccaagcagggtcaaatcgcctcagagcattactcatcattgttttcttaaacgtatgaccataaggttgacatgaacttctttcaagatatttgtgtcttacctcgtctcgttgatctcgatgatagttcactatctcttttttttagcaggattcgatggcaaatcattgatattgatgttggatgttgaaggaattattttatgtaggtcaaattaatcttaagactactctctcaaataaagaggtcactggcagcacttagggatcgaattcacaaagttctcggatcacgcaatagactattgattatcgaattaagttaagtaaaatagtaaagaaaataaaaagaaacaaaagcaagcaatagctgattggatggaagtaaaataagataataaaagggtcatgcttagggtattctaaggaaacagatgatagtagatctagaaatagctaggatgtgatcgaaccgttcttaaactcaaatcgtaattacagaataaccggtggtttgttgtgctactcactatgcctaatgctaaagatccctatcgttggcttggtgaatctatatattaagacatgcatgataaatgagtttgataagttcacctaagtagaaaggtcaattcttattacacatctataaacatggctcatcaaatagtagttctcgtaatagatacctgtttgggcatacctattatttaagatcaagttctaggtggccaatctaaaactagcattaagaaaaccaaagatgaagaatcctacagatatcctaacaggtggcagtctactaaatcatctataaccctaatgagaaacctgaaacctaacaagagaactactcaagcatgaagattataacaatcaacatgattgatgaagaaatcaaagaagaaaacaagaagagattaaagtttagaaagatcttctcttaagagtctccactaggtttttctcccaagaacagaaatataataattgttaggtctaaacaatgaccttagaatctatatatatatatatatagatttctaaaacatgatgggccttctttaaaattaagaaaaggttctgtgccgaatctgcaaaacttcggcctagagaagtccataacgctttcaagtttacaaaagtgcaaatttgctctagaagactttcttatttgcattattagtccctgaacatttattaggtcatatatatagttttagaggtcattgtttagacctatcaagcttgttatcaagttttctttcagagacataagctattgatcccctgttttcagagattcattcagattccaatacagtgaagagatcctttctaactcttttctttattgttgtgctcatgctttcttattcaattatgttgcttgtttcaatctccatgtttgagtagtttgcttgttagggttagggtttctcattagggattcatatggtttagtagatcgcctctttgctaggttatatgtagaattcttcatctttaattgttcttaatgctaattctagagtaattaactataacttcaatctagacaatagatatacccgccataggtatctgtagttggatctattatttgatgagcttggtttataggtgtgtaataagaatcggcctatttactaaggtgaactgaattgaagtcgtttataatgcatgtctaagtataagatttgtcggcttctctggttattcttagctataggcatagggagtttcgcggaacgccaccggttattccaaaattagagttagagtttaagaatggttcgataacaacctagctatcattagatatacgaaccaatagtttcctgagaataccttaaacctaactcttaattatattgtttcacaacctccaatctgctggttatttactttgttttctttttattttactcattctcttctagcttaatcttgacactctactcattgtgtgaacaaaagaactttgtggaaatccgacccttattacaagaaaacaggcaaaaaacgactacgaaaagcgacaacatgtatagtcgtcttattttgcgacaatgtggcgacagtttaacgactacaatacgacaacaagaaattttgtcgtgaagtagtcatcaatttacgactaactagcttagttagacgatagtcgttattaaacaactatttaacgattacatttctgaagtgagaagttagtcgtcacgtagtcggtaattgacgactacgtttccgactacattagttagtcgtctatttggcgactatttgacgactacgtcgcaaccgagtcgcaaacgagtcgcatgaagtagttgaaaacgtgtttcgcattgctaagtaggtacacacctaacttgttagcgactacaacatgtagtcgtaaataagtcataaaaattcgtctatagattaaaagttcacgacacttttctttcaccaacaaatcaaaacaacaacaacatcaaagaaaaaaaaacgatttaaaagaaaaaatataagtttattttattgtataatggcgggaaactacaattatggcggtagtggcggttttttatcgagattggatgtacaagagatttgatgaagtgacgggaaatttgacagccgaatacgtcgcaggagttgagcaattcatgacatttgctaatagtcagcctatagtacagagtagtcaaggtaaatttcattgtccttgtggtgtatgcaagaatgaaaaacacatcatctcgggcagaagagttagtagtcatttgtttagtgaaggatttatgcctgattattatgtttggtataagcatggagaagaaatgaatatggatataggaacgagttccatggataggacgtattttagttcgaatcatgaagaagtgggtaatgttgtagaagatccatatgtggatatggtgaacgatgcatttaattttaacgtggggtatgatgataactatcatcatgatgatagttatcagaatgtggaagaaccggtctataaccatttaaataagttctacgacttgttagaaggtgcaaataatccattgtacgatggttgtcgtgaagagcagtcgcagttatccttagcatctcgactcatgcacaacaaggcagagtataatatgagtgaaaagttggtggactccatttgcgaaatgtttacagattttttaccagaaggaaaccaggctacaacttcacattaccagatcgagaagttgatgcgtaatttaggacttccatatcatacgattgatgtttgtcagaacaattgtatgctattttggaaagaagacgaaaaagaagatcaatgtcgattttgtggcgcacaaagatggaagcctaaggacgaccgtcgaagaaccaaagtaccatatagtcgtatgtggtatctacctattggagaccggttgaagagaatgtatcagagccataagacagctgcggtaatgcgatggcatgctgagcaccaatcaaaggagggagaaatgaataatcctttagatgcagcggagtggagatatttccaagagttacatccccggtttgccgaagaaccccgtaacgtttatctcgggttgtgtactgatgggttcaatccatttggcatgtctcgtaatcattcgttgtggcctgtgatcctgaatccatataatttaccccctggtatgtgcatgaatatagagtacttatttcttaccattctgaattctggaccaaatcattctcgagctagtcttgatgtgttcctccaacctcttattgaggagttaaaagagttgttgtctactggagttgatgcttacagtttttcattaagttagaattttaatctaaaagttgtactactgtggacgattagcgactttccggcgtatagcatgttatcaggatggactactcatgataaattgtcttgtccagtttgcatggaaagtacaaagtctttttatcttcccaatggacggaagacatgctggtttgattgtcaccgtagattttttcttcatggtcatccatcccgtaggaacagaaaagactttttgaaaggaagagatgcgtctagcgagtatccacccgagtctttgacaagggagcaagtttattacgagcggttggctagtgtaaatccaccaaaacaaggatgttggtgggaacggtcatgaaaagaagatgcgtggctatgggaaggaacataattggcacaaggaaagcatcttgttatcatgtcaagattggatattgagaaattttgttctcggccaggcttacatattgatagtaaaggtaaagctccattttcagcgtattcattgatagatgaagtcaaacaaagtttatttcaatgtgtgaaacatgatgttagatttccatatggttattctagcgatttggctagttgtgtagatctggagaatggaaagttttcaggcatgaagagtcatgattgtcatgtttttatggagcgactacttccatttatctttgttgaactccttgaccggaatatccaccttgccttatcaggtacaatacttactattttatttgccatcatttttttatctaattatttaacttgcacatatatttcaggaattggagcatttttccgggacctatgtttgagaactttacagacaagtcgcattcaaattctcaaacagaacatagttttaatcatttgtaacttggaaaagatttttccaccatcattttttgatgttatggaacacttacctatctatctcccatacgaagctgaattgggtggccctatccagtataggtggatgtacccatttgagaggtttttcaaaaagttgaaaggaaaagcaaagaacaaaagatatgctgtaggctcaatttttgagtcatatatcaatgacgagattgcttacttttcagagcactactttaccgatcatatacaaaccaaatcaaggtaaatacatttatttatttaactattttctatacttcgatcttcattcaattacatgaatcaggttaacaaggttcgatgaaggtgaagttcctatatatcatgtccctggagtacctaacatatttatgcacgtcggccgtccaagtggtgaaatgcatgtagaatggctttcagagaaagactaccaaagcgcacatgcatatgttttaaaaaattgtgactatttaaaaccatttgagaggtatttttaatcactattcgtttgtaaattttcactaagatcactttgatttatttttctttgtttgtaaatattgtatgttcgaggattgtctttctgcgaaatattcatgcttgccagaaaaagaactctacgcgagaagagctgaagaatatcatctatgggttaaagaatatgtaagtctacatcaatttcttgcattcgaaaagtgagaatcatatttatatgtattaatattatttatctattatctaggtaacatattggaacactacttcttcatgtcctatttggattcaagaaattgtgcaaggacctttgaacaaggtcaaaacttggccaatgtatttcacaagaggttatatgtttcatacgcaaaatcacggcgctggacgaaagacatgtaactatgaggtgtgtgttaaaggtgaaaattacgctgattcatctgatgaagcagatttctacggtaccttcactgagatcatagaactcgagtatgagggcatcgtcaatttgaggatcacactttttaagtgtaagtggtatgactcaaagattgggagaggcactcgcgaagccacagaggcgttgtagacgttctatctacgaggaaataaaataaatacgagccatttattcttggtacgtaattttgaagaggtcaaatatgtttctctgttaattattaatactcttatttgatatatgtataacttgtgtatacaggatctcaagcagatctggtttgttatattccgtatccatatacaaagaaaccaaagaacatttggctcaatgttttaaaagtcaatccgaggggaaacatttctggagaatatgaaaataatgatccgactcttttgcaaacagaaaatgatgatgttgttttactcactacaattgaagatcttgtactagaaaatccggtggaaggcttaaacccaataatccttgattacaatgttggggatgctgaaccagaagacgaattccgatgtaatttatcgtcctcggacgaagatgaagtagaatatgaagagtaataaatgtgtgaagtatatgtttaattatttgataaaacatttgaatgaattttgttttataatatatcattgaacatttaatttgttcatgaatatttcctatgtaaaattatttctattttaaaagtataaggtgactattatgctactacttggcgactaaattataatttggtgggcttccaaattacgaagtccaaaaccaatagagatgtgacaataatgcgactactcaacgactatcctttgctttgttgggtttctaaatatcgaaacccaaacccaataaaaacagtgacacttatgcgattaataaacgattacagcttaatttgttgggctaccatatatcaaagcccaaatccaatatactatatgacaaaaatgcgactattaaatcactacgttttaaattgttgggcttctaaatatcgaagcccaaacccaaatcatttaggtgaaagatttgcgactactctgcgactatagacgaagttgttgggcttctaaatctcgaagcccaaacctaataaaaacggtgacagatttgctactcttttgcgactacagacgaagttgttgggcttttgaatttcgaggcccaaacccaaatcatttagtgacaataatacgactacaatgcgactactacagtgttaaaaaccctaaatcgaatcatttctcattcctaacacttagccaaaatatcgaatcaaatcgatctctcttcttcttcttcttcctctgaaaccctaatcttcttcgatctgttcttcttcttcttcattcttcttcaatcttcttctatcttcttcctctctcaatctcttgatctctcgatctctcgatcttcttcttcttgttcgatctctcgatcttcttcttcttcaatctctattcttcttctttgatcttcttcctcttcttcatctctttgatctgccacttcttcatcttcacttaatcgatctctagggatctctcttctttcaagcagatctctccgtcgatctaataacgctggtcgaggtggctcccaaaagcggaagacgacgcctaatgttactcagagagacggcggttcaacgaccccaagaccttgggatctccctcatcaatacaacttcactctggcgccggcggttcaagttccagcgacgcagccggctcaagctgatgttcgtttgacgtcagccccccccccccccccacgtacccgactatccactaccgctacaactcttccagaactccaccactcaacctcagcgtggtggtgctccgcctcgatctgaagaggtccacttcaatccatcgccggaagagcctgctcagcaagatcctcagtcgccggatactgacaatctagctcacagccaccctttgtctcaagggaacaacttccaagaggaagctcctgggacgttgcctgagctacaagaagactcggcggtggctctgcaagatattctctcagtgccaaacatggagcagtggacttgtgtattgtctccgattcccaggccaaaaaccgagtggtaagttctcttcctctaatttgttttcgtgttatctgcatttgtagtgtgtaaccagtagacttgtgaatcctgaaacatagttgtgaatgatgggttttgttggatgtttgttttgtttgcgtaacatagtagatttgtgaatactcttgtgtgctcttgtgaatactcgtgtgtccttgttcagttctatacttgtgaatcgtgttctcttgttaatcgagtctcttgttaatcgtgttctcttgatgctctattgatgaagttgactttgatgtcttttaattgtgttctgttgctactcatgctcttgttatgttctatagtatgttctcttcttaattgtgttttgttgctactcatgctctattgttgaacatagttgacttttgaacttcgcatgttttaggattagacatttattatctgccttagttttatactgttgtgtgctcttgttcagttctatagtgtgtgttctgttgtgaatctgcctcagttatacctgtgtagtgtgtaacatagtagacttgtgaatctgcctcagttctatagtctgttctcataacttttattgtgttttgattttttaacatgtttacttctttcattgttgcatgtgcttggaggtttactcgcgacagaggatctaaactggttagaaagatcacaaggatttttaatcaaaagttcaatgctctctactataattggtcatgtgtgcctttggctaaaagagagagactgtttttagagttcgcggtaagcttcctgtatatctgctcctgttcagtcattgtttttagagttttatagtctgctcaagttcagttcactaacttcttccttttttgtagaaaactcaccactgggatccattaatcacaaggacagtccaatattacttcaatgagatcgtcaagaggcgcttgaaggatatggttagcaccgcaaggagaactcgagagcagcctccatggattggagaaactctgtggggaacaatgtgtgcttacaaggacacagaagaagcatagaaaaagagtcagacctatttcaaagctcgtctctctgaccctaacggtctcggtccacacatccactactctgggccaaagtcttatcaagaattccaagataaattggtaagtgtttctgcaaaatctcatgtcttttagtgacattcaaatcataagttagagttttattgtgtgtgatgtttagttcaagctgtgagttgacttgtgaggatattgatctatgtttgcaggaagagaaattgggaagaccggtccatcttggtgaggtgttcatccaaacacacactaagtcggatggcacttatgttgatcggaaggcggagaagattgctctaacttatgagcagaatgtgagagataagctgtttgaactggaggctgcagcttctgctgtctctgatggcacttcacgacctcgggatctcacagtagatgagtatacagccatctttctcgaggtaagatgttgtagtctaattcagagtcttagagtccattgatacgtttagtcactaattgtcttcctctctatttcttgcagtccacggatagggattcaagaggcaatccttatggacttggatgtctgaaagacactctaggcagtaccaaccgtcaaccgccaactcgctggagactcagcatcctttcaagccttagaagaacggctgcaggaagctcaacggaaaattgaagagcatgatgcatataatgagaagcgggatgcggagattgctgcccgagaagctgagtcagcccgagtcatagctgagcaaaaggacaagctcgaacacttgtccttagtcgagaagtatctccgccaaaccgatccgcaattcttggaattcatggccactcactcttccacatccactgagcgtctcccaagtaccccacctaatactccatagatttaactttccaaacactatacttgaacttatgtttatttgaaataagttgtttgtttaagaacaagatacttttatgtgtatttgaacttgattttcaaaatatgtatatcttttcataatttatagcatttcgaataacaaacaacaacaaaccataacactaaacaaaaaacaagaaacccaacaattgatgaccaaattcttattcggacaaaaccagaagtcgcaaagaagtcgtgaataagtagcaaattagacgcgtcgtagtcgtaaaatagtcaccaaaattaccgactattttaagacaaaccaaattagtcataacctaatcgtcaaacagacgtataatagtcgtattcatttatacgactattatatgacaaagtatatcatatccttagtattttacatttaatcgtttaatagtcggcatattgtcgtaaaatattttacgacaattttgcgattacctgaaagatacccagggttcattatatttaattggaaattagtcgtaacattgtcggaagaatttaacgactataggacgactatatgtttcacacgctttgtacagtgttattaatcgtgaaattgtcgccaaatagtcgccaatataatacgactactcaacgactaatttatattgtatggtcggttgtcgtaaagtagtcgtaaatcgacgactaattgacgacaactggacttagcgactatggtataacaactactgtcattagtcgtggattagtcgtaatttcagatttgacgactactaagcgagtacttattcaactttcgtcgtggattagtcataatttcagacttgtattctacattcaaagaagtaatctctaaacccttttaagttttattcaacttttagttatggtttactcaacccaacttttgattagctcctttgccatgagcgagtagatctctagttgggtttgagggggtttcaaaggggaattcatggggactaatagatcaaaagtctaggtaggcggtttctatgtttttttttatcgtttacactattcttttagttgagtttgatcttaatgcttgtatgtccggaacgccacctagtacttgaccttaggtatttcattctttggcaaaatctcgtttgaatgcttgaactaactcaaccgaataaagaactattactgttgcacacccgccgagtgatacggactaatgggctagaatcaaatttgaactaaatgatttgatctggtattttgaaaccatgttagcacttactaactgatagggcaactgagtatgcaagatattagtgataatagccggctttcacctactaatcgttagggttagctggtcttgatagagtttcgtatgtccgagaatttggaagtaaacaaagataaccatgttatcacctagattgagatctatactttatttattgaaccgtgacatctggagaaaccccagatgacctaacgctttctctcttattgcttaccgtttagtttagttatttgtctcttagtttggttactcatagcatacaacaacccctctctttattttggttctagcttcactctcttcttaaggatttctctgaactacttctctccttgtggattcgatcctaaaacactactccgatatactgtgcacttgcagtagtcgtgtggtctttcaagtaaaatactgaggcgaaataaaacacgcatcaagagcagaacgcagaagaagttggtgtcgagcgacaccccttgggtgtcaatcgacaccaaccacaaattcttgcagttatacctccagcagtggaaccacgtcgtactcttgggaatttcaacaggcccgacctgttctatgccaataggtcaccgatcgtacccccatccttccagaggaacgactatgagctgaagtctggctactttgctttagttggccaacatcctttccatggcttatctcacgataagaatggaccacattgaacgttttgagaacctcgttctgagcatcaagactaatagagtctcagaggactacctactctgcaagctcttcccttactcatttgctggggaagctgcttcttgcctgaagcaattgaaagcagtttcactcaagacttggagaagcatcaagatagctttcttgaataacttctatgatgatgctaactctgaggagctgagaaataagctgcctaccttcacccaaggtccaactgaagctttcaaggccgcttggtgatatgagtcaaattaccctaatgactactctttcaaataaagaggtcggttatagcacttagggatcgaattcaacaaagttctcagatcacacaatagattaacagtttcgaataaagctaaacagaaaatattataaaaataaaagacaagaaagcaataaaagagattggttgtagattcggatgattaagacgttgggtttaggaaaatgctcaagaaatatcagaatattatattaggattattaacgaaccatttttgaactcaaatcactaatattgagtaaccggtggcgttccgcgaaactcactatgcttaatagtattgatcccaactctcttgtaaatccttagaactaagcaagcattataatcaagtttgataagttcacctaagtaattaacgctagcccgcatctaaatactaggctcatctaagatagttccagtaatagatacctatggcgggtatacctattatcctacaatcaagttctagttacttactctagaactagcattaagaacaatcaaagatgaagaattctaaatatattatcctaacagggtttttggtctactaattcatctaaatccgtaattgagaatccccaaacctaacaagagaactactcagacatgattatcaaagaacaaaacatgtttgaataagaaatcattgtaagaaacaataagagaatagagttaagaaagatcttctctaaagggagtctacaaaaggtttttctcccaagaataaaagagataataagtgttaggtctaaacaaggacctttaaaactatatatatgacctaaaacgtgatgggccttttttagaaataagggaaagttctaggctgaatttgaaaatcttcaaaacatcaataagttgcgcaattgaattgtcgtcaggaggggttgtgtcgatcgacacctacgtcaatttttgtctatggattgcttttgcagcttaagttgtctgttttgcaccagaatgctccataatctccaaatgcatcccaaacatgtaaagacctaaaaaagattagaaaagactctacaaataacaaaaggactctaaaacttatacctaaatcataggtaaaacagataaaaataggtttatatcaactcctctggacttagcttttgcttgccctcaagcaaaacacaaaagccgaacccgtggaagaggtttgaaaacacaaagaaacctccaacattctctagtccattgccatgatcattctaaccaaatccatatgcctagcaagtttaatcaaatcctaaccaacctgtacttctctgcaagtttgcacaacattctacattccatacctaagttccacaactatatccaccaggctttcatcgttgggtctcatcaagcaagctaacattcaaaaaccttctacactcattcatgtactataccatgataaaatgaccattctttatatatattttttttcttttggtatcctttctctcccagacttattctttttgaagagtaaacaaaggggaactcgcatacttgattgacacccttggcatatttccaacatttgtaattgatcattcctaacaatgtataataattggatcatgggaaacattcctacccctatacactaccgaaaatcatatcaatctttttttttttttttattagataaggggagaggaatacttttctttttcacattggtctcaatataaggtatgaaaaaggagacaagttctataaacactaaccgtgagattagctctagccttaatggattgtgttgcaaagtacgatatcctcaagtctgtcggtttgccatcttttcaatagtcaaattgagttgaatctgcagcattaatcaacaaggcaataaactaaagaatagagatcattattcctaactagattttgactcagtaaaacgattcaaaaataagaaaataagaggaagaataagactcaaaagaaaaacgtagttagtaactaccttccctagacttaaacgtcactgtccccagtggcatttaaatctgaagttagcggaaaaaacgtaaataaaggaaaaagaaaaagaaaaaaatcataccagtgggttgcctcccacttagcgcttatttatagtcaatagcttgactttgctgggattcaagcatcaggtggatcagaaggtggcagtaaatgcttcttagaagaacatcgcatcatccatggtggtataggagcatttagcgcttgagatcgaccatggaaatgaggaacatcagtagggtgacacttaggtatgggtggtatactcctctttccttcacaatcatcaaaagaagaaacaagcactcgacgagaaactcgtggcttgcttaaccgtgaaacagtcttggaaaatttaaaagtcttacagatgaaatcaggaggtgtaggtggaggagatgagtaccttagccgtttaggaggtggattgagtagtagaggtgcagtgcttgatttggcagtctgtcttggacttgcagcatcgattacagccgtgataaacgattcgagtgcagtctgttgtgggtgtcgatcgacactattcagctctacaatctgttctgagacaacccttgtctttcttttgtcctcctatttctgtggagtcttgttctaaataatgccagttacatgtgcagagaacatcatcacaccatgctcattattcaaatccttagtaaccattctcttaacataatgtctgactatagaagaagacttcacaacatctataagtggcatctctacaataagcttatccatcatagctttgcatctagcatcatctagctcctgtttggacttcctaggactcttgggaaaagaaaccttgggttttgttacattttctgcaacagatatcgggttttggagaatttgcatgtttggacttggttggtgtcgatcgacacccagttcgtgtcggtcgacactgtcgggttctgtagtgtctgcgttggctggtgtcaatcgacacccagcagtgacggtcgacactggtgtctggtttgcaaaaactgcatcatcattttctttcaaattgacgattttggctgtaggaagttccctttgaagtactggatttagttgttttccactccttaactggataacactaatatctgctatatttgtagtcaaatgctcggtccgattgttcaataattgaatcatcccattcatatcttcggataatgcaaccagtttgtgatcaaaatctgttgtctggatcttttgacttttgagaatctgtttgaacattgattcaatcatcctagtggtctcgggtggagggtgtgcttgtagtttgctgaaccggtttctaatgtgtagattgctgattgtagctcatgtatcccttttgatccatcttctctgaagtggctaaactgttaacctgtgaaacatactgaacttgcgttttccttgcaatgtcaacgatgttggtactaatgctggaagataagctttatatcaacattgttgcatcctatggatatcttgacatgaaatttccgttactagctgcatccaaagccatctgataatgccattcaactcctctgaagaagatatgataagtagatttttatgcctacttatgtgcaaaatgtgaggttcagttcaattccccttaaacactagcatgtcaatgcagctatagggggtgtcaatccagtccactgttattgctagcaatcaagatgtgtacagaagcaactaagtcaagccagatcataatgatggtgggtttctagtaacaatcctaggtcaggattcaaacaggtaaaaataagaacttaagagccctactcgatcattgggtcgagtagaaccaaaaggtgacaatattaagaactaaaatacaatcaagaggggatacaaataacaggtaaataaaagtgcaatcagggggtgaataccaataaatctaagaacaatagagttcctaaggatgaattcattgataagggcaactgtatggttcataaagaggctaacaggtgaaagatagataccctagacgatagattcaaaaacagggtcaatccactctcgtgacagagacccccataactctaccacttcctaatcacaaccctcgttgatgaaacatagcagagcagggtttaagcaataatctaccaaagccactaagcatactagccaatctcttgatcaagtctacaaatctctggaattcgtagatcagacatccatttgaacgtcttttagacgttggacgtctatgattgaatctccacattagccagcgaaaaccgcataggggccaaccgaatccagaagggatctaacataatcttaaccacctgactaacctaaagattaccctaatctaattcatcatcaagaaaactaatcactactcaagcaacataactaagaacacaaacccaaaaattactgaaatcataccaaaatgtagatctaaacaagctaaaaaactttacgtaaagaactaaaagcgaaaacgaaatagattaagagtaattaagttttgaagattcaagaacagaaagaaaaactaaaggataaaagctagatcctttggacaaatccgaaagtgatctatttatagtaaaatgttgaaaattctagattcactataagacaagggacttgaggcggtttgggcgagtgcttgatcttggggattgagtaaagagggtgctgcaaagtttgcgcctttgtgtgtatgctccgagtgatcaattggtcgagtagatgctttttcctctcctatccgtatgctcagatgtctggttgagtggggaatgaggaggatccgaagacgagatcaacaagtctggtagagttggtcacccttggtcgagtaaatgggtcgagtagaggatcaggtaggaggggagagtagatcgatatgctgcttcttctgaggctgccttgatctagtaagtgggtcgggtgaattgctgcctcctctgtagctgcctagatcgagtgaatggatcgagtagaatgctctgatgcttccctcttggttggatagagtaaagggtcgagtagaatccttttaagctccttctgcacctgaaaacataccaaaacatgcaatatgtatgcaagatgatcctaaatgcctaggtgttcaaaataagctaaaatggtgcaaaatgatatgatacaatgagcagatgcaaagctaaatgatgataaacacacacctaaaatgagtaaaatacaatgttatcaactcccagaaacttatctcttgcttgtcctcaagaaaacaacaaatcttaagttgaaggagaggtttgaaggtggggattcaaaaaccgaagcatgcaatatagaacgggtagctcaatgtcgaggtagctaattctaggttgcaagatgatagacccttacttaaaaactttagccatactcgtcacaatgcaacctaacaacctgccttaatgtattcaagcattctcatcaaccaattccctttaacattcattaagcatgaacagtggatcaagcaatgcaatggttatgaactcatttggtttcaggcttaggctaagagacaaaaatggtccctataatgatttggtcgagtaacaagggactctcagagaaaagattgagcttcagcaaaatgctaaaggtaaaagccaatggacacatacaagaacagactcccatatacccaatgatatagaatgatagctcagaagatgatctcggtcccatagatgtcctaactctaccctttttctcattctttctcttttttggttcaagttcttcttttctcagtctagcgggtttggttttataatttgacaaacttaaggcttttcttctaatcttagcacatagggcgttttacccttttctttgaatcacaatgcctaagttctttgaattccaaaccctttactagactaacacttttgtatcccccttaagaactctaaactcttactcttttttgttttgtttttcactctcattatctttcccattcaatccatacacaatccctaccctaaatacaagtctccacctagtcctagctaacccaaaaagcgtgggctaggtctacatgaaagattgctcttgtcggcccatacctaacacgttatcttgtcggcccatacctaacacgttataccaagctcaatcaaaaaatacctcacaatcacacacaaatgatctttggcttgaaataaggctaggctaagggtatgggaaactgctctaaaaatgagagacagctacttggattaacagagggtggtgaagtgaataagataatccaagtatgtatatggtagccatgagttcacaaacaatgtatagacatgataattgcaaattcagttcaggttctaatagatagcaaatgacatgagataagcgagtttcgaatcaaagcagtatagtaagttgtaaattcaaagcagggtgcagtcttacttcagagaaacaatcggttatgcaacagagaactaacagcatgggcattgaacttacttcattgaatcaaaacatgcttaacggtttgaaatcatcattatcccttatgcaaatgagcaatcctaaatgcaagcactctatatacaatcctaaaatgatatgcaatttacatgacactctgtttttgtgaaatcattttctgaaaaaatttcaaatttttatggtttttttctatgccttagatgatgcaaaatttgaaataagaaaacagaacccaatgttaaacatgtcttgaaccctcccccaaacttaaattacagagtcccttgtggactaaaaatctgagaaaaaattcaagaccaaaacaaataacacacaagaaaaataaaaatactatggtatgtacaatggttgaggtggtgttacctcatcggtcaggtgaagtagatggagacataatcgtccatattctcttgagtataagcaggggctaaagttgaggcgggagggttttgctcgttctgttcggtcgagtagttggtcgagcgtgtggaagctcgtctctgcctactccttggctctctcaactcagagatcacttcccgaggctcaaaagatgaagttcggggttgatcaatccttccagccctccttgcagctgagcttgtggaaccgcttcttcttacttcgggggtcggagatggtggccttggcttgctctagaagtccttgatttgagcagccatactcttcagcgacttattcattgttctcatcttcttcttgaaaccctttactgttttgctgtgaaggttcccaagctcttcaagcacaccgagcttcttgtgaacttcagctatctcatctcctccttgatccgcattttctctttggtgagcttgctcgaattcgttcgcctcttgctccggttgctcgctttgttgctcaaactcggtttgctgctcatagtcatcttgagtgaaatactcctgttgctcatagtcagcttgactatattctggttgatcttctcgatctcctccaatgttgatgttcaagacagagggagatggcatgaaattgatgttgcgccttgtcttcaccaaagtttggttctcgcatggtaggggtaacagagaaggtccaagctccggatggttgaacttgaagagatagcgatctgccggagtttttttctcaagaaaatccttccccttgagatagtcgaggtcaatgaacttggggaacacgtcaggggttccgaattccatcccgacagctcccaatattggcgttaagagaccaccaacacaaagacttctgcgaattcccaagcgatggataattgcagcatactctctgtagctcaataggtgatccaaaagaacaacactcaacgaagtgtctgctctatcgcctgccatcttcctcctatcttttgtctctctcagaatgaagaccaaagattggtctattatgcatagctcctattcaccgacaaatctggtggcattttttggaaagagagtgttggcgatgcattggtggaggtatatagtcacgggatttcgaattgaagaactcttgctcttggctgacgcgtagggcttcagacaggcgatcgttttccaaaggaattttagctcatcttgatcatagtcttggcggataacttctccacttggaaacccgaaaatggtatcaagatggcgaatataaagagtatactcgacatccctaacctttaaagttatgtaaccaagacctcctctctcttctttctccgaatcatcaacacagaagtgaaccttgagggttgcaaggagttggcagctctcctctttatatcccccacattggcagctcatgaatgttgcaagattgaccaattccatcaagtattccacatcaccacaaataccaagctcttgcatcgtttccttatgagggtatctagttccgtcaaacttcaactccttcaaatattgatagtactcgttcggggttggctctcccttcctccttagcctgtttcgtctcccaacaggggctggtgtatcatccccgatgatctcaacctcttcctcggaaaccgcttcttcaaagggtgcctcttcatggtgttcttcttcagcttcaacgaccctctttccccgagctacttcttctctttgcatggctgagcggcttgagcttccaccttgaatcaatcttgatctttgggcacggcgagcttggcgaatttggcgttcagtcatgccactcatgtcaaacgcctcaacctcttcgttatcaacggaggatcttctagctcgagatgaactctttgttctggaatccatagagattggtggtgagcatcaacagttcaaacaagaaaactctccaagaggtataaaaaatgagatgatgaaagagagagtttcaaaagtgggttttagcgatttcaatgggtggaggaggatggtcttgggattctctttggaaggatagtaaaggcgagtttgaaatggtgaggggcatgggtaaatggtttgtctgttgagtaaagaagtgaaggggaacatgtgggccactcgacctcactccttggtcgctgaatcattcaagttcgagtaaaggatcgagcatcctcttgaagtgcggaatacttgatcaaacggtggagaatgcttctcccttggtcactcgatcagacggtgagggtgatttcccacatttagtcattcaaatcaatggctcaaaacactcctcctcattctactcgttcaacggttgagatctttgttgacttggtttgaatttactcgaccgttgactccataatggtcaatgaaataaacctgaaacactaaacaaaaacatcacaaataacaagaaagataaaaagttatacacatggatagacatgggacttcctcccaaacgagcttgactcttacagagcttagtcataaaaaaggttgaaatgaggaacagagaaatcctcatctttagtggttgaattttcagtgcttgaatcatactctgcatcctctcttgacaaatggtatgatgagtactcatttgattttcttcaaaataaacttctttctgataagcagagtagtcttcttcttctgaaccagcctcctttgaccaatcctcaatttcaaagttggggttgtccctgaccatttcttgaagtttcagaatggtgttgtttaactcttccatcttgtgagtcaactttccgattgtatcctccggagctttatatccaatctagagctcctggagttctttagaaacagaatcatgaatcaagtgttcttcttcagtagaggggttggtgggctgttcaggcactcctagagaataagtcggaatagggatttcctcctcactcaacaacttgctctctaggcttctttcctctaagtgaactcctttttgatcttttggtgcaaatcattatgttgtgaaatcttcgtcttccttgatagctaatgcagtttccatcttctttgggtcaataccatttgaaaatttattaactcttttttcaaacatccatagttgatctttcagcttcatcaaccttgaagataatccctctatgactctactttgccatttaattttttttctcatctcatacaagtcatcttttgtaggatctttagtctgagctaacccttctattgctctcttcttgtggtcaaaggttctcttcagcttgctgagttgagaagtatatttgacttttggtgggattccagcttctgtttcttcatcaacatccatgtcctgaatcccaaagtctgacctcctgttgttgatttttctgaagcttttttaatgtcaaacttcatcttgatgcctttttcaaggttcagattaatttttccattcctgacatctatgattgctccagctgaagctaagaatagtctgcctaggatcaggggatccttgccttcttcatctacgtccaataccacaaaatctgtaggtatttcaacatttccaatcttgacaggcagattttctattagaccatgaggatgtgcaacagaaccatcagctaagagtaaagctaagttgcaaaacttgtattccatgatccttagcctttgagctatagagagaggcataaggataacagatgctcccaaatcacaaaggcacctattgaatgtcaatggtcctagagagcatggcagagtgaatgaaccaagatcatcaagcttttcttggatgaattttttcttgtatgtttcttgggtggaggcactgataatcatctcttgattctgatccttcttgagtatttcaattttgaacttgtttctagaatggtgagtattcaacaaaggttagtgctctatagtccacatgaattgttgggtggcagttgcaacagtttgagttgaatcccccccccttcttgaatcatattgtcttcagtattgggagtctgatgacttggtggagactcatcttcatggtggatggtgatagcatttgcagtagcatagtccttaggattctgtactgctttccctggaagttgtagaggatgcttcagagcagaggttgatgcaaattgactctccacatacttgattttagaattcagagcttcaaacttgatatttagatcattataagaacaatcgatcttgttgtgtaattcagctatcttcttgtcaaaagccatacctccagtagcttgtccttgaatgatttattgaataagttgcttaatttcaggatcttgagctgttggggcttgttgtggtggttgattctgctgttggtagcttccaatgaactgttgtttagggacataaccttggttgtactgaacaaaaggcttagacttattatgttgtggtggatacacttgatcttgggggttagccacattagtgcttctgtaggagaggtttcggttgtgcttgtagttgttgtagcccttgttgaaccctccttggttctgaatgtaacacagctcttcagtttgatcattccccccttcttgcatttggaagtggtcttcatcagtgatgtagtgtatctgcttccaatgagccacaacagcttgtctagcttttctttcagagccttgatatctttgctctgtttatcctcagttcctccagttcttctcactgagcgatcatagtcttcattgtagcatccatcagattgtgctagattttcgaccaactcccatccatctgctacatccttgttcaggaagtttccattagaggcggtgtcaagtagcattctgatctttggtaaagctactctatagagtgtgctcaataataaagctttcttgaaaccatgatggggacactgagtggtgtagcttttaaacctctccaaagcttcacagaaagtttcattatttttctgtgtgaagcctgagatctcgttcctcaatctagctgtgcaagcattagagaagaacttggcaagaaaagctttcttacaatcaacccatgagttgatggagtctgggggcagagtcttctcccagtggtgtgtcttgtctcccaaagagaagggaaatagtctgagcttaaacatatcttcagtgacaccattgatctgggtaaggccacagagcctatcaaagctgtcaagatggtccaggggatcttccataggtagaccatgaaacttgtttccttggatcattgagatgagaccactcttgatctcaaagttgttgttctgaactggtggaggcattatcccttgtctttggtgatgattccttgggacatcaccagcaccaatgtttcttggttgatcaacattaggtgggtcttgaacatacactggtctgttctgttgatccatagcagctggtctttgctaatcacaggatgcctttgctttggtttcttgtaactcacgagctattctatctattctgtctctgaattatagtaggtgtgcagaacctttggatcgactttgcatgcacaaagattagtacctataccataaaaacaagcagacgaaaagatgagttagtaacttgataaatgtaaaagaacttgatcttaactttttctaatatcttgaatgtaacaatgcaacattgaattggcaacggcgccaaattgatatgtagatttttaggcctacttatgtgctgaatgtgaggttcagttcaattccccttaaacactaacatgtcgatgcagctatagagagtgtcaatccagtccactgttattgctagcaatcaagatgtgtacagaagcaactaagtcaagccacattataatgatggtgggtttctagtaacaatcctaggtcaggattcaaacaggtaaaaataagaacttaagagccctactcgatcattgggtcaagtataaccaacatgtgacaatattaagaactaaaatgcaatcaacaggggatacaaataacaggtaaataaaagtgcaatcagggggtgaataccaataaatctaagaagaatagatgtcctaaggatggattcatttataagggcaactctagggttcatcaagaggctaacaggtgaaaggtaaataccctagacgatagattcaaaaaccgggtcaatccactctcgtgatagagacccccataactctaccacttcctaatatcaactctcgttgatgaaacatagcagagcaaggtttaagcaacaatctaccaaagccaataagcagactagccactctcttggtcaagtctacaaatctttggaattcgtagatcagacatccatttgaacgtcttttggacgctggacgtctatgatcgaatctccacattaaccagcgatcgcataggggccaagcgaatccaaaagggctctaacctaatcttaaccacctgactaacctagagattaccctaatctaatccatcctcaagaaccctaatcactactcaagcaacataactaagaacacaaaccctgtaactacggaaatcataccaaaatgtagatctaaacaagctaaacaactttacttaaagaactaaatacaaaaacgaaatagattaagagtagttaagttttgaagattcaagaacaaaaagaaaaactaaaggataaaagctagatcctttggacaaatcccaaagtgatctattgatagtaaaatgttgaaaaccctagattcactagaatacaagagacttgaggcggtttgggcgagtgcttgatcatggagatcgagtaaagacggcgctgcaaagtctgcgcctttgtgtctatgctccgagtgatcaattggtcgagtagatgcttcttcctctcctatctgtatgctcagatgtctggttgagtggaaaatgaggaggatccgaagacgctttgatagatcaacaagtctggtagagttggtcacccttggtcgagtaaatgggtcgagtagaggatcgattacaaggggcgattagatcgatctgctgcttcttatgaggctgccttgatcgagtaagtgggtcgagtgaattgttgcctcctctatgactgcctagatcgagtgaatgggtcgagtagaattctctgatgcttccctcctggttggatagagtagagggtcgagtaaaatccttttaagctcctgctacacctgaaaacacaccaaaacatgcaatatgtatgcaagatgattctaaatgcctaagtgtgcaaaataagccaaaatagtgcaaaatgatatgatacaatgagcagatgcaaagctgaatgatgataaacacacacctaaaatgagtaaaatacagtgttatcaagatacctaacagctgaacctcactgaaaccgggatgcaggcaatctctctaatatcctctaaattttatccacgcggcttgaaatgcttcagctgcttcttgagataaggtagagatctgcattctcagctcctcagatcttgcgtcattataaaagttgttgagaaagtaacctttatttctttccaagtagtcaaagatacatgcttcaactgcttaagccaagaagctgcttccctagcaagagaataggggaagagcttgcagggaaggtagtcataagaaacaccttctgccttaatgctcaaaaccaagtcttcaaaccgctcaatatgatccataggatgttcttgtggttgaccatgaaaggggtgcatactcacaagagtatagaatgcaaggtttatttcgaaattgcttctttcgaaggtaggtggtcgtattgcagaccgattggaatagaagagacctggtctgttgtagacttgtagtcaccaagagtcatccgacgaccatctgctctgatttcttcttagtgtcgaggcacacccaggttgtgtctgcaacctaatctaatggtgaattgaagagaacttcggcaacgacaccaaatttgatatgagccaaattactctctcaaataaagaggtcagttatagcacttagggatcgaattccacaaagttcttaaaacacacaatatattaacagtttcgaataaagctaaacataaaatattataaaagtaaaagacaagaaagcaataaaagagattgtttgtagattcagatgattaagacgttgggtttagggaaattctcaagaaatatcagaatattaaatctagcagtaaattaggattattaacgaaccattctagaattcaaatcactaatatagagtaaccagtggcgttccgcgaaactcactatgcttaatagtatttatcccaacgctcttgtaaatccttagaactaagcaagcattataatcaagtttgataagttcgcctaagtaatccacgctagccttcatctaaatactaggctcatctaagatagttccagtaatagatacctatgtcgggtatacctattatcataaaatcaagttctagttacttactctagaactagcaaaaagaacaatcaaagatgaagaaatctaaatatattatcctaacagggtttttgatctactaattcatccaaatccctaattgagaatccctaaacccaacaagagactacttagacatgattatcgaagaacaaaacatgtttgaataagaaatcattgtaagaaacaataagagaatagagttaagaaatatcttttctaatggagtctccccagggtttgctcccaagaataaaagagataataagtgtgaggtctaaacaatgaccttaaaaactagtcctgggcgttcgggtacccgaacccgatcgggtcctttttttgggtatcgggtctattcaggtaaaggttcaagaaccattcgattaatgcaaattatcggttcgggttcggttcggttctaattcgagttcggttcggttcctctattaaacttaagaaccactgaataaccgaatattttcaagtattttcgagtttcggttaaaatcgggtatttagtaacctatttaacaaaaagaaccaaatttttcaaaacaataatgtcaactccaattttacttatgcagacgaagcaaattgtctaaattctgaaaccaaactgtagacataaacatataaataaagtgatgcatgtttgaattaaaaccaaacacgaacatatagataaattgctgccttgtcttaactgaaaccaaagcaaacacaaacagattcattgtctaaattaaaaaggaaaacaaaacacaaacatttcaagctttgtcttaaagatacctgaaacaataaaagacaaagtgtattagagactagagataaaaaaacatacgagcatcaatcaacaaacatcagaaacacaacatgttgttattttgaaaagaagatagatcaataccaaaagcacttcaaacagagataaatgcatacgaagcaattgagaattattacctaaaacccgactatgagttttatagtgcttcaacgttgctactcctgttgagttccaaatttccaaactctaaaaattatttaaagaacaaaatttcagtagctgaaagccaacaaagctacaagtataataaagacataaagtagaaccaacctttctccagctcatcttgcgtctcaaagtcataatatacatgtggattactcatagcagcttgctcctttaacttcatctctaacttcatccattggtctgtgcacatcaaaacctcaatggtgtaatgactaagacaacttctacttggttccaaaaggcgtccacttgtactaaaggcagattctgatgcaactgatgacacttgcatagcaaatacgtcttttgctatttctgataatacagggaacttaccagaattgcgcctccaccaatccatgacatcattctcattaccaaacatattactcttcggattctcagccttttctttcaaatacatgtctaatttatcctttgcatcttgaactcctatcatatcaaccatctcatcatacacagactgcattctttcaaatccacgaccaacagaaacatctggaatttccatctcctcctcaccatatccagcagcttgttcatggccagcagaattgctcccaacaatattagaagatgatgcatcagtagagacttggggataaagtctactatactccttaaaaagactagtcaacacagaatatgtagaatctaacatctccttagaatctacactgtcttttccatagaccctctcaaagcaaagcttagcaaattggagtttcttcgttggatcaaagacagtagccacaatcaaattgatgcttttaaaatcctcccaatacttatcaaatttaagtttcatatcctcagcctagtcctcattttcatatctggatcttgagatgcaattatcagattcttctctattgtaactatttctccataacacttatatgagttcaccgatgtagaagcatagacaattaaagtagcagtatagaagaagttcagaaacgttaccattctatcaatagccacccaatccaaataagtaggaggaccaacacttttcttgcctttatccatctctacgaagtagttgttgtagatcttatcttcagcttccatccgatcgaaagcgtccctgaatctttgtgcttttgtaagcatcagatatgttgaattccacctggtttcgacatctagaggcaagcttcctctttgcaaattagctgaatcaaccctatcatcaaatgagattaatctcttggtagaggatctcacaaaagtcactccattccgaattgcttccacattctcattgatctcctttaatccatctttgactatcaaattgatgatgtgagcacaacacctcatatgcatcatctcaacatctaatatgaatgcattgttcccattctttgccctaaaatctctttcaaatttcatgagagcagatgtattggttgttgcgttgtcaacagtgatagtgaagatcttctctataccccagtcagcaaagcaagaattcaaaacagctgcaattgttgcccctttatgatccggcacatacttaaaccctataatcagcttccttaaatgccaatttgcgtcaacaaaatgacaagttatgaccatataacttgtaccagttacgctagccacccatatatcagttgtgagagagacccactacttacttttacgcatccattttctcatttcatctttcctcttcacaaacatctcatagatgtctcttgttgcagttcttctagaatgaggctggtacaagttgcatttggtggttaaatgtctccaagctatactttcaatgaatgaaagtggcatctgtcctaatacaagcatttcattggttgcttctctaaacacttccgaagagaccttaacagccatcagatgactaccatccggattaagaattttatgggttttactgtcttgccaagtcttgaattgcttacacgccaaagtcagatgcttattcaaattttaagtccctgatgatgtaggacattagagagtcttcccacaatagtgacatgtgcatttgttagcattatcctttagtatggtaaaatgctcccatacataagacctttctccatcttctttgctctttcctttgcctttacccttagaagaactttttctcgaagctttggttgaagcttttcttttcttttgattatcatgactcctcaaatcatcttctgtatcttgagattctgcactcttatccacatcaacatcttcttcgggtaatgatgatgaacccatctaataagaggagtcaaaaacaaaaataacaatcaaataaggaaatcaaacaatagagaagattaaaaaaaaaattgagaatcaacaaaaccaaagattatggcatcagatatgataataccaaagaggctatcataggcatctatgttttcaacgaaatactagagagtagacaatagagattggagactatctaatcgataaaacgtctaaaccaaacaaccatcaaatcgacaagaaccgacggattgagaagtagaaagtaaagattagaaaaatacttatagcggaccgatttcttgatgaggatgaagctctggtgaattccagattgtcacttgaaatagagaagagacttagtgtttttactttttagagcaaagagagggaattaggttaacaaaaatggggggaatcatgttaacaaaaatggggggaaataagataacaaaattggggggaatcgtcgaagaggagaagaagaaccgatgaatagaggagatgactaatgtgtaattagagtagcttagggttttaataggatgatttattttcgggttagtaaagtaaccattcggttttcggttaatactcgaaccgcagtaatacccgaaatctgaagatatgagaaccgatcgggttttactcaggacaaagaatcgaaccgagtagcaaaattttgattcggtttggttcggatttttggttccggttattatgcccaggaatattaaaaactataaatatgacctaaaacgtgataggccttctttagaaagaagggaaagttctgggccaaatttggaaatcttcaaaacatcaataagttgcgcaattgaattgccgttaggtattggtgtcgactcgacactaggggttgtgtcgatcgacacctacgttaatttttgtctcttgattgcttttgcagcttaagttgtctgttttgctctagaatgctccataatctccaaatgcatcccaaacatgtaaagacctgaaaaagactagaaaagactctacaaataacaaaaggactccaaaaccggtaaaaattcggttatatcacttgggttcgtttcaaagagtatcaacgtgatttcccgcatcatggcttcagtgaggtacaacttctaggtacctttttcagaggagttgattggagataccagatggctctatatatatgcagcgagcaatggtaactttaacaccagatatccggctgatgcaactgccttgattgggaaccttgcatgcagcaacagtaacaagaatgccgattttgagaggaagaagattgttggagctgtttcagaaaatccgatggcagaggtacatgctaagttggattcagttcataacttgcttacacggaataagcatgtccactttgcagctgaagcagagaccattgagcatgagcttgagtcagaagagggagtctcttacatagatggacaaggctacaagaagtttgggcagccacagggtaactgatatcacggctttttagcccattttagctattgttttcttatgtttcagagagcatttggtgccattctagattaagaggagaaacacgtattctaggtgccaagaaggtttttagagtttgaagctaaaagtatcaaaaggcgatcattcaagtacttcagaattttaacatccggccaaggtcttccccatcacggaaaaaagatattttggtatgaatggaaatctagaagagtcaagattaacgtcaaagtcaaatcaaagcaatccatgaagccgtttggaagatatgacccgaagagtaaagacatgtcaagaaccagccgtttagaaataataaatccaaaaagtatccggccaaagagacttgaaccagggcagctccgggaagctcaccaccaaccactagggcacgcccaagtccttctctctttgcgccaccgtcattaggctccttccctaaagcccactactcggcccgatcacttacttacctggcggaatgacgttcttacccctaaacataattcctggccctcaagtataaatacttgttctaagccctaaccctaggtgtgccttcatcgctgccaactcgccgccgcacctcttgaagcttgaagatcaccatttctctctttctctttctcgttttgtgtaagactctttaaggtagagctttgcctcttgtattctacattcaaagaagtaatctttaaatcctttctatgttttattcatctttttgttatggtttacccaacccaacttttgattagatcctttgccatgagcgagtcgatctctagttgggtttgagggggtttcaaaggggaattcattgggacttttagatctaaactctaggttggcggtttctatggctttatttgatcgtttacactattctttctagttgagtttaatcttaatgcatgtatgtccggaacgccacctagtacatgatcttaggtattttatacttggcagaatcttgtataattgcctgaactagctcaactgaataaagaacaataaccgttgcacgcccgtcgagtgatagggacttatggactagaatcaaatttgaacttaatgctttgaccttgtattttgaaattatgttagcacctactagccgttagggcaactgtgtacgcaagatataggtgagaatagccaggtttcacctactagctgttagggttagctggtcttgatagagtttcgtatgtccgagaattcgaaagtaaacaaacctaatcatgttatcacctagattgagatctataccctattgtttgaacaatgacattcggagaaacccccgaaaacctaacgcttctctcttattgcttatcgtttagtttagttacttgtcttttattttggttactcattgcatacaacaaccccctctctttttatttggtcctagtttaactctcttcttaaggatttatctgaactacttctctccttgtggattcgatcctaaagtactactccgatatactatgcacttgcagtagttgtgtggtcttttaggtaaaagcctgaggcgaaataaaatacgcatcagtaacttcagtggcaacatgtttacagggaaccagagttctacatgctacactccacaacctgcattccaaaagacctttcctcagagcaactttcagaagacttatggtaattcagcttgagcagattcttgagggacagtcaaagcttgttgttgagtttaatggcaagtttgatgctatctacacagaccttaatgggaagatcaaaaatttgagctctcatatgaagaagctagatgtataggtggctcaaactgcacaatctattaagaaaagaaggttttcttcctcgaactcctgatgctaaccctaggaagagctgtaatgccatcttggtcagagatggagacaatgtgtgggaggaattagacactgaagacgagttaaagctcgcagctacagagttggtgtcgaccgacacctaccattgtcgatcgacacctaccattgtcgatcgacacctaccattgtcgatcgacacctaccattgtcgatcgacacctaccattgtcgatcgacaccctatggtacacttttctctgaaatgattccttagaaagatgacgatcgacacacacctggttttgatcgacactgggtccgcactgcgccatatgaggttcaaatcccaatgcagccagagtcaatctacactcctcatgttctttatccaaggaagcgtcgttccaagcaagagattcatgatgccaagtgcaaggcaatcatggaaaagatcatcacttcatttcctaaggatgtttgagagaactcttatgcccaactcaccaggtatgtaaagcgtcttgttgacaatggaattagatccaaggaagctaatctgctgacaagatacatcagctccaaaatgctgacgaggattaaaaaagacaagccaaagagagttgacattgctgagtacatctgtactatcagcccaagtcaaagcactgagaagctccccgatccaggtagctttgttattgattgttctatctccacatgtagattctgcttttccctttgtgatcttggatcaagtatcaacctcatggctaaatctgttgctgagagattgggcatgaataactacaggccgataagaataccaaagagaaaaaaatatataatggtcgatttatcatggtataatacaggaatgagtatagaaagatcttgaatgttagcttgttttatgagacccaacgatgaaactctggtggatacagttgtggaacttaggtatgaaatctaaaatgttgtaagcttgcagagaagtacatgttggttaggatttgattagacttgctaagcatatagatttagtttgaatgatcatggcaataggttagagaatgttgggagttcctttgtttttaaaacctcttccacagattcagtttttgtgttttgcttgagggcaagcaaaagctaagtctaggagagttgatataaccctatttttactatttttactatgttttaaatataagattttgagtctttttgttattctagagtctttttagagtcttttcaggtattctatggagagggacaacaatggagataaggagacattttggagcaaaagttaaggaaaaagaagctaaagacgatttctctttcagatcctgtcaagagtgtcgatcgacacactcttgatgccgatcgacaccggtttaagcctagagaagtccatgatgcttttaagtttacaaaagttgaaatttaccccaaaagacttccctttttgcattattagtctttgaacgtttattaggtcatatatatagttttagaggtcattgtttagacctatcaagctttttatcaagttttctttcagagacataagctattcatcccctgttttcagagattcattaagatttcaataaagtgaagagatcctttctaactcttatctttattgtcgtgctcatgctttcttactcaattatgttgcttgtttcaatctccatgtatgagtagtttgcttgttagggttagggtttctcattagggattcatatggtttagtagatcgcccctttgctaggttatctgtagaattcttcatctttaattgttaggttaatgctagttctagagtaattaactagaacttgaatctagacaatagatatacccaccatagacatctgtagttggatctattatttgatgagcatggtttataggtgtgtaataagaatcggcctatttactatggtgaactgaattgaactcgtttataatgcatgtctaagtataagatttatcggcttctctggttattcttagctataggcatagatatttttgcagaaccccatcggttattccaaaatttgagtttgagtttaacaatggttcgataacaacctaactatcattagatctactaaccaataatttttttaaaataccctaaacctaactctttattatattgtttaagacaatttgaactatatcaactataaataaactatatccctaaatttgctcactctaaaacttccacgatcaagcaaaaattatggcatgactttataactgatttatctcctatttaactctaattaatttattttcttttctattggatctatctattcatctccatccttttttttgttgtggttgccatagaaacctacggttaagtttctcttccgtataatgcttaaattttattcattttctctttttactcatattaattctgattttatcaattcagttagaagatccttccatgactcatgtttcccatgttgtggaggttatgatgccgaagggagcaagtatacatgaaagaagtcgagaataatgagagcagaactataacttgacgtacaagaggaaaagatggtgggaattaggaaaaaaggtacgatccttcactgctaaaaaattggaagaaacagaactatgacaaaacaatttcgtgctaaaaaatttagtctatcaaaaactgttcgtcaaaatgatggatagaaagcttcctttttttaatttctgttttggacttaaaattagttgacgaaataaattaataatgcattttttgtttgtcatgtctgtaattttgcagagaacacggttaagaaggtgactttaaaaaccgtgaaggagcattgtatcatgccaagaagaaggcttacattcaaaataaatgcaagaaaataagaacaaaaaagtctattgttaatagaagatatcatttgtcatacagttcatgtctacgcattctttaatataatctcaaaatttccacagtccaaagatatcatataagaaatgacatttttcactcgaagcaactgtaacaacgccaaaggtgacgtttaaaatcacaattactgtagagaattcagaggctcaaaagactgtaactttaagagcttgaacctgtgacaaccaagactgaagtagtttgatgcaaaacggacttgttaaagagagaaagcttttgttgctgcaagaaaatagagcagagagatattagagatgagagtagagaagggagcacacacacgtttaacgagttcagcagtgtcaatgttacactacctacatctcgccgagaccttgtctcggaatccactagaaatgaacaaagatacaagagatattacaatgtgaaatcacctacttgctaatacacaaatactctgtatcacaccattgttcttaatgagaaaacccaccccaaagctaaagctttctatgtgttcttctctcaccctctttctacattgtatgctgctacaatctcactcacgtccccaactacttaaatacaaggagacatctttaaacctagtgcacaagatgaaaaatacacaaaggctcctctttgtggtcccaaaagtaacttaacccaatctcaacttgactagagttaaaaccttagttactttttatctttcttgattgtaaacaagttctcatctttacaattaccataactcaaaaggtacatataactttgtactaatttttattgctctttaattctcatattctagaacttttctactaattgtaaattttattcctttgttgtaagcttataaattaagttaactattaagtattgttcaaattcagaaaattaaaagtgaagtttagagttttcattagggaaaaatgtcaaaacaatcacgaattttcaaatttgggacgatttaatcttgaacttcacggaagacaaataaatcataaagtttttgttcactttcgaaataaatgacaaagtttttgttgacttgtcatttgagtcatgtcgttaagtaggttgacataatttttttacggcgttaatgtctcgtttatctcctctgttagaacaaaacaacgttgtttattgcagctcgttttctctattgaaacaaatttaaaccttaaattcccaaatcgattttattatctgcgattttgaggtcaatgtgggtatgtgattttgagataatgaaatcgatttaggggtttatatttatttcaagagacaaaacaacgtcgttttaaaaaaaaaagaaaaaaaaaaaaaaaaaaaacaacgtcgttttgtcttttcaataaacgacgttgttttgttctaatagattaaataaacaagacattaacgccgtaaaaaaattccgttaacctatttaacgttatgactcaaatggcaagtcaacaaaaattttgtcttttatttcgaaaatcaacaaaaactttacgatttatttgccttccgtgaagttcaagattaaatagtcctaaatttgaaagttcgtgattttgattttttcattcgaaaacgtttctctaatttgtttgtcatatatatgcttctaagttaaactagtctttctctaaattagtttatcacgttaaaaaattaataaaaattattttcagaattacttttgagcaaaataaatatatttatgagattcactatcaatattgctaggttacaggactaaaacctaaaacctaaagacttcgtcgtcggcgatggcaagtggatctcttcggttttgagatgttttgtctctcgattgagtttcctattctcctaaggagatatggattgtttatttcggatcttggttgtcagatttttttggttatattaaaggaggtttttggaatatttgggattcaaagagattgttatctttggttggaaaatcgcttctttgggtcgtgttatgtggaatctccggcaggatttctgaggagaaatcaaggattgcggaactgtgatgttattcttggaattattggtgggtatcagatcaaatcaacaacagctggttcattggagatcgatcgagtttttgtatccagaagctttattggaagttcagatcatttcaaaagatctttattccctgcggttaaggataagctatatcaattagaatcaagggttttaatggtaaacatgttttgtaaggtaggaggatctgtaagatcttggagtgaggaagcaagaaagtagtgttagtgcaccctctatcaggacaaaccagaaggagtgttgtttgctggaacaagctggaagctgtttcagaagactaaagtgaagatcaagtaattgatgctaacgtggatatgccgccaaataaacgaatgacgtggagatcacaacaggatgagttcagtttggagaggagatattcacgcgaagatttggagtgatccaagatctcgaaggctaacctagaagaccaaagacctcgatggtataaatagaggtgctaaggttcttgttagactttgccgtgattgtgagtgaaaaagctagtgcaacgcttttcattgttagagactaaggtttagtctgattggaattctagagagatgaaagagtgtgttcttgtgatctgctcttgtgtgtttagggaaatctcaagtgacaagctaaagtagtttagatcttgtgtaaaaccaattaaggtagttgtaaacttcttaatcagatttctaataaagtgatactcagtggttctgagtttggggaatacgattcttggttcatgttgaatttcatttggtatcagagcgggcatctgaaccaagttgtacttaacaacaggtgcagatcctgcggagaggatggactaccccgaagagttcgttgcggtcggtaaagcaatcatgttggaaaaaggaaattacggacactggaaagtgaagatgagagctctcatacgtggtctaggaaaggaagcctgtattgctacgagcattggatggaaggctccggtcatcaagggagaagatggagaagatgtgctaaaaactgaagatcaatggaatgatgcagaagaggcaaaggccatagctaattcaagggcactgtctttgatattcaactccgtgaatcaaaatcaattcaaacggattcaaaactgttaatcagctaaagaagcatgggataaacttgctaaagcatatgaagggacaagtagtgtcaaaagatccagaatcgacatgttagcatctcagtttgaaaatctcactatggaagaaacagagaacattgaggagttcagtgggaaaatcagtgccatagcgagtgaagcacacaatctaggaaagaaatacaaagataagaaactggtcaagaaactgttgaggtgtctcccatcaaggtttgaaagtaagagaacgaccatgggaacgtcgttggacactgactcaatcgattttgaagaagtagtgggaatgctccaagcatatgaattagaaatcacttccggaaagggaggttactccaaaggacttgctttagctgcatcggcaaagaagaatgagatacaggaattgaaggatacaatgagcatgggataaatcgattttgaagaagtagtgggaatgctccaagcatatgaattagaaatcacttccggaaagggaggttactccaaaggacttgctttagctgcatcggcaaagaagaatgagatacaggaattgaaggatacaatgagcatgatggcaaaagacttcagtagagcaatgaggagagttgagaagaaaggattcggaagaaatcagggaactgatagatatcgagaccgaagctcaaaaagggatgagattcaatgtcatgaatgtcaaggatacggacatattaaagctgaatgtccctctttaaagagaaaagatctcaagtcctctgagtgtaagggtcttggacacactaagttcgactgtgttggatcaaagtctaagccagatggatcttgtagttctgaaagtgaaagtgactcaaatgatggagactcggaagattatataaaaggtttcgtgtcttttgtaggaatcattgaagaaaaagatgaaagttcatacagtgatagcagatggtgaggatgaggacaactcagctgatgaggattctgacatcgaaaaggacgttaacatcaatgaagagttaaggaaactgtatgacagctggttgatgctgagtaaagagaaagttgcctggctggaagagaagctaagagttcaagaactgacaacaaaactgaaaggagagttaactgctgcaaatcagaagaactctgagctgactctgaaatgcagtgtggctgaagagaaaaacagagaactttctcaagagcttagtgacactcgcaagaagatccacatgctgaacagtggaacaaaagatttggataatatacttgctgctggaagagtgggaaaatcaaattttggtttagtatacaatggtgttggatcaggtacaaagacgaattttgtacgaagcgaagctgctgctccaacaaaaagtcaaacaggttttcgaagcaactatgatgctgttccagcaagacgtgtgtaccagaatcacgatcactatcattcccggagaactgtgacaggttacgaatgttactactgtggaagacatggtcatattcagagatattgctacaggtatgctgctaggttgaataagctaaagagacaaggaaaactatatccatatcaaggaagaacctccaagatgtatgtcagaagggaggatctctattgtcatgtagcatacacctcgattgaagaaggaataaagaaaaaatggcattttgacagtggagcatccagacatatgacaggaagtcaatgcaatcttgaaaattacacctctgtcaaggaaagtaaagttacttttggaggtggggataaaggaaaaatcaagggaaaaggtgatttgactaaagcagaaaagcctcagcttacaaatgtgtactttgtcgaagggcttactgcaaatctgattagtgtgagtcagctatgtgatgaagggctgactgtgagtttcaatagtgtaaaatgctgggctacaaacgagaagaaccaaaacactctcactggagttagaactgggaacaattgctacatgtgggaagaacctaaagagtgtcttagagctgaaaaagaggatccagtggtatggcatcaacgtcttggtcacatgaatgcgaggagcatgtcagaaatagtgagcaaggaaatggttagaggagtacaagagctgaaacacatagagaaaattgtgtacgatgcctacaatcaaggtaaacaaattagagtccaacacaagagagttgtaggtgttgttgagagaaagaaccagacttttcaagagatggccagagccatgattcatggacatggagttcctgaaaaaatctggacagaggctattagtacagcatgttatgtgatcaatcatgttaatgtgaggattggaggcacattcgacaagttggtcaaagcgtttgtgaagacaatgacaactgagttcaggttgagtatggtaggcgaacgtaagtactttctggggttgcaaatcaatcagattgatgaagggattgctatctcgcaaagcacctatgctcagaacctggtgaaacgcttcgatatgtgttccagcaatccagttaaaactcttatgagcactaccaacctctgcagctgctgtactaaatttctttggatgaaacacatgggtttggattaaggtatgtctttttctgaccctttacttgttaaatgtgataatgaaagtgctattgtcatatctaagaattcggtacaacactcaatcactaaacacatagctataagacatcattttgttagagaattagttgaagaaaaacaaattaccgtagaacatgtgcctactgaaattcaacttgctgatattttcattaagcctttggacttgaacatgtttgtgaacttgcaaaagtcccttggtattggtgaagtctaactatcttcttgatgagtgtttgtgctgaaacagggttggttgtacagtgagaagcaagttttcatatctattttacaaagtgtcataaccggttttcaaatcttctgctgtaaaaagttcaccaagagaaagagctacccttcatggttcggagatgcaaagtcagtaaagtgtgtgacatacatagtgtgtagagcattaaggaagggatgaaatgcagaaaggggcagaaagaagcatttcatttcataagatgaagcatgagcttatctaagacacgggggacaaaggagaaatcttgtcactaacccgatgggaacaaaggaaaaatcttgttcacctacactttggagagaagggatgtcaaacaaaaatattgagagaacaaataagaaagagcatcactacactctgcaacaagacaagagaaataaataaaaaaataaataaaaaaaaggggggtgcaaaaacaagttctctcactgacatctcgtctctctgcagaaaggagcagtaagaagcaacaataagttctgaatacaaaagatcagacttgtaatttatcaatagcctgaatgttgctgcacagtctgtcacactccttgttaaaaggactcgctaacactctgagatatgacggtgtgaagactactcttggagaatcaacattctcttttgtgttgtgtcagcagattatgttctgaattttttgaatcaagttacaatgagcttagtattgtacaatcacctttggggcagttctggacctcagtatgagggagagatggttatcactttgctgatactaatggggacttgttctatgtgattcaagatggcttcagaaaaaatgagttgagcttcagaggtatttaaatttgatttttaatcgatttcggttttatgttaagtggtgtcaatttcggcttgatgtgtttttatctgattttaaccggaccaaaaaccggttagcacttatgttgtgttttgagttgattggtttgcataaaacaaaatcgaaggcaaaaattgaaggggaaatcaaaaaggttaccaccaaaaccctaaatctctaaacaatggcgagaacccgcggcggctcccggcgtccgacaagagctccggctgaaactcgaaccgtggcgagaacacgcagcgaagcccggcgcgctgctccgactggacctccggctacaactccaatcgtggggagaacacgcagcgatgcccggcgtatgcgaaagatgtttaatccagagtatgtgtttggcacatctttacttgtagatttgagatatctctctaccttgctgacgacaataacgacacatatggaaggtatggtgtcttggtcttgtgctcagtgtctggtttaattggtagagagtgtctagatagagtttttgatcaattgtgtcatgcaagcagggggagattatggactggtccctgagaactctaattcatttgtaagctctctagatgttgataagctctctagatgttgataacgaagaaggctttgaagtgagaactctaattcatttgtaagctctctagatgttgataagctctctagatgttgataacgaagaaggctttaaagatactcaatcttcttagtgtgtttagatctagttgtgggggagtttaggattaagggggagtttttaagctgtgtttgttaatcatgtccttttggtttagtaggtttttgtttctaagtactggataatgtgttttgaatcttaaaaacttatttatgcaatctatgatgagaccctctattggttatttctggtgcttattatctctatgacttgatgtgtgcttgtgagttttctttgaggggtttcttgcaggattgcttgaattgacaaattgtatcaaaaagggggagattgttagtgcaccctctgtcaggacaaaccagaaggagtgctgtttgctggaacaagctggaagctgtttcagaagactaaagtgaagatcaagtaattgatgctgacgtggatatgccgccaaataaacgaatgacgtggagatcacaacaggatgagttcagtttggagaggagatatttacgcgaagatttggagtgatccaagatctcgaaggctaacctagaagaccaaagacctcgatggtataaatagaggtgctaaggttcttgttagactttgccgtgattgtgagtgaaaaagctagtgcaacgcttttcattgttagagactaaggtttagtctgattggaattctagagagatgaaagagtgtgttcttgtgatctgctcttgtgtgtttagggaaatctcaaatgacaagctaaagtagtttagatcttgtgtaaaaccaattaaggtagttgtaaacttcttaatcagatttctaataaagtgatactcagtggttctgagtttggggaatacgattcttggttcatccggaatttcaagtagaaattaagggctacggttgttagtctttctcatctcatcatcttctcttttttcaagacaaagtgggttttgttcttgggttatctagctttttcgagttactgtggggtgctattttttgggtacgtttcgtagggttttggggtgtacttggaagcgggcaagagatgtctcaaattgttttggcggggcagagctcaagtgcagtcattgtgaaacctctaaagcttaagatcaaagttccacgctttgataattcggcgttaattcaggggtactctaagactttaatcaggaggtgcatgaatcatatgatgcaggacatgaagtctgttttgttcatggtgccaaggatctggaaactagaggatagagtagacgaggcaggtatcggtttaggtcgattccagtttgattttgaccatgagaaggatattcaggagatcatgaagatggaacatttccactttgatcattggatgttttcttttgtctgatgggcgccgatggtggatccaagatatccgttttacatcactttttgggttcgtgttatcggggttcctttacggaatcggacggttgcgattttaagcgttataaaacattttgaacgactggtttagcggttaaaaattagtgcgtttgcggaagcttaatgactggttaacggatttacgttttgggtaggaaaattaagggtttatgtttttggcggaaattacggatttacgtttttggcggaaaattacggatttacgtttttggcgggaaaattacgggtttacttttttggtgaaaatttacgggtttacgtttttggcgaaaaaattaagagtttatattttttgtcgggaaaattacgagtttatgataatgttatcatgatgatagctatcaggactttggtatgttgatctgatgatgatggtggtggtattatgatattatgagagggtaatgatgatgatgatgatatgtgttgataatgagtaaattgatgggttgataaagttatttggaaaaagatttattatattcaatcggtttagaaattttgttttgcgggtttcgccctagttatacattaaagattgttttgcgtgttatgtcgaaaaacaagtttttgaatctataacaaacaagacagtgataaaacgtttccaaaatatgagtgagcgtaagatacatccttaagaattgtgttgaattttttttcgttgttgttttatagtgacctaaaactttatttcgatgttatgtattgctatattttttatttggttgtaaaattttgaagatacttatttaaaacccatcaaacaatttttctatatttgtcattggacaaataagtttttctaaatattttagtttcaaaaacaaactaatatgatatttagacccaaatcaggttttccaagatattttactcttcagaacgaatcgatctttaaactatctccaatagttatctctataatttgtataagataaagttatcttaatgttatttcggatattttagttttctttagacatatgccggatcggatcatgtataataatgtcattatctccataaccggattagatgaccaaattgatccattttcatttctcccaatatttattacatttttttttttttgatgtaatatttgtaataaatatttaaataaataattaccactgaatcgaagaagctttgcttagatatcatcgaacttgctccaactgctctatctcaggatctctctcagacacagtttcttccatccatggcgtctctttcttctacctctctctctctccccaagaattctcaccaactccatccttcatctggtaataacttcttcaatctctccaatcttcgtgctttatagattttcaatatcctccattttcgagctcatgagattcgtacagtcatgttacgatttctaatttagcatctcacaaaacccaatttaattgtgtattggacgatcttgattcctttatgttgttgggtcctttctttttacttgtgctgatttgtcaaaacaatgcaaaattagagcttgaagctgttttgttagaaaactgttcaacttgttatgtataagtcactgattgttgtttgttcttgttaccttctaggtttttctctgaatccaaatgctcgttgtgtcagtgtttcatttggactgaatcactccaacaaacttcatatttctgctcctagaaccaaaaggatcctaaccattcaatctgcatacaggtatataactttatcttatacaaattattgtttgagatgtcgaaaactgtggttcttgttactccttaatgttttgtgagcatcgtaacattttttagtatactttagttttctattggcaacttatgtttacagagacagtttgcaatgtctaatagcatcaaaacttgcagagatgatgatggttcaggcagcacaggcctattcgtcggagggtttattttgggcggacttatagtcggtgccctcggatgtgtatatgcaccacaggtagtaatctgttacatggtttagtttgatcactcttagagcttgtattcgtttcaatcaagaagttcttgagtggactcgaggagctctgtaaccttctctgtttcactttgactcatcaatgtgtgatgttacttttgtgaattgtatcagatcagcaaggctatagctggagcagaccgaaaggatctcatgaggaagttgcctaaattcatatatgacgaggaaaaagctttggaggtaagttattgctaagcctcttgattcatattttatctcactttttgttgaatttacttatgaacaatgttgtctactgttaatgcagaaaacacgtaaggtactagctgagaaaattgctcagcttaactctgctatcgacgatgtctcctctcagctcaaatcagaagatactccgaatggtgcagctctaagcaccgatgaaatcgaggctacagcctgaaatcatctgtttttaggatttgaaattgaatcatgggagattacttactatgatcccaataattgttttcctttctgtgtaatgttgtacaacttttcgtctactatcttcaaatgactgctttcttccttcttctttttttctcgaaatcgcggtgttgaaggatatatcacagttatatgcgaaaccagacgttatgaagactatataatatcctgatgaaaactatatgacatgaaaagaaggattaaaaaaatgagtctcttgagaaacttgtgatcactggctcacagaatcttatccccatatgtatcttacctacataatagccacatattactttgcttcactttgaaccattggttggttttgatcaaaaccaaaggatgtgtgtatgtatgtatatattctaacgctcaaaactgatcactagcattcctagatttttccttcttgtgatcacttgcagctatggccacacatgcagctctcgccgtctcaagaatcccggtcacacagcgactgcagtctaagagtgccattcactctttccctgctcaatgctcctccaaggtatgaactccatctgactactacataccctctgtttatgtgtgtggtacagtttgttttattggtttctcttgttacttacttgcacagaggctagaagtcgctgaattctccggtctgcgtatgagtagtatcggtggggaagcatctttcttcgatgctgtagctgcacaaatcatccctaaggtaacttatttattgattgaatcagtaactgtattgttatcatgatttgtgaatatgtgatgagtttgtgaaatattaggctgtgacaacatcaactcctgttagaggagagacagtggcgaaactgaaagttgcgattaacggttttggaaggattggtaggaactttcttaggtgttggcatggtcgtaaagactctcctctcgaagttgttgtacttaacgacagtggtggtgtcaagaatgtaagtatgtaataaactttgtgaactcttcttgtggaacacatttttgacatttgatgaaatttgcaggcatcccacttgcttaagtatgactccatgcttggaaccttcaaggctgaagtgaaaattgtggacaatgaaactattagtgttgatggtaagctcatcaaagttgtctccaacagagaccctcttaagcttccatgggctgagctcggcattgacattgttatcgaggtgaaatttctaccgaaaactgcttattatgatggcaaatcgcgctacggaacttagttaatcgaaaactgtatatggttatgatcatcagggaacaggagtgtttgttgatgggccaggagcagggaagcatatccaagccggagcctcgaaagttatcatcactgcaccagccaaaggtgctgatatccctacctatgttatgggagtcaatgagcaagactatggtcacgatgtcgctaacattattaggtccgtttaaagttaaacctttgatctcattaaagcatgaacgagtttgagtattcatgcttcagttttggtctttctttgcagcaatgcatcttgcaccaccaactgtttggcaccttttgctaaagtcttggatgaagaatttggtacattttattttctctgcttcactacatgtttcaaaatgttttttttatagctcatacatgaactgaatcacaggaattgtcaaggggacaatgacaaccacacactcctacaccggagaccaagtaagattccatctttttgtctatctatccatgtagaaacctaacggaagagcttgcttgtattgtcaaaaaaataaatatgtttgaaatgaattgtttcagaggcttctagatgcatcacacagggacctaaggcgtgcaagagccgcagcactgaacatagtgcctaccagcacaggagcagccaaggcggtgtcattagtgttgccgcagctgaagggtaaacttaacggcattgcactccgtgtgccaacaccaaacgtctcagtggttgaccttgttataaacgttgagaagaaaggtttgacagcagaggatgtgaacgaggcctttagaaaagccgctaatggaccgatgaaaggcattttagacgtttgcgatgcgcctcttgtctctgttgacttcaggtgctctgatgtctctaccaccattgactcgtccctcactatggttatgggtgatgatatggtcaaggtggttgcttggtatgataacgagtggggttacaggtgagagagatataacacattacatgatatcattttatgttttaacctatgattgtttgtttatgttttgtgtttgcgtttgcgtgttcgtgttttagccaaagagtggtggatttggctcacctagtggctagcaagtggccgggagcggaagctgttggaagtggagatcctttggaggatttctgcaagacaaacccggctgatgaggaatgcaaagtctatgactgaacaactttgatcatttctttctttatttttcaccaaaacaatactttgtatcatgagttacttattcgaaatcgtactatgcatacttgtttttctcataagattttcttgtctgatgaacaactatatgttaagactgagagaattgtatttgagaaataaccattttatgctacatgttaaaacggaatttatttgagcaatgtatgacaaaagaaattgtttgatttggtttacaaataaagatgcatgagtgtgcaacaaaataatgaaacattcaatctagagaaaagagatttgatattttcaacttgatttctttattgtatgatggttggaattgatctttttgaatttcataatacatatgtaatttttttatattaaaaatgaaaaataaagaaagaataaattaaaatcaatgtaaggtattataccatatagtttttaaatattaaaaatttagaaccaaactcttatgacgatttctcaattgaatttttaacttatgcaataacaacaacaacaaaaaacaacaaaaaaaatggtagcaggctgatttttgaattgagtctacaaaacttttaatgatgtaggtgaaaaatgagaaaattgtacaaaatttgttaattcaatcattttcattgcagctcttcaaccaactcagcctttttttctcaagcttgtttctttattagactcgagttccatcttttgttcagctagaaatagcttctctggttattgaacctatcagagcaaggaatagtcgtacacattctggaagtgaatcaatcaatcattatagtggtgattttttaatcaatgctttgggcaaactgtgcaaaaaaataacaaatataaagaaaaaactttggtgtatgccgatatattaaataacagataagtactccgtctctaacgaagaaaaatatgttcatacgatagcggccttggccaaactaaatataactagtatcctaactaatatgagttgtctcctattagaactaaatttatagttgtattctattactgtttatacagagtataataacactctaatatttaaaatagtaaatcatattatcctaaatttacgtatataagtaatttacaattaacataacacaaaacatcaataaaaatagataataaggacataaaataaattgaatctaaaaaaactaatattaatttatgttgatgtcaaatcctttaggctgtaaatgctttggtttatcttaatatattcgaatttctatatagattctaaagtatatactaactccaaagtattttacataaaataagtttatttatatatgttattttgagatagtgttatctaaaattcagaggattacataataaagatgcaataatcatcaaaaactataaacaccgtaactgtaaaagttgaatcatactgaacctaactggaaaatgatgtaattcaactcacactgttcacatagtgcattttcctacttatagaaagtgttagtgtcttttccaacctcaaatcatcaaacattcaaaattactacacagattgtgtgttttaatttgaaactaaaattgacttcaacaattttatgtcaatcattaaaatcaatgactcagataacacaatggcaaggagaacaacatggtagaaattcgtttaaacaaaactacatccatcgttttttgttttgcttttgtaaccatgtaaaatataacaacgaagttaataagtaaaatcacaattcttgtatgtaaaattgacaaaatgatgacgcaaaaataaaagtaaaaatgacaaactttcaaatcccaaatataacaatttcacttatgtacacatataatatttatcgtatgtgaatatttttcataagaaaaaattataattatttatttaattgatgaggcggtagcaaagacaacaacgtagcggtaattcgtttaaacaaaactacattgttttttgtttttgtacctatgtaacatataacgacaaggattaattatgagaaaagaacaaaaaaataagaaaacttataagatccggaactttcgtatgtacttacgaaaaccggcattttcctgttttgaaataaacggttctacccttctatcattatgtaaagataaagaataatatattgtttcctttgttggtgatggcgacgatggtgagctccgataacggcgacgatggtgagctctgacaacagcgacgatggtgagcaccgataatggcgacgatggtgagctccgacaacggcgacgatggtaacctccgacaatgtcgatgagctccgttaatagtaacgacgatgtgggcagcggtgaatcgtgagagtgatggctcatcttctccctcctcttatcactcactgatttctccgatctttgtttttatccaatgatctcacaactctaaaaaaatagaggtgaatcgttatgtagtgctaaataatgcaatttaaaaataaatatttccagattacatctcaaaacatttatcactgtgagtttgatttttgtgcttgggttcccattcaaaaatctttagggttttagtttttgattgagtttcccttccaataaacaaaatatcgctaatggtgtagagtgaggacacaatgtaaagaatagctccgtttcgaatacttaaattgcatatctgcttgaaatctgaaattcttcttctttactagtcatcttcttctttttcatttgcaagatgattttatttcgtttaattctttgcttgggtttcataaatattatcatccttaggatttatttatcttgaatcgatgggtgtttgtaatagaatggatattttagggtataagatttctaatttttgttaaaagatttggattgaaaagaagaaggacagggaagatgatgatgaaagaagagggtgaaaattttcaaggtaaaatagtcaaatcatcatattaaaaatgctctttttcaaatcacatacggaaaagcctcaaaatcaaagtttttgtcaaaaaagtacatgttttcacaataacccttaacgacaaagttactaggtcaaatcacaattagtgtatgtaaaaatgacatattgttcacgcaaaaaagaaatgacagactgttaagtatcaaatataacaatttcactgtacacatataacatttatggtatgtagaaaaacttttataagaaagaaatctaatcatttattttattgttaaaatctttatgtgaaaaaaatctaatcatatatttaattgatgacgctgtgacaaagtgaacaacgtggtggtatttcgtttaaacaatgatctacatccctttttggctcttggacccatgtaacttataaagaaaaaattacgggatcaaatcacaattattgtatgtaaaaatgacagactgtcaaacaccaaatattataatttcatttatttacacatagcatatatggtacgtagaaaaccttttataagaaaaaaatataatcatttattttattttatgtagaaaatcttttataagaaaaaaatataatcaatttttgttttatgtgcacataaaacatttattgtatgtagaaaatcttttacaaaatataattaattattgtatgtaaaatgacagttgtatagaaaccaaatctatataagatgcactaacctgatgatgaattgataatctatactccattctttggttgtgagtaaaaaaaaaaaagttagactttgcaaattctatatcttatcacaatggcaagtctatgactaatttctttatacaattcttacctcttagctcatactttcaaatctaattgttttttgtttctgtttcgtgtcaggcaagtaactgtgagaaaatgcttagcaaaattaagattcctctaccagatatgctcgtaagtttttgcccatcatttttaagtgaaaacaatacctaaagtttctgcaacatttggtattgttagtatttaaataatatttgtgtaacaataacattttgcatcactttttatcctttttgtaatcttagaatgcagttctagatttggattcttcagctgtgatcattgaccagattaaaaatctaatcaaaatctgttggagcaaggaagaaatggatcggttaagggtaatctttacaacaatattttcgtaattacgaatatctcaactggtcgtctgaactctaaagctaactcatgttgtgtttacagaattctgctggtggtgacaaggaagtgcttggaaagtgtgaagaggttttgcttcacttcttaaagccataaatgttatttattcatcatatgtgctttgatccctaactatgcaaatgttacagattttcggggaactaatgatggttccgcggatagaaccaaaattacgagtgtttgcttttaaggttgagtatccttccagggtgagtgacttaaaaatgtggatgcatacgataatcgctgctactaaagaggtatgcatagagacagacccggttcagttaattattgggctcagttttcaatagtttaaaaaaaaaaatgatgtatataaacagaattcaaattttttgagccttttctaatttgtttttaatacaaacgggtctaaattctgaagaaaaatgtcaaaattatattagaccctctttaactggagcagttgaacagcccaataactggacctgagggtgacatttttctgtgcatggtaatatatatagctatgtccatcttggtaattaagtaatcgtatttcatgtactagataacgggatctgtgaagttgtttcggattatgcaaacaagtttaacaatgcaagttctaagaggtatcatgtattgttgtattgatttccaatttttcataacttttaatattttgtagcatctatttgttgatgtagtaagtgggccttgtgttgtgtgttgcaggttctaatgtggagtgtggactggatagtcttgttaagttatgtgataatgtgtatttgatgcatgacttttgcaaggtaacaaatactcttgtgtaacatatggttaatgcggtaatttgcgtaagttgcttaacgtcttaactatcttcttacgggtttagcttgttggtgaaaaaatgccgaagctgctggattttggtaatgaccttgttcacttagaagctgcatcgagggtatgctttttgttgtgatataactcatggttgcttcttttgctctagttcccaactctcctttacttgtgctgaaaattacagattgaattggaaaccattactaataagatgcaagagttattcgacatcgaggaagaggtgaatgatgagttcctagcttcagaaaatgatggtgctaattttgtgggctaccgaaacgtaagccacatgaataaagagttaagaaaaggtctttgtagcatcttctaatccgatcttcatgtttttaggtggtgcatgattttctttgtacgattgacggcgacaagcagttgctaaatatcttatacgcagaagtggtaacctatataactctcggttagaccttgaaggacatgtatatcatgctcaaaacctatatttactttgtaactcacagggaggacttgtaaattcctacatagctgagtatccaagtggtgttcgcttcaaggaaggtaccatcacatctactgtctattgtactcatgtctacatttcgcggttctcatttctactctggctattctccctatctgcagcgaccaacatcctgacccgtttcgtggaaacgttctacaagtctcgcgaggagattgaaagacaagccgaggctgagaaggagatactggagaaaagaaaaatgaacatcaaacaaaatgggaacctctaaagaaccgtagctagtttcatcgacaacttctatgctgcttagatggaactgcaaactatctatcatctcttctctagtgcttatgtactagaaaatatttgaacttttttacaattcgaagttttaccttatcttcattgttctaataaaactatctgttcgtttttttttacctgcctacgcatccgtaccaaacattttacaaacaaaaatctctgtgacaatcccaaagattggctcgtctgaaccctaaataatatctgatgacaaaaaaaaaaaaaaaaaaaactgtgataatgtcaaatgaagcaaacatgtaaaaactagcatgaggaaaagctttatcaatgttaatcaacctaatgaattgttatctagtaattagaagtgatattacctgaagttatgcctcaaaatcaacattttaaaggcagaagcattattagatagatatcatccataaccataagacccacattcactgttaacttatcgatattagacagaaaactttcaacagcgaaatacaaaacaagagagagaaaactaaaagacactcatctacaactcaaaatgcgcaaaagaagcagttaaaaaaggcgttgtcacgccgcaagggttaagatttggtatttcatcctaggcctcgaacccttacatctccgactaacgccggtataagacggtttgctactactcccgagcccgtttagaaccagcttttctggttctggacgtaggaggcaacactttgtgtgggacatataagggaataggcaaatgaagtttactcccagaagccaaagcagggaacccaacagcagggattccaacaagagcacagcagactcctgcttcgacatcatggtagtattattgccattacccttttgcaaacagtaacgtagagactggttttcagcaacgaagcactcaagcatacgtcctagtctcaagcattctctttcgagatacttactcttcttctctaaatcttgtacatattccttcttcctctctctcgatctaaccgccgcatctctatttcttactctcctgaaccacaatcacatcccaattatcaaacctcagtttcttttcatagcataaaaggctttaacaatcttaagttaaccaaaatacacatacctatgtttgaacataatcagctcatgaatattaacacaagattaacaataattaaaggcaaccaaaatttaaacagtcatttacttaaatgattagttctcaatgttgttatcaaaacaataacacacttatagcaatctaaatgaaacaaaaatcaacatcactcataatcaatcaactcttcaacgtcacacatacataaacataataacatgaacatatcacaagatacgcaagcaaaatttaaacactcgtttctcaaatcttcactgttacacatacgtatctcctagttctcaatgttgttctcaaagcataacacacttttaacaatcttaatgaaaccaaaatcaacacaaacatacaaaatccatccataaaccctaacttttcaaacaagagtaaaattagatataccttcttcgttttttagccacagcatcatcgtctccttcttcgtcatcatcatcatgaatctcgctaccagaatcattagacttcttctcaacaaccaaatccgaattctccttcccggaatcatcagcggcggcgggagaatcgacggttagaactttatcagccgccaaatcaacggagccagaatcgctagttggataatcaacgagtagatccgctatgaaatctgaaaccgattgctgatccaattccacaaaactctcctcttgatgattctcatcgttcatcaattgattctcgatttctccgatccatgaatccggtgaagactgaagaaaatcctccgccggaagagaatcaattacgattgaaggatcgaaatcgaagaagaaatcttcatctccgagtaaatctatgcttccaaattcctccgccatggtcaaaaaaaaaaaaatatacaaagaagaaaaaaaaaagcgaatttaatttaagaaattggaagagagatgagttatataggaactgtgtttgagacttttctaaatttctttgcgaccaagtaaatgtgtagaaaaagagtcagcatgacacgtgttgattatggacgcgttttttgaatttttagccaatgatgtgatggagtgtactgtgttatagtgtttctgttagcagaggattattgtttttatgtgccgtcacacaaccaatgagaaggcttcaagctggaagaataggatcacagccgaacacgtgtactcagtgaagtgttcgtgtgattaataactcggttctaattcacttcttttctcttggtttgattttcttattttcggtacagttatgtaaaccagttagctatagtcaaaacgatgtacatgtagttgagatggacaatgagaccaaggagagcaaggcttctttgaccatttctcagaaatcaatcaaaattcttcagtccctttttctctttgtcaccgtcaacatcttccacgattgaatctttgttctccgagaggacttttcttccttcgtgaccatcttctagactttgaaagttatcaatttgttaattaaaatcatatattatattgtcaatttatgttacattctggattatcttccttattcaattttaaatgagtgattaatcttcattcaatctcacatgaatgaatttgtaaaattttcagttctctagcagatgagtgaactaattatatatgtgaaagttgatctactattttcatatgaatgtcacgttattatttaattattttctatgtgttcattcaataattaatgtaagatttacatttattattaattatttatctttaattgtatcaattctaaatttatttttgttattatatgtattttaaagaataaatatattttactattttcttcatactcatttaaggtttatttgctaatgttttgtagtcataacttaaaataggaatagatattactatagtgaattagctaatggtttggtagcttattatcattaatctctatctaaataatataatacagaggatgaggagtatacagagatccatcctcaaattcctgatgtttatatatttccaacattaacatctattaaattgttttacgatgaaaattatttcaagattgtgtgaataattacactttttcaaaaagtacttaaaaagtagtttaacattaaaagcagttgatgattatatatttttcaataaaatgttaaattatattttaaaaaaagtagataaagtgcaatttcaattagaaacgaatagaagacaagttttaaacaccaatagaaatattaaaaagctagatgatgttagttttaacttctggacaaaaaccaaatttggaggtcgtatctcttgtccccaagaagtctgattgatgagatttgattttggacttgcttatcaaccgaacttgtcaataatagcattagtaattataattttagtaacacattatttacattaattataattttaggacaattgtattaacctgacttgtgatctaatgacgtggttcataaagtcacttatcgaaagttaatagtgtatattttctatgatatagttcttttataatgctaattaaatacctatgaagaaatataaggattgcaaattttgtaattaaactaatagagaggactctaacaaagctatttaactacgtaaagcatatatttccttttgtatattacttttttgtttgtatgtaagcgggaatacttaccacatgtactacaattccttgttcaccaaacttcaaataacttccccaacgtcctaagtaacatctttaaaatttgaagaacatgatagcgagggaaactaaattcaacgtgaatttattttacttggttttactctacttttgttactaccaaggtgaatttgatttaaacctagttcaaagtcacttttttctagcctagctcaaattatataaattgtgcaatgttgtaattgtcctagtctaattatcatcacgttttttaaattttagtattgatttcacatgtcttaattttaaattttatttgatgatatattatttgacatagtataaatttctttttaacacgcgttaaaagcaataattttcttaaaaatatttaaccaaatttagcttgtattatacaaaaataaaatgagtaatatcactacctaactatactttaggtttttattatcaaaatttatatatgacattttattatcaaaatctatatatgacattttgtacatatagtggttcatttctcacacaagttcttttaaatttattttaaatttagtatagatttcacgtaacggttttaagaagatattcctattttgtttgactatattatttgatataatatcactttctttttgacacgcgtcaaaaataataatttccattaaaatcatttgaccacttttaactcttgttggattatctaccaaatataattgatgttatatagctattttatatcaaagtcattttttggaaaaacaggggcttttagttaaataaaaaaactagaggacctataagtaaaaatattataatatataataacataaaaagataagtaattaacatgagtactatgaaaaaaaatcacacaagcaataagaattagtaaatcatttgtcaatcatggtattaataacacattatttacataaattttatttttcttatatctaacacgcgtcagaaaagataactgttgtcaatatatttattttactaattttaacaaataatttattatctaccaaataaaatgacaacaaaataaaaatctagatctaaatacagcaaaccaaataaaaccaaagcaaaattgatgagaaaaaatgctctttttcacaaaactagggggttttgagattataaaataaataaagagtctaaatgtaaagttattataacaatatggaagaaaatataaataaaaataagtaacaaaaagtaaaaaaggccgaccttttcagtgtcttataaatttctccatcgtcttcttcttcttcttcttcttcgtcttctctctgtaaacccccacacaaacctgtggccgctatattctccattttctcagtaaccatctctgtttttttctctgtttctcagattaagtttcgtgtgtcaaacagatcaaaacccaaacaatggttattcctctgtttttttcagaatttttcaatcgatgttattttatagaaattgattcatgggtctgtgttattttcaggtgagttccattgtaaaaatggagaacgacgacgtaatgactccgccatggctaacaccaatgcttcgagctgattacttcgtgacttgttcgattcattcacaatcgagtaaaagtgaatgtaatctgttttgtttggattgttcaggcaatgccttttgttcttcttgtctcgctcatcacagaacccatcgtgttatccaggtttggttttcaatttttcattacccatctatctctcaggaattttgtcgaacacgtttgtttaatgaacctaattctatgttttttttttgttgttgttacagattcgacgatcgtcgtatcataatgtggtgagagtgagtgagattcaaaaacatattgatatctcttgtattcagacttatgttatcaatagtgctaagatcttcttcttaaacgcgagacctcaatgtcgaactggtaaaagcttaaacaaaacatgtcagatctgttctcgtaaccttctcgattcgttcctgttctgttctcttgcttgtaaggtaaatgctgcaatgttgtggtctttcttcaaactcaagtttgattatataggtttcttgattgtttcttattggtctaaaatagcttgaaggtgtgaagaatggagaggatccaaacctgactttatttcatagtggaaagagtgatgactcgtcgaagatcatcaataccgggatttgtagccgtttgatcgacgggatctcgattgcggttgacgaccaacgcagcgaaaccgcgggtgtgttatctccagagacaccttcaatagaaagccaccggaattacccaatgaagagtagaagaaagggtatacctcaacgagcacctttctaaaaggctttatgaaagagttaagatataagatagaatatgggaaggatcagaaaagagaaaacaaaaagtgttggtaaatgactaatgagtaaatggaatcatcttacataaatagtagcaagcttaatgattataagagtacagaacaaaagtgtgattttttcatagatattgggttataaatatatgattttaaacagccttatttacctcacttttgtctctttaattattttttatagcactatcatctatttttatgatttggaaaaataaaattttaaaatgtcacatcacatttacaaaacatggagatgtaaaaatacatatttgtatatttataggagattccttcatggtcttttgaatgttcattttagcttaaaaagtgagagagtgagttggcatttatggaggggatatgtgaaaagtatggtataaaataagcttggtttaataaagaatggagaaagtgtagtggtgcggatttgtcatactttgccatcaacattgtttttggggtttggtgagagtatcttataattttttgggcaaagatatatttccttttgtggaaggtaaatcatgttttgcttgtttacctccttttaaagaaaacgatttaattttttattttgccaaaggattttcatttttattgactttgtaggttcatatggtggacacaaacatattgggattagcccatacattacaaggctcatgccccattaaagatgtcaactgggctgttcatgtccaaatgaacagccctattttttggtcattattggtttaagctaaatgggatcaaatccaaattagaccaaacccaaaaagaaccataataaatcaggcaatccatgggtccaaatcttattatataaaatacagtttagaaagttagtaactcgcgagatcatgacatatggcaagtatatatatatatatatataattatgtttattaatcaaaaaaaattaacagtacatgtgttatgatcaattaaataaatctagcatgtattaatttaaaaaaaaaattattagtaactcttaaaaataaaaagacattgagaagataccctggatatgtcctggaatatcactggctttgaggattgtacctctcatgcttgcttcacttatatattcatttgaggattgtacaccctcgaggtcgttcttgaggatttgaacatgactttgggatttaccttgcacaagaccgaaccaatttattctgacaccctcgagaaagcgtacaattatttttattagtctttcataatttcatctccctggtattaatatatagacaactaactctagcctatgtgtcgatgtcgtgcttataaagaaacttactttttaattataccttgatgcttccaaagtgagtctttttatcgttggttggaatgtattgttatcgttacaaagttatttgattgttggtctcaagggtaagaaaaggaaaagtttttttttcgttattataaatgaagtagtttatcaagttgtgttgggtttcaaatttgtctctaaaatctatgaatttttcctacagcctatgtaatattggcttatataataaaattaccgaggaccaataacatcaatacacacattcggaaacacatcgaatcaataagaatacaatgttagcgcttagtgctactggagtctatactcgtcacatcccagatggttcgttctatatctttctattggatttactcaagtacttatcttttctcaattaaccggttacggtaagattttgatcatacctatatttaagaaaaaacaaataatagttaattcatattttactaaacttatatatatatatatattgataagtttatgcaattattagtatatgataatgatgtgaccagatagttacatacgattttcaaacaaattattattttatcgaattatgttaaatattatattgcctcgctaaagaccaaaaacttttataaattatagtgattattaatttctcgagtattagtttataaaaaaattttttgtacaaactcttcacaagttaaagttgaatttacaattgtggtcacttattttcttctcctaatttatttgaatgttgtataatttataaattactagattaggacccgcccgatggacgggttttaaagttttaaaataaaattttataaatgtatatcaaaatttgttgtaagagaaaatatttttgaaaaaatagataacttttttagctagagaaaagacttataatatttctttaaacctttttgttgagaaaaagtttttatttcactaatttttacttctatattttagttatcaaatgttttaccacatacttatcattattagtaatgtcaattcacaaaaaagtaattttggaaatccatatatttttcaatttttttttataatccaaccaccagtcaaactttgatcttatttacattattttacaaatatactattgaactatgctttttaccgtttacaaaatatatatatgatcagttgataacaataccccaactatatgtctatttttttttcttatagtttctttaaccatttaaattgttgacccaaaaaatatattaaataatcacataaaaataattgatgacatttatataaaagaaaaaaatatgcttaaatgaagtgagtgtataaccaacctagaaattagaaaagttgagaaattaatttgacataactaaaagaaaaatgaaaattataagtacaatgatatatgagtcttagataataaaagtataaaaataaaaattaaaaggaaaataaaaataaaataaagaatctacaaaatactacacctaaattaaaaaatagcagaaaagaagaaatatatattgatctaaattgtcttaacaaaaaaatggaaattcaaataaacaacataacaatttattttaaatcctaacaaacttttagttataaaataaaatcaaaaggaataacatataattttaaattaaataatgacacatgttataatctaaaattattagctcgatgatatataattaatattatattattcaaaaactttatacttattttttagtttaagattttcaatgcatgtagtcattagtgaaaacaccaaaaattaggaaaatagggcttaaagggattgattttttgattatttgatgacaatgttaatataaattttaagtcatttaatatgagtttgacattaggtaaaactaatttatgagattatagaatacaacaaaactatatcttaaacaatgtttcttttccaaaatagtttgtggttttctttatttttggttcattatgttttgttatttattaaatattttaatatgaagtaattctattattttgatatgatataattatattgatgtgatatgatatacatattattttgatataaaatttaacagttatccattaaaataacatgtgcataatcaaaatcgagattatcatgatgaaatagatagttaaattgtatagcaaaataaaatctataagattaaaattttggtttttattaattactaaacaaaatataaagaaagtgtgttgactaacttaaaattttaatatcatcaataagatatagttaaaatcattaagtatatagcaaaatgaatattgtaagattaaaattcgatataaattttttttactagattagatatttaaaaaataggaattatcatttactatttaaaattccaatcatcggtaaacatttataattatttttaaacccgcctatctataccggcctaacctagtaatatatgatatcatgaacacattttttcaaaacgtcatactaaagtcttaagtgtttcacacaatgacacaatgacataatttcaatacttacataagttcaatattaagaacttattaagaacataagttcaatacttcataagttcaatattaaaaatcatgggtggtccatgtccatttaattatagtcagcttttggacaagcccaaaataaacccttcagttttggggttgtccaaaagttgactataattaaatggacatgggcagtccatggttttcagacccaaataacaaccttaggcccggtaacgggaaaccaaacccaagattgtaaagaagaccaacaaaattctcctaatgggccagaaacgattttattctactctataagttttctactcttttgtttgagattatctggtattgtagttagttacttgatttcatattttacactttacagttttagctagatctagcatttagttagtggattgtgcagtctatttgcttcgttgcatttacaatttgttggtgggttgatttatatttagattggtgggttcttgtgtttttcttatttgtatggttaaagaagaattcgaaaatgcaatgaataaacaagaacaaaagaataaaaatacgtagaagtctcttcggtcccgtggttgaccaagagttcattaatatttttacactaggtctggagtttgatttccagagcatgcaattttttataaattaatgatacaaaacttatagaaagtctagagtaccggatgcagagccgttcgtggtagtcttaaatgtcgaaagaggatgttcatcgcggggatgtcgcacatgcagaaccgtctgttgaagatctgagtgtaggggatagagctgctatggaatcattgttcgtggaacctgtttctcataatttgttgtagatagtttgtgtattcccaaccacaagtccaaaagttgaccataattaaatggaaatgggcagtccatggttttcagacccaaataacaaccttaggcccggtaacggggaaccaaacccaagattgtaaagaagaccaacaaaattctcctaatgggccagaagcgattttattctactctataagttttctactcttttgtttgagattatctggtattgtagttagttacttgatttcatattttacactttacagttttagctagatctagcatatagttagtggattgtgcagtctatttgcttcgttgcatttacaatttgttggtgggttgatttataattagattggttggttcttgtgtttttcttatttgtatggttaaagaagaattcgaaaatgcaatgaataaacaagaacaaaagaataaaaaagcgtagaagtctcttcggtcccgtggttgaccaagagttcattaatatttctacactaggtctggagtttaatttccggagcatgcaattttttataaattaatgatgcaaaacttatcgaatgtctagagtacctgatgcagagccgttcgtggtagtcttaaatgtcgaaagaggatgtccatcgcggggatgtcgcacatgcagaaccgtctgttgaagatctgagtgttggggatagagctgctatggaatcattgttcgtggaacctgtttctcataatttgttgtagatagtttgtgtattcccaaccacaagtccaaaagttgaccataattaaatggaaatgggcagtccattgttttcagacccaaataacaaccttaggcccggtaacggggaaccaaacccaagattgtaaagaagaccaacaaaattctcctaatgggccagaagcgattttattctactttataagttttctactcttttgtttgagattatctggtattgtagttagttacttgatttcatattttacactttacagttttagctagatctagcatatagttagtggattgtgcagtctatttgcttcgttgcatttacaatttgtcggtgggttgatttataattagattggttggttcttgtgtttttcttatttgtatggttaaagaagaattcgaaaatgcaatgaataaacaagaacaaaagaataaaaatgcgtagaagtctcttcggtcccgttggttgaccaagagttcattaatatttctacactaggtctgaagtttgatttccggagcatgcaattttttataaattaatgatgcaacacttatcgaatgtctagagtacctgatgcagagccgttcgtggtagaaaatgtcgaaagaggatgtccatcgcggggatgtcgcacatgcaaaaccgtatgttgaagatttgagtgttggggatagagctgctaaggaatcattgttcgtggaacctgtttctcataatttgttgcagatagttttgtgtattcccaaccacaactctccccccccccctcccctccgatttcaaaaatatggtggtgcatgctgagagatttaaaagaattgatttggccaccaatatcaccaaattgcacttatcttttcagttaactatcctgagagaagtccacagttaaggatgcttggactgcaataattttaggatgggtgaccttcaatgaagtgattatcggaaccatgcttatgagaacaaagcatgtgaaaagatcatgtggtgatttgtaggatcggtaaacaagtcttcgtgcctctcggatcgatcgttagacaagggtgggcccaaagggccgagagaggacgtgggtcccactgttaaggacagccgaaatgttacaagtggtatcagtgccaaatctagacgagtgcggagtcaagaaggctcacaccgtcggggtgacagtcttggtgcaccctgatttcaggaaaattaaggtacatgcggagaggtataaaataattgatttgttcacctatgtcatggacctactgttagtgacggtcgggacgttacatagttgactatcatcataatagaattagactgaaaatctctagtgatggctgactatcattataatagaattagactgaaaatctctagtgatggcgtaataagaccacacaatttatttttggaaatattttcttttttaaatttaaataacaatagcaatccaaagaaaatatttctgaaaataaattgtgtctttaattcattgcaacattttgtttatttcaattgctacatttaatttatttctcaaactattgtaacttttgttcgttttataaatcgtagaggtaaaccaacttcattcaatcaaaatacaacactacgtcatgtcactcattgtttaaaaataaatcaaaattaaatcagaaagcaaaacaaattaagaaaataaaatctgtattttttaattaaagaaggttaaatatctgttgtgtttataaataagagtttaggtttagattttatacttaaacaaaattatatgtcaggttgggtatataaatgagaattatgatttagatattttaagtaaacaaaattatatgtcggtttgggtttataaaagagtatttagggtttaaattttacaattaaacaaattatatttcaatttagatttataaaaatgaaatttagggtttatattttacaattaaacataatcatatatcgttttaggtttataaaaaagtggttagggttatagattttaaacttaaataattagaaaaaactttagggttaaagatttttaaattaaatgaaactagaaaaaattataattttgtctaattatttaagttagtaagaatgaggtttatggtatagattttacaactaagcaaaatcatatgtcattttggatttataaaagagtggtttgggtttagattttaaaattaaatgaaactagatatcggttgggtttataaaaaaatgtttagggtttatattttataattaaaaaattatatgtcgatttgagtttataaaaatgaggtttagatttagatattataattaaataaagttatttgtctgtttgggtttatgaaagagtggttagagttttagattttaaagttaaataagattatatgttgtttttggtttgtagagattttatatatttaatttgttttgttatttttgaatttaattatgattaatttttaaataaatatgaccggtatattttaatataaaatatgacatgacatatatttgtattttagttggttaataaaatagggtgaacaaaaaactcaagaatctttatgtaatacatcacaagaatctttatctaatacatcacaagtcaattctaaaaaaactgcagctctcttcatctgacacctggcttaaatcgcaataattcttttttttttcatcttcttcttctcatcaatccaaaactttatagtgccttcctctccctctctctctacccaatcataagtactctccgattacatggttatcacattttttggcttgtgatatcacgtttctttattcttattcaaatctctgtttcaatttcacttcattgacgtattagatatatttgcaatctcaaatgaattgttaatgattcttatgaacgtgatctggtttctgtagaattatttttcttcgttatcggagattggtgatgaagttcgtgaccaagagtaacagatttgagggtctaagatttcaccctaaaaggccaggctctgcctcacatccacattctccatttaagttttgattggaattttcttatgattcgttttctcttcagacgacaagttaagaaaaaaaaacaataacccttatggttggtgaggacgaacatgtaagttttacttacatctcttttctcatttgaaccaaagctctttgtaagactttagttgcgatcaaacccggtaattagtcaaaagacttgggattgtaaattttctcaatatttatcaatgattcaatatgcttttagaattctcttaagatcgtgtttctctattcatgttattatcaggtttattggcggaaaaaaaaaaaacgagaaaaataagttaaacatcacataagttatatgtatgttgctataatgtacagttaacatatctcttatctctggtttgcaagaaatcttaattttatatgtattaacgtaactagcgataattgttagaggttgagagtagcctcatgaaaaagtaaaccataacttcatgtcatttattagtctccgttgtttgcttaagctaaagtaatattcgagtatttaactgttagttgaagtaataatacatgtagttcattcgattacatgaaactcagcctgttatacgttatatgattacgtcttgattttcactttgttaatataacgacaacttttgacagatttatctttgaagtgttaagtagtaaagaaaaaaattagttagcttatctattaatttgattaaaagttttgcatactagttgtatatggtcgacgccaagtaagctaaagttcttcctatgtgtatctaggcctgatgaggcttataattagtgagtaggtatgggtccaaaaagcccaatttatggaatgtggtttagttactttaactaaaagagccgcttacttaggtcacagatctagggtttttctagtccatcgccatgacaaaacggaagcagcaggtctccggcgataattcagtctttgatcagattcctgttgatctcatcgtcaatatcatgtcgaaattgcctgtgaagtctatagctcagtgtcgttgcgtatcgaagctctggtcatccattattcgccgtccgaattacaacatgttgttcccggccaagtctccggctgcaccgaggttccttttcatcgttgcaaatggattatacggaccaaatttttttatatcctcttcacctcaacctcaatatccagataagcattcatctcttgaagccactcttcacatcagttcgatcgccacagattactgccaaatatgtcccccggtcaatggtttggtgtgccgttacatgtatgggaaggattttatatatgtggtggtttctaatcccatcacaggagagaatgtaacgacaccaaaagtgacaacaaaggggtatccatcaaaggagaaaatatattttggctatgatccagttgaagaacagttcaaggtattgtttatgacttggttgcctagtagcggctcacacgagtatcaagtttagacattagggactagaaatctttcttggaggaggatccaatgttccacacttcattatcctcatgaagatgatggaatatgcatcaacggtattttgtattatcaagcaattattggccaaaaacgttccatcgtttgctttgatgtttggtctgagaaatttagttttgtcaacattgatcaatacttggcaacaaagatcttggaacctttgattctgataaactacaagggtggtaaattaggtgctattaattgtcatattagaagtaatttctttgttttgtgggttttagagaacgccgaggaacataaatggtcagacactttctacaaaatgcccgaagtgctacgtccaagccggatagaatcagtgttctctgctggaatgattggtactggcgaagttgttttgtatcgaaaatatgcacaaaactttttctacattctctactacaacctcgagaaaaacattattacaagtgtaagccttcgagttccaggacttgattatgtggagtacaatgaagttcacacatttccagactttgtaggagaattgaagcttatgtaaagggatcttcttatgtaagattttacttcttgggttcgatatagaactatcaacatgatctttgtctctgccttaatgtttttgtttcgtattttaatgatatttttgaagttactatttctcttatttgtttggttatgattcctggaattaacagaattggttacatcgtatagtatgctattctttgtgtaaatacattactccataggataagattagagtggttatatgtggtagtgatatacatgagtattagcgtaattcgagaactgaagttgaacagaaactaaagttctcatgaagaagatgaggatcaagctcgagagaataagaatattagaattgtttctgttaagtgtaaaatgtgatgtacaaagtgtttatatacacgattataacctatgtggtacaaaccggttcagtaaaccaaaatcaaatgtaaaccacattatcatctctaataatgaggacacatctatttaagtactcctgaaaaaaaaaatacgatctcaaggcaagcatcatcttttccacgagtctctatagagtagaaatgaaaccatttggtgtaaaacttttcagaagattttagtggtagaaggaacaacatcttaagttaccaagggtctgcaaagcagttaaagataactagagagtagcttgttaaatatcagctaaaatttgattttaaaaaaaaaatataggtcaagttcatgcgtatggactgagatttgaatacgattatgttgcctagcagttgcagcaacttcatccacaagcaccgtccgtgtactctacactacgcgagtggaattgaaaccatttattacttgttttcgtatggatgtaatacacgagaatctcattcaatgtaatgcattcttatgactatatatgattttctaattttctaatttcattggaaatcttctcctttttttattttcttcccacaatacataattggaaaagcatttaaaaggaacttaaccggaaaggatacgaattggatagcaccgaaagtgttatagtcatttagacttgaaataaattaaatatctaaaataacaaatataaactaattctttagttggtatggtgctttttaacagtttgaattttttttgaacttttgttgcattgaagtttaatcaaatatcaaaaaaaaaaattatcaactgaaaaaaaaataaaaatatttggaaaaagcccgaaataaaaaggaaagaaatcactccatcgtgtgtcacacgcaaaagaatagcttacttctttttttatttacttcaccgtcaggagcaaaaaaaaaaaacaaatcacgtaaaccctaattatctcttctccgttacgtcaagactcaaaataatgggcaaggcgcagattattcagcatcaagcgaggcgtattctctctcaaagtaacagaaattgtttgtttcgtcgctcttacgaaaccctaccggctgcgaatcaaactctgcctagcagaatcaagacggatatcaatcagaaggcaagcatcatcccactgttagagcaatggaggaaacaagggtatgaagttaatccatctcaccttagaggtcttattaagaatcttagtgactgcaaaaactttactacagcacttgaggttagttaagttcgatctttattctctaactcgagtggtctttaggaaataacatagattttgatatgatatttgtaatgtgtcaggcatcaaagtggatgtttaaacacagtgtgtttgataattttccggaagattgtgcagctcagcttcatctagttaacactgttcttggtttggaagaagctgagaagatgttcaaaaacatccccgagaagatgagggattactctgttctcttgagctcttacacgaaacctgtgagaacagtagataaagccgaggccacgtttaagaaaatgagagagctagggttcttgttgaaaccttacctgttcaactctatgatttgtctctatggtcagctccagagactagatatggtcgagaagcttctatataagttgaagaagaacaatatggaagtcggcagtctcaaggtgaacaatgtttcgagagtatacgcgaatataaacgcgatggagaagtttaaaacgtgggttagtaaagaaggaatcgaactagaaagagacacaatcgttgcaatggcaaaagcttaccatagagctggttcaatagaaaaggcgcgatagaggtgcatggtgataaagcagggagtaaaacagacgtgtatcatctttggaatttgtacaagaagaaagggaagctgaaggaagatggatatcgaactgtgattaactcgttgttgaagttgatgatgtacaaggagcagagaatatatataaagagtggacaccaaaaggaccaaagctagatataagcataccgggttcgctaatttctccgttttgcgcggaaggaaaggcatcgaaggttgaagaattgattaagtcgattcgaggatgaggaatgggatgtatttaaagatggtatcagaacgtttgatcacgttgcggctaagtgttggcttggttacatttgtgtatgatgttccctaaggtagtaacaaccccttcttgtactttttgcttcgatatcatgaaatcatttaaaatttcaccaatacaaaaattaaactacagtatagtttttatattctatacaataaagtttttattttattttctactacactaatattgcaattattggtactgactattattaatgggaggagtgggtcatcttattttatacttgtagacaagaagaaactgctttttcttccctgaggaaatatttttaggattgggtctcgatttggtatgagacatgttattatcatattcttgtctggtcacttgatttattattatttcttacaacaaaacaaaaaactacgaacagcttttgttagattttggtatgtggttcggttagattctttttcacttagtggtggctttgttcagataccaaacccaatcactgtccttttcaccttcctatctctcttacattcctccttttattagcttcttctcttcccctacacaaaaacgaccatctacattattttcatcatttcatattcaaaaagatttctaagtgttgagctaaaattctccttaataaagagaatgtcgtcgaagaaatatcgatattcttcatcttcttctttttcttcttcatcttcttctcagctaagtactccaaggtacttgctttaacgaggttaatgattggtattgagattttctcttgtttgattaatcatgtttttgtttttcttaaatttatcttacagagcattgcaaaatgggtattctcaagccattgctgtaagttcttattaataagttttatctactagtggtttcttgtccaacaagttaatttatttttttggtttgtatccaaagaaatctcctctttgggatgttgaagaggtgaaatgcagctttagttcctcagtgtctaaggtcaaatttcacattttatattttcatataaatatctgcttatgtatgatacatatatacatgtgagcttatctatttatgtgctctggattttgcagtggaacgaagaacttattggagagatcgcggaacttgacaccgagatcttacagttagagcggtatcttctctcgctatacagatcatcttttggagatcatttgcctgataattcttcactccctccatgcacgaccaaatttcacaatgaccaggcctcttctgtttctgataagtctgtcttgtccaggctcaaacagttctctaaaacggtgagtgatgatcttaatttgatgatgcatatattggtgtaactttagttttctttaatatcagtttgtgattgtgaaacgttttcaggacaagataaaaggatctgactctggtcacccgagtttggctgatcttcttggtcttaacactctcagccctaataaactctctgaagagattctgagaagtatttgtgtgatacactacaaactctcagacaatggacataacagattggtcaagaactcaaagaatgaagagtatgggcaggaacttggagttggtatccataagctatacctagacgattacaatttaaagtccgtagagagcatgcttcagaattttaggtgagattgcattttaaagaaaaatgtgtaagaattcttgcattataaagtggcttactctttttataactgactaaaatgcagatcattagttcaaaagctcgagaaagttgatccggcaaggctcggtcgggaagagaagcttgcgttctggatcaacatacataatgctttggtgatgcacgtaagcatcttagcaaatctgagtcgccaaaacatatatttatatgcccttttgttattattatggtctaaaggttgtgtgtccttacaggaatatatagtatatggaattggtgaagatacaacaagcacattaatgaatttgaaggtttggattcttcggtcaaaactaaattatacatgttgtggttacgggcctggtgagattacgggctttggtcaagaacctcctagtatttcaaaaaaaaaaaaaaaaaagaacttttccgtcaattgtattgttagttcgttgatttgacctcatataacttatgtgtttatcctctccaggcagcatttaacataggtggggagtgggtaaatgcatacgatatccagagttcgatattgggcattcgtccatgccattcaccatcagtaagttgatttatgacttaacttgtttgcatacgtttgtatgtgtttctccttttgcaaaagaatatgtaataatttgtcaaatggcgaaaaagtaaatgaaaatttttagaaaagtatccaaattttctacttcctaaaattgaaaacattttgaaaatattgtggattcaattcatgtctatgaattctcaatcttgaaatatttctatttgccgatgatagcgtttacggacgctgttttcaccggctaagagttcaaagacaagtagtggtagacacacttacgcgttggactatgccgagccacttcttcattttgccctctcgaccggagcatcaaccgatccaatggtactatacggactcaactcctttctcctttaaatctcttcacaaatcatgttaattaaccatatacattgttttgattaggtcagagtgtatacatcagaaggaatctttcaagaacttaggcaagcaagagacagttacatccaaacaagtgttggatttgagaaagagacaaagattttattgccaaagatcatttacaactatgcgaaggatacttctcttgacatgggtgaactctttagtaccgtgtctgagtgtttaatggagtcacaaagaacggcaatgagaagaattgtgaacaaaaagcaagagagatgcattcgttgggttcacgatgaatccaagttccgttatgtcatccattcggaacttgtgagaggcagtcttgaaatttgaaaaccatcttttgtacctagtcactctatggttcgtctaaatattgtttttgtttttgtgccaagatattgctgaagcataaagtttgcgattgtaatatagaatattaagaacaaaatacaatgtatgtccatgtctataacctaactcgcagatcaatccaagttgttaaaataacaccataccaaataagaattc

SEQ ID NO: 1185 - DNA, 95870 bp, Arabidopsis thaliana
gaattctccttcccggaatcatcagcggcggcgggagaatcgacggttagaactttatcagccgccaaatcaacggagccagaatcgctagttggataatcaacgagtagatccgctatgaaatctgaaaccgattgctgatccaattccacaaaactctcctcttgatgattctcatcgttcatcaattgattctcgatttctccgatccatgaatccggtgaagactgaagaaaatcctccgccggaagagaatcaattacgattgaaggatcgaaatcgaagaagaaatcttcatctccgagtaaatctatgcttccaaattcctccgccatggtcaaaaaaaaaaaaatatacaaagaagaaaaaaaaaagcgaatttaatttaagaaattggaagagagatgagttatataggaactgtgtttgagacttttctaaatttctttgcgaccaagtaaatgtgtagaaaaagagtcagcatgacacgtgttgattatggacgcgttttttgaatttttagccaatgatgtgatggagtgtactgtgttatagtgtttctgttagcagaggattattgtttttatgtgccgtcacacaaccaatgagaaggcttcaagctggaagaataggatcacagccgaacacgtgtactcagtgaagtgttcgtgtgattaataactcggttctaattcacttcttttctcttggtttgattttcttattttcggtacagttatgtaaaccagttagctatagtcaaaacgatgtacatgtagttgagatggacaatgagaccaaggagagcaaggcttctttgaccatttctcagaaatcaatcaaaattcttcagtccctttttctctttgtcaccgtcaacatcttccacgattgaatctttgttctccgagaggacttttcttccttcgtgaccatcttctagactttgaaagttatcaatttgttaattaaaatcatatattatattgtcaatttatgttacattctggattatcttccttattcaattttaaatgagtgattaatcttcattcaatctcacatgaatgaatttgtaaaattttcagttctctagcagatgagtgaactaattatatatgtgaaagttgatctactattttcatatgaatgtcacgttattatttaattattttctatgtgttcattcaataattaatgtaagatttacatttattattaattatttatctttaattgtatcaattctaaatttatttttgttattatatgtattttaaagaataaatatattttactattttcttcatactcatttaaggtttatttgctaatgttttgtagtcataacttaaaataggaatagatattactatagtgaattagctaatggtttggtagcttattatcattaatctctatctaaataatataatacagaggatgaggagtatacagagatccatcctcaaattcctgatgtttatatatttccaacattaacatctattaaattgttttacgatgaaaattatttcaagattgtgtgaataattacactttttcaaaaagtacttaaaaagtagtttaacattaaaagcagttgatgattatatatttttcaataaaatgttaaattatattttaaaaaaagtagataaagtgcaatttcaattagaaacgaatagaagacaagttttaaacaccaatagaaatattaaaaagctagatgatgttagttttaacttctggacaaaaaccaaatttggaggtcgtatctcttgtccccaagaagtctgattgatgagatttgattttggacttgcttatcaaccgaacttgtcaataatagcattagtaattataattttagtaacacattatttacattaattataattttaggacaattgtattaacctgacttgtgatctaatgacgtggttcataaagtcacttatcgaaagttaatagtgtatattttctatgatatagttcttttataatgctaattaaatacctatgaagaaatataaggattgcaaattttgtaattaaactaatagagaggactctaacaaagctatttaactacgtaaagcatatatttccttttgtatattacttttttgtttgtatgtaagcgggaatacttaccacatgtactacaattccttgttcaccaaacttcaaataacttccccaacgtcctaagtaacatctttaaaatttgaagaacatgatagcgagggaaactaaattcaacgtgaatttattttacttggttttactctacttttgttactaccaaggtgaatttgatttaaacctagttcaaagtcacttttttctagcctagctcaaattatataaattgtgcaatgttgtaattgtcctagtctaattatcatcacgttttttaaattttagtattgatttcacatgtcttaattttaaattttatttgatgatatattatttgacatagtataaatttctttttaacacgcgttaaaagcaataattttcttaaaaatatttaaccaaatttagcttgtattatacaaaaataaaatgagtaatatcactacctaactatactttaggtttttattatcaaaatttatatatgacattttattatcaaaatctatatatgacattttgtacatatagtggttcatttctcacacaagttcttttaaatttattttaaatttagtatagatttcacgtaacggttttaagaagatattcctattttgtttgactatattatttgatataatatcactttctttttgacacgcgtcaaaaataataatttccattaaaatcatttgaccacttttaactcttgttggattatctaccaaatataattgatgttatatagctattttatatcaaagtcattttttggaaaaacaggggcttttagttaaataaaaaaactagaggacctataagtaaaaatattataatatataataacataaaaagataagtaattaacatgagtactatgaaaaaaaatcacacaagcaataagaattagtaaatcatttgtcaatcatggtattaataacacattatttacataaattttatttttcttatatctaacacgcgtcagaaaagataactgttgtcaatatatttattttactaattttaacaaataatttattatctaccaaataaaatgacaacaaaataaaaatctagatctaaatacagcaaaccaaataaaaccaaagcaaaattgatgagaaaaaatgctctttttcacaaaactagggggttttgagattataaaataaataaagagtctaaatgtaaagttattataacaatatggaagaaaatataaataaaaataagtaacaaaaagtaaaaaaggccgaccttttcagtgtcttataaatttctccatcgtcttcttcttcttcttcttcttcgtcttctctctgtaaacccccacacaaacctgtggccgctatattctccattttctcagtaaccatctctgtttttttctctgtttctcagattaagtttcgtgtgtcaaacagatcaaaacccaaacaatggttattcctctgtttttttcagaatttttcaatcgatgttattttatagaaattgattcatgggtctgtgttattttcaggtgagttccattgtaaaaatggagaacgacgacgtaatgactccgccatggctaacaccaatgcttcgagctgattacttcgtgacttgttcgattcattcacaatcgagtaaaagtgaatgtaatctgttttgtttggattgttcaggcaatgccttttgttcttcttgtctcgctcatcacagaacccatcgtgttatccaggtttggttttcaatttttcattacccatctatctctcaggaattttgtcgaacacgtttgtttaatgaacctaattctatgttttttttttgttgttgttacagattcgacgatcgtcgtatcataatgtggtgagagtgagtgagattcaaaaacatattgatatctcttgtattcagacttatgttatcaatagtgctaagatcttcttcttaaacgcgagacctcaatgtcgaactggtaaaagcttaaacaaaacatgtcagatctgttctcgtaaccttctcgattcgttcctgttctgttctcttgcttgtaaggtaaatgctgcaatgttgtggtctttcttcaaactcaagtttgattatataggtttcttgattgtttcttattggtctaaaatagcttgaaggtgtgaagaatggagaggatccaaacctgactttatttcatagtggaaagagtgatgactcgtcgaagatcatcaataccgggatttgtagccgtttgatcgacgggatctcgattgcggttgacgaccaacgcagcgaaaccgcgggtgtgttatctccagagacaccttcaatagaaagccaccggaattacccaatgaagagtagaagaaagggtatacctcaacgagcacctttctaaaaggctttatgaaagagttaagatataagatagaatatgggaaggatcagaaaagagaaaacaaaaagtgttggtaaatgactaatgagtaaatggaatcatcttacataaatagtagcaagcttaatgattataagagtacagaacaaaagtgtgattttttcatagatattgggttataaatatatgattttaaacagccttatttacctcacttttgtctctttaattattttttatagcactatcatctatttttatgatttggaaaaataaaattttaaaatgtcacatcacatttacaaaacatggagatgtaaaaatacatatttgtatatttataggagattccttcatggtcttttgaatgttcattttagcttaaaaagtgagagagtgagttggcatttatggaggggatatgtgaaaagtatggtataaaataagcttggtttaataaagaatggagaaagtgtagtggtgcggatttgtcatactttgccatcaacattgtttttggggtttggtgagagtatcttataattttttgggcaaagatatatttccttttgtggaaggtaaatcatgttttgcttgtttacctccttttaaagaaaacgatttaattttttattttgccaaaggattttcatttttattgactttgtaggttcatatggtggacacaaacatattgggattagcccatacattacaaggctcatgccccattaaagatgtcaactgggctgttcatgtccaaatgaacagccctattttttggtcattattggtttaagctaaatgggatcaaatccaaattagaccaaacccaaaaagaaccataataaatcaggcaatccatgggtccaaatcttattatataaaatacagtttagaaagttagtaactcgcgagatcatgacatatggcaagtatatatatatatatatataattatgtttattaatcaaaaaaaattaacagtacatgtgttatgatcaattaaataaatctagcatgtattaatttaaaaaaaaaattattagtaactcttaaaaataaaaagacattgagaagataccctggatatgtcctggaatatcactggctttgaggattgtacctctcatgcttgcttcacttatatattcatttgaggattgtacaccctcgaggtcgttcttgaggatttgaacatgactttgggatttaccttgcacaagaccgaaccaatttattctgacaccctcgagaaagcgtacaattatttttattagtctttcataatttcatctccctggtattaatatatagacaactaactctagcctatgtgtcgatgtcgtgcttataaagaaacttactttttaattataccttgatgcttccaaagtgagtctttttatcgttggttggaatgtattgttatcgttacaaagttatttgattgttggtctcaagggtaagaaaaggaaaagtttttttttcgttattataaatgaagtagtttatcaagttgtgttgggtttcaaatttgtctctaaaatctatgaatttttcctacagcctatgtaatattggcttatataataaaattaccgaggaccaataacatcaatacacacattcggaaacacatcgaatcaataagaatacaatgttagcgcttagtgctactggagtctatactcgtcacatcccagatggttcgttctatatctttctattggatttactcaagtacttatcttttctcaattaaccggttacggtaagattttgatcatacctatatttaagaaaaaacaaataatagttaattcatattttactaaacttatatatatatatatattgataagtttatgcaattattagtatatgataatgatgtgaccagatagttacatacgattttcaaacaaattattattttatcgaattatgttaaatattatattgcctcgctaaagaccaaaaacttttataaattatagtgattattaatttctcgagtattagtttataaaaaaattttttgtacaaactcttcacaagttaaagttgaatttacaattgtggtcacttattttcttctcctaatttatttgaatgttgtataatttataaattactagattaggacccgcccgatggacgggttttaaagttttaaaataaaattttataaatgtatatcaaaatttgttgtaagagaaaatatttttgaaaaaatagataacttttttagctagagaaaagacttataatatttctttaaacctttttgttgagaaaaagtttttatttcactaatttttacttctatattttagttatcaaatgttttaccacatacttatcattattagtaatgtcaattcacaaaaaagtaattttggaaatccatatatttttcaatttttttttataatccaaccaccagtcaaactttgatcttatttacattattttacaaatatactattgaactatgctttttaccgtttacaaaatatatatatgatcagttgataacaataccccaactatatgtctatttttttttcttatagtttctttaaccatttaaattgttgacccaaaaaatatattaaataatcacataaaaataattgatgacatttatataaaagaaaaaaatatgcttaaatgaagtgagtgtataaccaacctagaaattagaaaagttgagaaattaatttgacataactaaaagaaaaatgaaaattataagtacaatgatatatgagtcttagataataaaagtataaaaataaaaattaaaaggaaaataaaaataaaataaagaatctacaaaatactacacctaaattaaaaaatagcagaaaagaagaaatatatattgatctaaattgtcttaacaaaaaaatggaaattcaaataaacaacataacaatttattttaaatcctaacaaacttttagttataaaataaaatcaaaaggaataacatataattttaaattaaataatgacacatgttataatctaaaattattagctcgatgatatataattaatattatattattcaaaaactttatacttattttttagtttaagattttcaatgcatgtagtcattagtgaaaacaccaaaaattaggaaaatagggcttaaagggattgattttttgattatttgatgacaatgttaatataaattttaagtcatttaatatgagtttgacattaggtaaaactaatttatgagattatagaatacaacaaaactatatcttaaacaatgtttcttttccaaaatagtttgtggttttctttatttttggttcattatgttttgttatttattaaatattttaatatgaagtaattctattattttgatatgatataattatattgatgtgatatgatatacatattattttgatataaaatttaacagttatccattaaaataacatgtgcataatcaaaatcgagattatcatgatgaaatagatagttaaattgtatagcaaaataaaatctataagattaaaattttggtttttattaattactaaacaaaatataaagaaagtgtgttgactaacttaaaattttaatatcatcaataagatatagttaaaatcattaagtatatagcaaaatgaatattgtaagattaaaattcgatataaattttttttactagattagatatttaaaaaataggaattatcatttactatttaaaattccaatcatcggtaaacatttataattatttttaaacccgcctatctataccggcctaacctagtaatatatgatatcatgaacacattttttcaaaacgtcatactaaagtcttaagtgtttcacacaatgacacaatgacataatttcaatacttacataagttcaatattaagaacttattaagaacataagttcaatacttcataagttcaatattaaaaatcatgggtggtccatgtccatttaattatagtcagcttttggacaagcccaaaataaacccttcagttttggggttgtccaaaagttgactataattaaatggacatgggcagtccatggttttcagacccaaataacaaccttaggcccggtaacgggaaaccaaacccaagattgtaaagaagaccaacaaaattctcctaatgggccagaaacgattttattctactctataagttttctactcttttgtttgagattatctggtattgtagttagttacttgatttcatattttacactttacagttttagctagatctagcatttagttagtggattgtgcagtctatttgcttcgttgcatttacaatttgttggtgggttgatttatatttagattggtgggttcttgtgtttttcttatttgtatggttaaagaagaattcgaaaatgcaatgaataaacaagaacaaaagaataaaaatacgtagaagtctcttcggtcccgtggttgaccaagagttcattaatatttttacactaggtctggagtttgatttccagagcatgcaattttttataaattaatgatacaaaacttatagaaagtctagagtaccggatgcagagccgttcgtggtagtcttaaatgtcgaaagaggatgttcatcgcggggatgtcgcacatgcagaaccgtctgttgaagatctgagtgtaggggatagagctgctatggaatcattgttcgtggaacctgtttctcataatttgttgtagatagtttgtgtattcccaaccacaagtccaaaagttgaccataattaaatggaaatgggcagtccatggttttcagacccaaataacaaccttaggcccggtaacggggaaccaaacccaagattgtaaagaagaccaacaaaattctcctaatgggccagaagcgattttattctactctataagttttctactcttttgtttgagattatctggtattgtagttagttacttgatttcatattttacactttacagttttagctagatctagcatatagttagtggattgtgcagtctatttgcttcgttgcatttacaatttgttggtgggttgatttataattagattggttggttcttgtgtttttcttatttgtatggttaaagaagaattcgaaaatgcaatgaataaacaagaacaaaagaataaaaaagcgtagaagtctcttcggtcccgtggttgaccaagagttcattaatatttctacactaggtctggagtttaatttccggagcatgcaattttttataaattaatgatgcaaaacttatcgaatgtctagagtacctgatgcagagccgttcgtggtagtcttaaatgtcgaaagaggatgtccatcgcggggatgtcgcacatgcagaaccgtctgttgaagatctgagtgttggggatagagctgctatggaatcattgttcgtggaacctgtttctcataatttgttgtagatagtttgtgtattcccaaccacaagtccaaaagttgaccataattaaatggaaatgggcagtccattgttttcagacccaaataacaaccttaggcccggtaacggggaaccaaacccaagattgtaaagaagaccaacaaaattctcctaatgggccagaagcgattttattctactttataagttttctactcttttgtttgagattatctggtattgtagttagttacttgatttcatattttacactttacagttttagctagatctagcatatagttagtggattgtgcagtctatttgcttcgttgcatttacaatttgtcggtgggttgatttataattagattggttggttcttgtgtttttcttatttgtatggttaaagaagaattcgaaaatgcaatgaataaacaagaacaaaagaataaaaatgcgtagaagtctcttcggtcccgttggttgaccaagagttcattaatatttctacactaggtctgaagtttgatttccggagcatgcaattttttataaattaatgatgcaacacttatcgaatgtctagagtacctgatgcagagccgttcgtggtagaaaatgtcgaaagaggatgtccatcgcggggatgtcgcacatgcaaaaccgtatgttgaagatttgagtgttggggatagagctgctaaggaatcattgttcgtggaacctgtttctcataatttgttgcagatagttttgtgtattcccaaccacaactctccccccccccctcccctccgatttcaaaaatatggtggtgcatgctgagagatttaaaagaattgatttggccaccaatatcaccaaattgcacttatcttttcagttaactatcctgagagaagtccacagttaaggatgcttggactgcaataattttaggatgggtgaccttcaatgaagtgattatcggaaccatgcttatgagaacaaagcatgtgaaaagatcatgtggtgatttgtaggatcggtaaacaagtcttcgtgcctctcggatcgatcgttagacaagggtgggcccaaagggccgagagaggacgtgggtcccactgttaaggacagccgaaatgttacaagtggtatcagtgccaaatctagacgagtgcggagtcaagaaggctcacaccgtcggggtgacagtcttggtgcaccctgatttcaggaaaattaaggtacatgcggagaggtataaaataattgatttgttcacctatgtcatggacctactgttagtgacggtcgggacgttacatagttgactatcatcataatagaattagactgaaaatctctagtgatggctgactatcattataatagaattagactgaaaatctctagtgatggcgtaataagaccacacaatttatttttggaaatattttcttttttaaatttaaataacaatagcaatccaaagaaaatatttctgaaaataaattgtgtctttaattcattgcaacattttgtttatttcaattgctacatttaatttatttctcaaactattgtaacttttgttcgttttataaatcgtagaggtaaaccaacttcattcaatcaaaatacaacactacgtcatgtcactcattgtttaaaaataaatcaaaattaaatcagaaagcaaaacaaattaagaaaataaaatctgtattttttaattaaagaaggttaaatatctgttgtgtttataaataagagtttaggtttagattttatacttaaacaaaattatatgtcaggttgggtatataaatgagaattatgatttagatattttaagtaaacaaaattatatgtcggtttgggtttataaaagagtatttagggtttaaattttacaattaaacaaattatatttcaatttagatttataaaaatgaaatttagggtttatattttacaattaaacataatcatatatcgttttaggtttataaaaaagtggttagggttatagattttaaacttaaataattagaaaaaactttagggttaaagatttttaaattaaatgaaactagaaaaaattataattttgtctaattatttaagttagtaagaatgaggtttatggtatagattttacaactaagcaaaatcatatgtcattttggatttataaaagagtggtttgggtttagattttaaaattaaatgaaactagatatcggttgggtttataaaaaaatgtttagggtttatattttataattaaaaaattatatgtcgatttgagtttataaaaatgaggtttagatttagatattataattaaataaagttatttgtctgtttgggtttatgaaagagtggttagagttttagattttaaagttaaataagattatatgttgtttttggtttgtagagattttatatatttaatttgttttgttatttttgaatttaattatgattaatttttaaataaatatgaccggtatattttaatataaaatatgacatgacatatatttgtattttagttggttaataaaatagggtgaacaaaaaactcaagaatctttatgtaatacatcacaagaatctttatctaatacatcacaagtcaattctaaaaaaactgcagctctcttcatctgacacctggcttaaatcgcaataattcttttttttttcatcttcttcttctcatcaatccaaaactttatagtgccttcctctccctctctctctacccaatcataagtactctccgattacatggttatcacattttttggcttgtgatatcacgtttctttattcttattcaaatctctgtttcaatttcacttcattgacgtattagatatatttgcaatctcaaatgaattgttaatgattcttatgaacgtgatctggtttctgtagaattatttttcttcgttatcggagattggtgatgaagttcgtgaccaagagtaacagatttgagggtctaagatttcaccctaaaaggccaggctctgcctcacatccacattctccatttaagttttgattggaattttcttatgattcgttttctcttcagacgacaagttaagaaaaaaaaacaataacccttatggttggtgaggacgaacatgtaagttttacttacatctcttttctcatttgaaccaaagctctttgtaagactttagttgcgatcaaacccggtaattagtcaaaagacttgggattgtaaattttctcaatatttatcaatgattcaatatgcttttagaattctcttaagatcgtgtttctctattcatgttattatcaggtttattggcggaaaaaaaaaaaacgagaaaaataagttaaacatcacataagttatatgtatgttgctataatgtacagttaacatatctcttatctctggtttgcaagaaatcttaattttatatgtattaacgtaactagcgataattgttagaggttgagagtagcctcatgaaaaagtaaaccataacttcatgtcatttattagtctccgttgtttgcttaagctaaagtaatattcgagtatttaactgttagttgaagtaataatacatgtagttcattcgattacatgaaactcagcctgttatacgttatatgattacgtcttgattttcactttgttaatataacgacaacttttgacagatttatctttgaagtgttaagtagtaaagaaaaaaattagttagcttatctattaatttgattaaaagttttgcatactagttgtatatggtcgacgccaagtaagctaaagttcttcctatgtgtatctaggcctgatgaggcttataattagtgagtaggtatgggtccaaaaagcccaatttatggaatgtggtttagttactttaactaaaagagccgcttacttaggtcacagatctagggtttttctagtccatcgccatgacaaaacggaagcagcaggtctccggcgataattcagtctttgatcagattcctgttgatctcatcgtcaatatcatgtcgaaattgcctgtgaagtctatagctcagtgtcgttgcgtatcgaagctctggtcatccattattcgccgtccgaattacaacatgttgttcccggccaagtctccggctgcaccgaggttccttttcatcgttgcaaatggattatacggaccaaatttttttatatcctcttcacctcaacctcaatatccagataagcattcatctcttgaagccactcttcacatcagttcgatcgccacagattactgccaaatatgtcccccggtcaatggtttggtgtgccgttacatgtatgggaaggattttatatatgtggtggtttctaatcccatcacaggagagaatgtaacgacaccaaaagtgacaacaaaggggtatccatcaaaggagaaaatatattttggctatgatccagttgaagaacagttcaaggtattgtttatgacttggttgcctagtagcggctcacacgagtatcaagtttagacattagggactagaaatctttcttggaggaggatccaatgttccacacttcattatcctcatgaagatgatggaatatgcatcaacggtattttgtattatcaagcaattattggccaaaaacgttccatcgtttgctttgatgtttggtctgagaaatttagttttgtcaacattgatcaatacttggcaacaaagatcttggaacctttgattctgataaactacaagggtggtaaattaggtgctattaattgtcatattagaagtaatttctttgttttgtgggttttagagaacgccgaggaacataaatggtcagacactttctacaaaatgcccgaagtgctacgtccaagccggatagaatcagtgttctctgctggaatgattggtactggcgaagttgttttgtatcgaaaatatgcacaaaactttttctacattctctactacaacctcgagaaaaacattattacaagtgtaagccttcgagttccaggacttgattatgtggagtacaatgaagttcacacatttccagactttgtaggagaattgaagcttatgtaaagggatcttcttatgtaagattttacttcttgggttcgatatagaactatcaacatgatctttgtctctgccttaatgtttttgtttcgtattttaatgatatttttgaagttactatttctcttatttgtttggttatgattcctggaattaacagaattggttacatcgtatagtatgctattctttgtgtaaatacattactccataggataagattagagtggttatatgtggtagtgatatacatgagtattagcgtaattcgagaactgaagttgaacagaaactaaagttctcatgaagaagatgaggatcaagctcgagagaataagaatattagaattgtttctgttaagtgtaaaatgtgatgtacaaagtgtttatatacacgattataacctatgtggtacaaaccggttcagtaaaccaaaatcaaatgtaaaccacattatcatctctaataatgaggacacatctatttaagtactcctgaaaaaaaaaatacgatctcaaggcaagcatcatcttttccacgagtctctatagagtagaaatgaaaccatttggtgtaaaacttttcagaagattttagtggtagaaggaacaacatcttaagttaccaagggtctgcaaagcagttaaagataactagagagtagcttgttaaatatcagctaaaatttgattttaaaaaaaaaatataggtcaagttcatgcgtatggactgagatttgaatacgattatgttgcctagcagttgcagcaacttcatccacaagcaccgtccgtgtactctacactacgcgagtggaattgaaaccatttattacttgttttcgtatggatgtaatacacgagaatctcattcaatgtaatgcattcttatgactatatatgattttctaattttctaatttcattggaaatcttctcctttttttattttcttcccacaatacataattggaaaagcatttaaaaggaacttaaccggaaaggatacgaattggatagcaccgaaagtgttatagtcatttagacttgaaataaattaaatatctaaaataacaaatataaactaattctttagttggtatggtgctttttaacagtttgaattttttttgaacttttgttgcattgaagtttaatcaaatatcaaaaaaaaaaattatcaactgaaaaaaaaataaaaatatttggaaaaagcccgaaataaaaaggaaagaaatcactccatcgtgtgtcacacgcaaaagaatagcttacttctttttttatttacttcaccgtcaggagcaaaaaaaaaaaacaaatcacgtaaaccctaattatctcttctccgttacgtcaagactcaaaataatgggcaaggcgcagattattcagcatcaagcgaggcgtattctctctcaaagtaacagaaattgtttgtttcgtcgctcttacgaaaccctaccggctgcgaatcaaactctgcctagcagaatcaagacggatatcaatcagaaggcaagcatcatcccactgttagagcaatggaggaaacaagggtatgaagttaatccatctcaccttagaggtcttattaagaatcttagtgactgcaaaaactttactacagcacttgaggttagttaagttcgatctttattctctaactcgagtggtctttaggaaataacatagattttgatatgatatttgtaatgtgtcaggcatcaaagtggatgtttaaacacagtgtgtttgataattttccggaagattgtgcagctcagcttcatctagttaacactgttcttggtttggaagaagctgagaagatgttcaaaaacatccccgagaagatgagggattactctgttctcttgagctcttacacgaaacctgtgagaacagtagataaagccgaggccacgtttaagaaaatgagagagctagggttcttgttgaaaccttacctgttcaactctatgatttgtctctatggtcagctccagagactagatatggtcgagaagcttctatataagttgaagaagaacaatatggaagtcggcagtctcaaggtgaacaatgtttcgagagtatacgcgaatataaacgcgatggagaagtttaaaacgtgggttagtaaagaaggaatcgaactagaaagagacacaatcgttgcaatggcaaaagcttaccatagagctggttcaatagaaaaggcgcgatagaggtgcatggtgataaagcagggagtaaaacagacgtgtatcatctttggaatttgtacaagaagaaagggaagctgaaggaagatggatatcgaactgtgattaactcgttgttgaagttgatgatgtacaaggagcagagaatatatataaagagtggacaccaaaaggaccaaagctagatataagcataccgggttcgctaatttctccgttttgcgcggaaggaaaggcatcgaaggttgaagaattgattaagtcgattcgaggatgaggaatgggatgtatttaaagatggtatcagaacgtttgatcacgttgcggctaagtgttggcttggttacatttgtgtatgatgttccctaaggtagtaacaaccccttcttgtactttttgcttcgatatcatgaaatcatttaaaatttcaccaatacaaaaattaaactacagtatagtttttatattctatacaataaagtttttattttattttctactacactaatattgcaattattggtactgactattattaatgggaggagtgggtcatcttattttatacttgtagacaagaagaaactgctttttcttccctgaggaaatatttttaggattgggtctcgatttggtatgagacatgttattatcatattcttgtctggtcacttgatttattattatttcttacaacaaaacaaaaaactacgaacagcttttgttagattttggtatgtggttcggttagattctttttcacttagtggtggctttgttcagataccaaacccaatcactgtccttttcaccttcctatctctcttacattcctccttttattagcttcttctcttcccctacacaaaaacgaccatctacattattttcatcatttcatattcaaaaagatttctaagtgttgagctaaaattctccttaataaagagaatgtcgtcgaagaaatatcgatattcttcatcttcttctttttcttcttcatcttcttctcagctaagtactccaaggtacttgctttaacgaggttaatgattggtattgagattttctcttgtttgattaatcatgtttttgtttttcttaaatttatcttacagagcattgcaaaatgggtattctcaagccattgctgtaagttcttattaataagttttatctactagtggtttcttgtccaacaagttaatttatttttttggtttgtatccaaagaaatctcctctttgggatgttgaagaggtgaaatgcagctttagttcctcagtgtctaaggtcaaatttcacattttatattttcatataaatatctgcttatgtatgatacatatatacatgtgagcttatctatttatgtgctctggattttgcagtggaacgaagaacttattggagagatcgcggaacttgacaccgagatcttacagttagagcggtatcttctctcgctatacagatcatcttttggagatcatttgcctgataattcttcactccctccatgcacgaccaaatttcacaatgaccaggcctcttctgtttctgataagtctgtcttgtccaggctcaaacagttctctaaaacggtgagtgatgatcttaatttgatgatgcatatattggtgtaactttagttttctttaatatcagtttgtgattgtgaaacgttttcaggacaagataaaaggatctgactctggtcacccgagtttggctgatcttcttggtcttaacactctcagccctaataaactctctgaagagattctgagaagtatttgtgtgatacactacaaactctcagacaatggacataacagattggtcaagaactcaaagaatgaagagtatgggcaggaacttggagttggtatccataagctatacctagacgattacaatttaaagtccgtagagagcatgcttcagaattttaggtgagattgcattttaaagaaaaatgtgtaagaattcttgcattataaagtggcttactctttttataactgactaaaatgcagatcattagttcaaaagctcgagaaagttgatccggcaaggctcggtcgggaagagaagcttgcgttctggatcaacatacataatgctttggtgatgcacgtaagcatcttagcaaatctgagtcgccaaaacatatatttatatgcccttttgttattattatggtctaaaggttgtgtgtccttacaggaatatatagtatatggaattggtgaagatacaacaagcacattaatgaatttgaaggtttggattcttcggtcaaaactaaattatacatgttgtggttacgggcctggtgagattacgggctttggtcaagaacctcctagtatttcaaaaaaaaaaaaaaaaaagaacttttccgtcaattgtattgttagttcgttgatttgacctcatataacttatgtgtttatcctctccaggcagcatttaacataggtggggagtgggtaaatgcatacgatatccagagttcgatattgggcattcgtccatgccattcaccatcagtaagttgatttatgacttaacttgtttgcatacgtttgtatgtgtttctccttttgcaaaagaatatgtaataatttgtcaaatggcgaaaaagtaaatgaaaatttttagaaaagtatccaaattttctacttcctaaaattgaaaacattttgaaaatattgtggattcaattcatgtctatgaattctcaatcttgaaatatttctatttgccgatgatagcgtttacggacgctgttttcaccggctaagagttcaaagacaagtagtggtagacacacttacgcgttggactatgccgagccacttcttcattttgccctctcgaccggagcatcaaccgatccaatggtactatacggactcaactcctttctcctttaaatctcttcacaaatcatgttaattaaccatatacattgttttgattaggtcagagtgtatacatcagaaggaatctttcaagaacttaggcaagcaagagacagttacatccaaacaagtgttggatttgagaaagagacaaagattttattgccaaagatcatttacaactatgcgaaggatacttctcttgacatgggtgaactctttagtaccgtgtctgagtgtttaatggagtcacaaagaacggcaatgagaagaattgtgaacaaaaagcaagagagatgcattcgttgggttcacgatgaatccaagttccgttatgtcatccattcggaacttgtgagaggcagtcttgaaatttgaaaaccatcttttgtacctagtcactctatggttcgtctaaatattgtttttgtttttgtgccaagatattgctgaagcataaagtttgcgattgtaatatagaatattaagaacaaaatacaatgtatgtccatgtctataacctaactcgcagatcaatccaagttgttaaaataacaccataccaaataagaattcgagtcaagacgtcaataaaaaacacacacaaaagtaacagtacaaagagaagatataatataaacagttattttgttagcattatatacgtgtactttatgtgtaaatatattcataatatataacatattagagaaagtttcacgtcttgagtgcgtttgaattaaattaatataattttgattttgttaatattatttgttttgtttagtgtttaaaataatataattgtatcttgattgttatatttggaattttatccgcaatataccgtctcgtattactattgactcaaacccgtcatatcatctaactcattcagtgaaattaaatatacttctttatcgttagatattatttagggcttaaacgagcaaaaaatgtaggaaattaaacaatattttgttatttttgttttagtaatacttaaatttaaaagatatataattcaaatcaatttaaagtttttcttttaaatgattatttaattcttataaagttcacatattataaatattctaaacccgtcctaccatttaatcccgatcgatgaaattaaacattatttttgttattttttgttttaatcatacttttattaagaggtttataagtcaaatcaatttataagttttctttcaaatggttatttaatttttatctatttcacatattataaatattctataatgtttttcgtcaaatatactaaacgtttaataaactttaaataactacaatatttaccttttaataaagtataatattaacaatatcctaagatttctcttgttttaagtaattagaattaatgaagatatattagatatagaaatgctagtaattaggaatattaattcattgataagaattaatgccaatggtatttcttgtaaataagttctaacttgaggatttattttataaaagtgttgcgaaaatgtatatgtagatactaaaccataaaagttgcataaaccaattttctaaaaacaaattttacttctctaaaaagtgaaaagactaggttgtttgttttattagagaatgatatatgtgttaagttcaagagataattgaatgtcaatattcatctcttttaaagattgatttaatggtcaaatctattaaacttaaattaactttggttaaagtggttggtaggttagttagtaaaaataaaaaattacataaaattgaaatgaagatatcatatatatatatatatatatatattagtttgtgcgtatatctcacacaaatcatgtatgtttaaattctttccttctagttttggacaaatagttatagtgcccggaaagagtgttttgggaaatagacatgcttttcatagtacaatattttgagtaaggtaggattgttgaaagaaaaaaaagtaataaagactaggttgtttgttttataagcaaactaaattctgacccgcacatacgtgcggggtttcatattttaagaaatgtattggaatacatttttagtgtataaattataatgtgcatagaaaagtacatagtattatttatgatacaataactaatttttttgttaatatatattatttatatttcattgtattttgcatagtaaatcaaatgttagatttgtttcgatttgcggaataatataaagttatttggaaaatttgtgtatttttgttagtttgatgtatatacaaattaattatttttgtttgaaatttgatcaattagatgatataatgtgaaatttactccgcagtacaccgttggttgatttttttgtaactaaaaatttgaattttaagatatagttgttttgtaaatattgtttcttttgtttagtgtttaaaattgtataattgtcttaaaattgttaattataagattttacttgtagattatcgtcccgtatgaatatcaactcaaactcgttccacgagataacttcatttcgtaaaattaaatgttatttttgttatttttaaatattcttattgtaatatatatataaaaaaatggagggattgacctgtggtagatcttggattaatatattttaaaataatttgtgagttataaatttatgatattgtaatatataaaaccgatttttagtgtatacctttcaataattgtataaagtatattttaaaagtgaaactttgtataaattgatattgcaacctcatgaaatcgtagtgatttatcggtagggtgccacaagctaatttttattttaatttttttttataaacttataaatttgttgattttagttaaaaataaaaaataaattaagttatatttgttttcttattgtttcagattgtataactatattttgattgttaattccatgattttatctgtgatataatatttaccaacacccggctagtttcttttaatctaatgttgaccctgaaagaaaaatccataagaatacgcataaatggatagtaaattaggagataaacatcattagaacatgaagtaatttacttatgaatctctatctattttttttaaagaatcaatattctacattgattgtgaggcaatgtgaattacatattttcaatttaggatgacgaaaatattttcttaaaaagataaaatttactatgatctcaacgattttggtattttttaaaattaaacttatccttatctgtcaaaaaatcatattactgtttgttccaaagaaaagtcattcagatttcaaagaaaaacaaaagaatattggtgtgaatcaatattttctcatttttaatatttgcattaaaaaatttaaacattggtatttaaacttttttatactgttaaaaaaaagaaataatcaaatctagaagaatgaatattccaaaagcttgtaactatattttcttttctataattcaaatttagcttagttatatatttttaaaataatgaaaattacatgttttaaaaaaatactttaaaatttaatatcatttaaattctaatttaattgttaaatattttaatctatactgaaactattttgtagataattacaaatctaaaatccaaaaattctcttttaaatccaaaaatttaaaatcatttttatgtgtactaatcaaaaacaattaacatagttttgttaagaaaattgtataaaatctaaattaaatgataatttgttattaaattagattgaagtttccaaattatcgaataacatattaccaaaataaataagtttacatatatacaattcaaattaaaataacctgatatgttatgaaatttgttttaaatgattttcgaaaatattgggtagttattaatttattgatttaattcgattttttttgaaaaacaaaatctttgctatttatttagttgtagtagttgttaatttactaaattatccatgctaaaattcatttagttagttttaaactacccttacaatgttgtaattcacacaatccttctcaattaatagtatagatgatatatgtattaagttcaagagacaattaatcaaattttgatattcatctcttttatagattgatttaatggtcaaatctattaaacttaaattaaccatggttaaagtgggtggcaggatagttagtaacaataaaagattacgctaaattaaaatcaaaatatcatatatatatatatatatatatatatatatatatatatatatatatatatatatatatatatgtttacattattttcttctatctcacacaaatcatgtatgtttaaattattttctactagttttggacaaatagtgatagccttggaaggagacatgtttttgagagtacaatattttgagtaaggtaggattgttgaaagaaaagaaaaagtgaaaaagactactaagttgtttgttttataagagaatgatatatgtattaagttcaagagacaattaattgaattttgatagtcatctctttattagattgatttaatggtcaaatatgttaaacttaaattaacttgcttaaagtggtttgaaggttagttagtaaaactagaaaattaaaaaaaatcaaaatcaagatatcatatatatagggctcttatgggccacatcttactaagctataatatttcttatgtatttgattggctacttcaaaatgacatttttgcgattagcgtgatcccatatctattccacacattcaccaactttatcagacatgtaatctctagatactctcttccacgccatctaaattaatatccttgttgttttcatactataccagtaaataattcaaaagtaaattaggtttccgataagagctataagaacgcaataaaaaatatcactcgatctctccatcatagctttgttgtcactaaatcaacgtcggatgaagctttttggattcacaatctttatgttgaattcgtagaaaaagaccactatatgatgaggttaatgaatgataacagtgtttttgtcaagagtgataaaaagtttttaaggaattatattgtttatttcatatgagacaatgcctttttatgcacatatgttatgaagtagttaacacaatacataagaaacattacaaattaataagatgtggttcatgagagcccaataatgttgagtcttaaaagtgtatttgaattttgttgattcgatgaaataaaaataatttgatgaaaattaattgaacgagcattgcattaattttcataaaacactttcatatgatagtgtctcgcatgttgatcttaatctttttttcagaattaaaaagttttgcaaataactttatccccagtgtcaatgacgcctagtgaagtatttgagtttgttgaaaatattggttgttattcaaattttcagttactttcagtttgttgaaaataacaattgtaatggtagttgcatcatcattgggttgttattcaaactttattaaaaactaataaatgtatattaatatattttaattagggagattttgaaaactactctattggtagagtttgaaaactcaacatttaaatcttattcaaatgttgagctttaaaagtgtatttgaattttgttgattcgatgaaataaaaataatttcatgaaaattaattgaacgagcattgcattaattttcataaaagattttcatatgatagtgtctcgcatgttgattttaatgatttttcagaattaaaaagttttgcaaataactttatccccaatgtcaatgacgcatagtgaagtatttgagtttgttgaaaatattggttgttattcaaatcttcagttgtttcttaaatcctactaataacaattgtaatggtagtagcatcatcattgggttgttattcaaactttacttaaaactaataaatgtatattaatatatttttaattagggagattttgaaaactaccctattttttagtttcatttgaaaaatacacctttctatatttttaaaaataacaatttgtaatatgtaaatgataaattttcccgatttaaagtaaaagctttattctttataaattaaaacgaaatttgaaatttagaggaagaaaaataaaataaaataaattcgaaatcttaattattttaaacttttttgagataaagatagtttatttattttatacattaaattttaataatacaatatctaaaaatatttttgagactatcactaaatatttttgacgttataaaaataatcaatcttccacgctccaaagacatttttcaatagatagaatcctagattctttttttcttggaccaaattggtgtaatatttaaaataaaattgttatacttagtggatgattggttcatctgtaactgtagatttattgctgtagaatttttgcggtatgtgtgatggccgtaactgtaggttttattgctgtagaaattagactgtaggttttattaatataatattattactcaaagaaattggctgtagaaataaaatttttgttttatgtatttttaaacaaaaaaatattattggtaaattgtagttatgtgttatataatattattcacaaacataaatttaattaatttatatatatatatatatatattaaaaacaatgtgagttatatacatatatatatatatatatgtcatagagtagatatttacctactatttatatccataaaactaaatttaatatatatatatatatgaaaattatagtaatatttttaaagaaaattaaaaaaaatgaaaagaaaaagaaaaaaaatgtacagaacttctaaagaccataaacttgtgctttagaaaaacttgtacttacagccaaaataatttaaaaaatattattggggctgtaagaaaaaataggaaagttaaaacatgattgtttcaattttgggttgtagccattttagtggctttacaaaatttctacaccccaaccaatcataaccataaaactattagttatcaattatcaatttaaaattttgttttataaaatttttattttaattttaaattctttttaattattactaaatattaatgaagctattttagtaactttatatattaaaatttaatttttacgagaaacaaaagatatggtatttttcaaatgaaaacaggaaaaaacctgaaaacccccatcatctatttgtttctgtttagtacctatattattattttggaataaaaatacctcatttacaattgataaaaaaaatacctcatcttttatttgttggtaggttccaacccaggacttaacatatgtcaagggacgttaggaaattatttgacggagttagattttaaaattgaacacataccgttaaataattttgtaacgtccgttaacagatgttatgttgtgggttgcaatctactactccctctgttccttattgattgattttctaggaaaaacacaaagattaagaaaacatattaaatgttgcttttaaatgtattattctttgtaatttaaaattttcaataactctaaaccaattatattcaataatatttattaaagtttacaatttatcaattataactaataagtattgcattgaaaacctaagatatcaatatttttgaaacaatttattttcctagaaaatcaatcaaaaaggaacaaagggagtatttttaagagatgaggtatttttatcaactataaatatatgagatatttttattccaataataataataaaaatattaaacgggtaaaaaaaatagataagagatttttcgagttttttcccaaatataaacgcataagacatttatccaaatttattcttttaattaattgtggcaagttggccccacactcttttatgtaggtttgttgtaacacccaactcccacgtttaatatgctatttggtttgtaaatatgaggcagcccatttaatttataaaagagatgagggttttatcgccatgagagtgctcatgtatgtatatatatacttacatgtaccgccgtctttgtcgagccgtaaatgaaagctgagcaaacaaaccctagaagacatcattattgtgttgtggtgattagttgtgtcattatgtgtgagggtttgtaagaatcatgagaagaaaacacaaattaaataaagaagaagaaaacggagacggagctgaagacgtcgtggaggaagtatcaatatatcatcaccatcgcaaaggtgaagcaagggagatagagatctggttaatgacaataaagagaagtgaagatgaaggagatcagagtaggagcacaccaaaaaaagagagaaagagacgagaagagagaagaaagagagagagatcacagtcaagtgtaggagaggaagaattggatcgtgataataagtagaagcagtaatgagtctatttcgttgccaatcaggaatgtgggtgatgagatcaataaagggaagaaaagaaagaagaataagagaaaagaggaaagaggaagaacaggtttaagaaggtgttttgcagggagaactcccgacataccagatataaacatatctatattacggtgtcttgttatattcgagaagttatgcacgtttcttcctggacaaggacttgtatagtctggtaaatctggaaccctagaaaacagttttgtgttggtttctttgaggtaacgtttggaggtccaaaactaatatgttcggaatgaaactttgtgcaggcgtttctggtattattggctagacgatcaacggtgggattgcattattaacggttagttcttgacttatctttatgtttcaaagacagttttgtatggagtaagtagtgacgaatttgtaatgtttgattgaaaaattgagcttggcataagctaaagctttgcaggagctttcatgattcatggattcaggtcctggttgagggagaatcaagttagagcttatgagcatgtagttgtagtaaagattgcctaagtggaaagaaagcagaattgagtcttcatcatcaacatgccaaggtgagggtggtatttgcgaagcatggtatcattttcttttgttatggttcttgacacatgatatgtaggcttaggtctgattgcataggataagattatgtgatgatatgatttgatgattattgagtgcttgatataatgatatgtatggtgataatgtttgactatgaaatattatgtatgagaatgttaagtataagtatctaagtatgatgattatgtatgtctgtatgaatgaatggggagaatcaagctatgggccgtgctctccctagtaatttgaacagtgatggaccgacgggttaagagctggtcaagaacgcttgacaagcccggaatgggagtatctgagccacgagggccagcctccactgatgaggtttagtcaacacgaggatggctagactaacgatacatatgtatgtgctattatggataaaatgcttgttatgtatgtgttgttagggcatctctaaccctactctatttagagtaaaaactccaaattcttctccaaccttgctctttattggactctaaaatagaaatttatgcagaattgctctatttatatagagtaagtctattctctactctattttagagttgaaattttatatttatattttggtccctcaaatttaattttttatttgatacatattatcatttcacaaagaacaactacaacacgtaattttataaaattaataagcaaacaagtactaactttaaaataaaagaaaactaaaacataaaactagtaatttaatattctagtaaattgcttatagatccgctaagatagttaaaatattgtccaaatgaaatagatggaggaggagtttcttgatcttgatctcgttgttggacacgtcattttgtaaaatccgtgtttgttcagtctcaaaatatgcccgaacatttgggttttaaaaggaattcaaatcacaaaataaaattttgttttcttcctttaattgatcacatgtggaaaaatactctaatggtgttgtttaaaataaattttgtaatgtttttttattgttatatgatgtaatgtttttaatatataattagtgtttaaaataaataatatcatatgttatgggaattttgcaaaactataatatatggggtcagattgtaaattttataattaaaaggtatttgtatataaaataaaatataatatttctaagaataatattttttagagtagaaaatagagatatacattggagagaaacccttctataaaataaagttactctattttagagtaagatatagagttatacattggagatggtcttagaagttaaagcatgttaggttgattgcttctgtctaagtttatatgttatgatgatggttctatagctttagaaaatgttctatgtttcagtggacagagttgattcccctcatgagtattctttactcaccctctttttcttgttttcctcgggttagtagggaagaggcatgcttttcaaagtacattagttcgaatgaagtaggattgttgaaagaaaaaagacgtgagaaaaaggaaagaagttgatcgtgttttatagagagtgtgatatgttttaaatgcaaaagaaaaataattgaatgatgttttgaacaaagaggttttagggaatttttctctctattattgatctattgataagatacaacatctatatatgatacaacattagggtttaggtttagatatcaacttatctagagccttctagaatatactaatagaccatataatgggcatccacatactatataatattaatcataacactccctcttggatgaccattataaaaatatagtctcaaatgagcatgtaagatgatgctgcctcattaaaaaaccttaccagaaaaaaccatggttaaggaaaaaagagtgcagcgtgcttctactccccctcatgagtacaacactagaaatcttcaagatgccgcgatccaattatgatgaactaacttcttgaaatagtagttcgaaacgtcttggtaaataggctcgccaaatcttcacttgaacaaatttgtagggcacgtacatcaccattcttctacagttcattggtcttagaggtgactcatcttgatcattatctatacttaccataatctcatcaatgtatggtaaagactttgaataacaatggtctttcattattggaatcaaaatatttctctttatgtgtctatcatttctatattctttgttgtctccttaaaaacctttcatggaaaaccccaatgggataaaaaccatgataagggaaaaaaagtacaactatgcacataacgatatttctccccctgaaatcatcatctttaagatatgcattccagtcatatatatcatcttttaagaaatcattataaacatgatcttaatgaacaaattcatataatctctcaggtcattgaacttctagtccataacatctcttttatatgaaatattatttcattgtctactttgatttcaggtccaaatagtcttttgcttaaaatcatctaaactattatatttaacataggagttatgcatactctctttgtaaaagtcactattttcgctttcattcttattatgattcttctggaccaaatatatgtgaagatttttcatgtagaagcctataaagattttaaaaataacatctctcttcctaaatatttccgaagaatttcataaagactcggattcatacataattttatttctacatctttcataagaacgattttatctcaaattctttcattaaatatttcattgtatataaaatctttagaagagatctgataatatttaaatcatcaacatattttgctattcttgaaactatcttttaacaagtaaaaactaaggttattatcttctattcgcccgatatttcaattcataacaacatcgatttaattacatatgtatagtcctttgttctcgagaactagaatttattgcttctggcaataaaatccgtcttgcctgcttttagcaatttaaatctttacaggactattagaagcctttctcttattcaaacacataagtgatataaatagttgcattcaccacaagagagtatatctcgttataatcaatttcaagtctttgtgagaattattatgttcttgaacatactttgtatctcatcaagattcacttactcttattagttttacaccttcatgtgtttgaactactagtctgaatactttctcttcatattacactattctttctttccatgattgttcaatcatcattttatatatactttaaatagatttttcttttaaccgcagtttatgatcctcgattttcatctataacatcatcaaatgcttcattgcatgcaaaatattttacgacgttgatttgcttttggtttcattctattccatacatgactcaatttgttgagatttccatcattatcatttttaggtacttgaatctctttcttattcatgtctaactctcttctagagatatgtcataatttcttgcttcctctgtgccatattaatttttgctccttttttttcttatcttttccgaggatgcttatatattttggaaccaataagtccatcacgcttcatgcgatctttagacttattagcagttgatcttatccttctaaaaaaataattttaattggagcacagctggtatatgtgactttgacactcaaggtcaataaatgcttctaccatataatttgctaaactttgcaaatgaattatctcttaacttctagtatactttttttagtactaggattaaaataatttttttcaatatatttatttacgagcaattgattttcttcccctaatgttggaaagattgactcactgaatcaacactcgctctctcaaaccttaaatatatttctcattgatggaatctaaaacatgaaaaaaagttataactattattcatttataatccttaaaatcaaaatattaaaattaagaatatgaattaaaatagtagggtagattgttaaatttatcaaacaaacccattgtaatgtgtaagaactaaatgagtgttgaattatggataatatcactatctatactcaaaagaatcaaaaattaagaatataccattgttttctatataattagttctctctctttcatttatgtaagttagacaaaaatgctcttattgcatatatcaaattatttagcagtataataaaatagttatcgatatttttatcatcaaattcttgaggatatattatgaattagatgattatctattatgttacatgataataatatatatatgcctgtaagtaaaaaaaaatattatgttaaaatatatgatatcacgataagaagaatgtaaggaggtatataattaataatgtgttaaatttattttcaacatgctaatttatacaatatatcatataaacttgtcaatatattttaatctttcattcaccatgacataaaaatactgtaaaaataattgtaacgtactaatgtttcgtttagcaaagtatctaacgtaataatatagcaaaaaaagtctaattgccttttactgtgctgaatatacatacataaaaaataccgatttataattttaaatcgataaatattttttaacaaagaatttgtaaacttatcgcaatatcatagtttttagcacgttaaacaaataattatatgtttatcatccgcatattacaattatttttattcaatggcatttttgtaattaatataaaagaaaaggatattttggtttatatagtatttctctttcatacttacctatataactaatatatatgcatagattcttaatttcttcatcttctatgcatatcaattaatatagcccttgaattattaggtggaaaaaaagaagatgatgtaggtgtaaagtaaggtgttaaaatacggaaaagggtattttcatactcgtatcctattttgagtgtattttaatacctacacaaatttgtagggtattttcgtacctaaaccacatctttatttaatttcatacataaacttaagaaaatgtgcaaaattcagagtcaaacaaatgggagttagtcaacaacgtgaagattctgagttagcgaacacatggataatgacgtgtttaatacgacgtcgttttccagtgttaaaatgtaaaatgttcaaaaattttcaaaacacaagttttgaacccgtgacatctttgtcaatataagagatgttaaaccatcgcgtccaacaaacttcactggtataggcaaaacgtttaaggctaactgttttttgttaatttatttgcaaaatacgggattcaaactcgtgtattcaatgctttttaacggagtttctaaccattccatcccacacaagtttattggttatacgccaaatgtcttagtatataagggtaaccgttttgtcatttcaaattaataaaaacgtgaaaatttgatttcaatttaaaaccctcaaatttgatatatatgatatactgttatatatatttggtggtttgtagagacttgaaaatcagtataataaattgatggtaatttgcatgtacgtataatcaaatttttttgattgcaatgtacattgtattgcattcccataaggtttgtgtacaaatgaaaattatctttattttataattaacttagagaaaacttgaaataatttaaacattcggaaaacaatatccccttaatatacatataaaataaaaaaattgaaaagtaagagaactaaaacttcaaaatgtaactaagatgcaacactgtaagaggttgttagctgaagtacctaattaccattgtaatactccaatcccacatttttgggtcaaattgttttaacataatgatacaagtccaataaaatcaaatagcttcctcaactacaaaaatcaggttttgtgatttctaaaggatcgtgtatctatgtatatgcatatgtatcgctgcctccataaaatctgaaaagaaaggaagagaatacaagcaagtctcgaaccttatccctttacatgtcaccactgtcgagatcacgacttcatcatcgtcttcgttagtgtctcggtccaccatcatgttatgttgatgtggagaagaagagaaaggagaaagagcagaataaacagacatgattgtgatccatgtaggaagataaaagaagaaagagacaaagagagagaatagatgacgagagagaagagtaacgtcacagaggagaagttatcatcacggtcaagtgttaggagaggaagagttaggttgtgggagtaagaaataggtgataggattaagatatgagcatatcgaatatgtgcagagaaaattagaaacaaagaaggaacaagatgaaagaaacaaaacaatttcaagttggggtttcttagactaatccatgtcgaaccagagagaaggataagacaagttagacatgtctagaaatttcacgttgcaaagaatccatagcaatttacggatcttaaattctgattatcttcaataacttatagacgtttctttctggacaagtaattgctaagtttgtcaaacccagaaaatcctaaaagacagtccgagatggcttgttgacggcaatattttcttgtgatgatgtttgatcttactgtaaatttctgagtttattcatatacaattgaatacatattcaatggtgggattaaatttctaacatttaaaagttgacgtatgcatatgtttccgagacagttttgtttggaggaaattgtaacaaggttgtattgttgtttgggcaaacaagctctgtttgagatttaattttgcaggagcttttaggattcatggaactaggtcttggttgatggagaaccaagatggtggtcaatagttggcggttcaaggcaagctagtacttgtctaaatgaaacaaaagaagaaatgagttgttcttcatcttcaataggttaaggtaagggtggtatttgcgaagcatataggcatagatctgaatacgtaggataagattatgtgatgatatgattgatgattgggaataaggattaaagcacccttacctttcgcttttgtttgcaggcgatgttcatgacatgcaaatctaagactcgatactcctatccgttttcactctcaatttcttctcgctgagtagaattcttcatcaaaatttgggtacacaaaagtccgagatttcaagacataaattcgttctcgtcggtgttcttcaatccggaatttgttacttcttgctaattgccaaaaatctgatgtttcgttctattcaccttaataactttcaatcgatgatgattgagagctttgtggataatctcataaaagtttacttctccaaaatttagacgagttttctatgaagaaaacaagttttaatttttctttactttcacttttcttctgtaataacctcttgatgagacgtgttaagtcacatttttataactttttataagttgtcttaatataatattatcgcgtctttttgttgaaaacatatagttctcgatactttttagtatttttctggtctttggacatttttatgaatttaagcgtctagaagaagaaatagaaaaaaagacgtcaagagaagagaaaattggaaaagtatcgataattatatgttttcgacaaaaagacgtacagaagaaatagaacaaaagacgtcaagagaagagaagattggaaaagtgaaccgaccggttatgtaattgaaacggtcggtatgtgttggagctggattcccctttaggaatccacctgcgaaaataccaagctagcccacaaaagcccaccaagcccaccaagtagaggacctacgcagctgacgagcccacatacgcgaatgggcacttgggccagataagcccagtcacctgatgaagggagataagcgaataatgacctaggaactgatgaggagatattcgcggagcggacctgatatctcggaactgacctgccgaatatccaggaggatctccgcagatcccggacggagctaccacgtgcgtagacccatataagggagcgaggacgacttggaagacacattcaatctagcttacattcatacacacacttttacacttgtaatctcttttcacattgtaaaagctttgtcataattaatacaaaagtccattcgttcttagcaatataactctcaaggtttcagtgaagatctagccctcctttctcataatcttaaatacaaatctctagtgtggatttcagaacccacagtatgtatggccgcaaaccaatcggttaagtcttataatcgatcggttatgttttgtaaaactttatttttcttacatttagggttgtgtttcaaaaattatagatactctttattttgtagtcgtagagacatacattttatatgtgaattttagttttagagtgtttttgttcttgttcttgttcttcttcactagtttactctaaaaagataatcaaagccctatggtaatccttttaacttgttgatcattcttctacaatgattacatgtacattagtcatatgtgagtagtcttatcatagatttttgggatttctaaggagatgtttatagaaaaacctatatgtatttcttctctatgagattgatgatttgttttccatctttaactgtttttcatgttattagttaagttagcccaacatgcttccttagttaactatccagtcgatttcatcaagctacaaaatgtggtgtagaattgatgaatccattatttcattggtaaagcttccttatccaacctcatcacaagttgatgttatggggctctgtgaagttataaattttttaaagcttattagaattgattgaaacaaatcttaccaaaagtttagtcttcaaacaatatctttcatagatatgtttactacggcattagtaggataatttacataagtaatctaaatttaagaaccgtcattatcataatcaatcttgcatgctttttataagtctctgatggtatcttaggttctatgatttcttatatattcctaatttatttttgaaattaactcttatttattctagtttagttaaaatctacataattattttttggagcaaaagtttaaagagtaatattagtagataaccaaatttgacactataattaagaaactaatgttggagttagttttctttgcaaactaactctttttatgtggggtagaggcaagataaataccaaattgtccttttagaccatagtgattacaagacaatatatttatttggagaagatgatggtgaacatggagggcgagttcattgtaaaagattaaaaaaaaaaaaaaaaaaaaaaaaaaaaaaaaaaaaaaaaagtagcaaagttacaaatttggatggaattggtgttaagatttatgaatgcaataccagaagttatagatgagatatagaaggaagacaaacaaatgatggtaattttaataaataacatgtaccaaataaaaattacctgatatctgaaacaaaaaaaaaacattgaaataacttgaaattggtgaaaactatagtgtttttagaaaatatagttcgtaataaaaaacaatagcatgccatgtcagaaaatataacttgttaaaatgatatatcatgctgaaaaaattgcatgctagtttaaaacaaaagacatgtcatattaaaaaatatctggttaaataaaataatatcactatgattttttgtctgaacttatggagatgctgatgaaaaatagtttgatggttgttcattagtcattatgtgaagttgattgaaaatagtggagatgaaatagatgttaatattaacggtggagtgagagttttcaagatgttgagatcaaattatgataaaagaagagtatatggtaatgatattggttatggagatggtggtggttcactacgaaaatgacagtgacgtataaaagagaaataggtagcagttatttcaaatatggatggagactctgttgtcggcgaaaaatggatggagagagaacacaaaattaaaaaagaggaatggaaaaagaatttgcaaaggttggaagtgtaatttgcatagccttcccgacaagatactattgttgaaggttagtttctttattcctttatgtttcatggttagtttatgcatattctaaagtttaaatctaaatagtttattttgtgattcttgtgggagtaaccttgaagcttacttgaagaagaagctattcaagaaaaagaaaattaggattagatattagatttaggaagttgcctaaatactatgtaagttctcctaaagaattaggaaattatctaatccttctcttataaaagagagataccaaagtgtggtattcctcgtgaattataacagttgagattaagagctttagttttgagttattttctaaagctaataaagaaaattattctttattgatcttgacttcttaatctttgtgtgttctaataatattggcaaaacaaaaattggtatcggagcgatttttgagttctaaacacaagaaagacgatgagcgatcctgcggtgatgccgaacaaaccaggagggggaggcgatcgtcatcgatacaatgtccgatgttaaattcaatcaactacactgtatgggccataaggatgaaaagtacgcttaaggtccataaggtctgggacacgataaagaacaactcaactgatatagagaaaaatgatatggcctcctcctcgttgttccaatctatacccgaagctctttctacaagttggtgaactaaacacggcgaagaaagtatgggactacattaaaacaaagaatgttggagcaaagagagtcaaagaggcccgactacaaacgttaatagcccaatttgattgtattattatgaaagactctgaaacaatcaacaattttggagaaagactctgtgtcatctcatcaaaatcggcagctttaggagtcaatatcgaagaatcaattctagttaagaagttcttaaagagtctacgttgcaagaagtacattcaaaatcgtggcatccttagaacatgtcctagacccgaatgctacaagtttcgaagacatcttgggacgtttgaaagtgtataaagaacgaataattgacgaagaagaaacagaacaggaaggtcaaggcaaacttatgtatgcaaacttggaggttcaaacgaatcagtacaaccaagattataacaatgattatattagttccaacggaggaagagacacttcaaaggtaacatgttatcagtgtgataagttaggtcactttgcctctaattgtcatgatcgactacttaagttacaagaagctcaagagaataatgacacacaaaatgcaaacgatcttatgatgcatgaggtggttttcttaagcgaaaagaattgcaaaacaagtgattatgaaacaaacaatgatgaggagaacatttggtatcttgataacggggtaagtaatcacatgaccggtgaccaaatgtattttttgatgattcacaactcaatcaaagaaaaagtaaggtttggtgacgacctatgcatagacatcaaagaaaaagggtcaatatcattcattgacatgaacggagaatctcgagttatgagcgacatgtactttattccaaacttgcggagtaacatcatcagcggaaagtcggcttttttatatccaaccaaagtatcagtgttcaatttatacctaacagttttctctgtgctaatatatgcctaacgttttaaataattcaaaattcatacattaacttctctaatcttgcaaaatcatacattaatgctgacatggatgtcacgtccttaataatgttggtgacgtagatgtcacgtctttgatgatatcattgccacatcttcttcttgttaaaaaaaataatatttatctctcttcttcttccaatataaggatgaaaggagagcatctaacaatgcacaccagtgaagggaagttgatcgtcaaagcgcatcattctcaaaaccgactgtctaaagtttgtatggactaagggacactacttgttcgcatctcgcagtgataagtgagtcaaacaaatggcacacaaggttaagacatataaaccttgacacaatgaaatcaatgattcaaaacaaaattgttcaaggaatccagagtgttaacattgaaaaagagatttgtggctcgtgtttgcttggaaaacaagcaagatatatatttactcaaggtacagcatatcgagccaccaagattcttgaacttgttcatagagacctttttggccccataaaaccaagcaccatggcaggaaataggtgtgtatttgttcttattgacgatttttctaggtacatgttgacagttcttttaaaggagaagagtgaagatctcaaaaaattcaagaaacttaaaagcttagcggaataagaaaccggtgcaagcatacaaatttttaggacggatagaggaggagaatttacatcgcaggaactcaaaatgttttgtgataatacgggtgtaaagagacatctcaccgccccttatacacctcaacagaacgctattgttgaaagaaggaatataattttaatggagatggcacaagcatcctgaagcatatgcatgtaccaaactatctttgggaagaggcgatacgatatttgacatatcttttgaatctaatagccacaagaggctctcaaggatagaactccgtatgaagtactctgagaaaagaaaccaaacatcagttatcttcagatctttgggtgtagcggatatgcaaagacagaaaagctacatttgaggaagcttgatgatagatcacatatgcgtgtacacttaggaacatagtcggggtcgaaagcttaccggatgctcgatccaccaacccaaaaggtcgtggtaagtagagacgttttttttgacaaaacaaaaggttgaatgacactaactcaaaaaaatacaagaggaagagttttaatttcatatttggagagtttggaaatcgtggtattcaaagtactagaaaaagtgtcgaagtggaacagatcgatgaagaatattctgaaaatattgaagatacaagcttagatgccgataaagaacaagatgataatattccggtagtgacacagagaatgataagtcgataaagaacaagaggaaaatattccggtagtgacacatggaggtgaaacagagaattataagtctcaagaacaatcggttgttcagttaagaagaacagagagacaagtctctatgcctaagtatcttaaaaattatgtgttgctagccgaagaggaaggagaaagactgttgttatgtttgaataatgagtgtagagatttttatgaagtaaaggaatcaaaagaatggatgcttgcttgggaggatgaattttggtccatcgaaaaaaatgaaacatgggatcttgttgatcttccggttggtggaaaacttaagagaaactcgacggaagcatctacaagtacaaggcccgactcgtcgcaaaaggatatgtgcaacgttatggaatcaattttgatgaaacttttgctctggtggctcgacttcaaacaataaggatacttatcaatattgttgcttcaaaaaattgggaaattcatcatctcgacgtcaaaacagctttcttacatggagagttgaaggaagtagtatatgtcatgcaaccggatggatttcaatagaaggaaaacaaaggaaaggtctacaagcttaagaaagctttatatggtctaagacaagctcccagagcatggaacaataagctgaatcaaattcttctcgagttgcaactatgaaaaatgttccaaagaaccatccgtttatcgaaaggaggtaagtaagaactttctcattgtgtcagtatatgttgacgatttatttgttacgggaacaaatgttgcaatcatagaagagtttaagggagagatgagctcgaagtttgatatgagtgacttggaaagattgacatactatcgaaggatcaaattttgtcaacatgagggaggaataatattgaatcaaacacggtatgctttgaatattctagaagaagctggaatgctaagtgtaacttgatgcacacaccaatggagtcggcgctacaactatcaaaggccgaagaagaaaaggggattgatgctacatggtatagaaagaatgtgggctctcttcggtacctacttcacacaagaccagaattatcttcttgtgtgggagttttgactcgttatatgcatgaaccaaagaaatcccatggagtggcaatgagatagtctaaggtatttgcgaggaaccactactctcggtttgacgatcacccgatcgaaatctaatgttccaaagcttatacgatatagcggtagcagtcgtaacgttgaccctgacgatgagagaagcacagctggtcatatcttcaacctcggtggatgcccggtatcgtggtgttaaaaaaaaagatatcatggcgatgtcttcttgcgaggctgagtttatggctgggattgaagcggcgagagaggctatttggctccagaatttgcttagtgaagttacgggattaacatatgtaaactctcattcgtatcgatattaaatccgccattgctcttaccaaaaaccatgttgttcatggccgaagtaaacatatacatagaagatatcatttcataaagagtgtgttgagagtagtcaagtggaagttgaacatatccctgggaatgagcagaaggcaggcattttaacaaagactcttggaagaatgaagttcaaggggagaatgttggagtaagtttgaagcttacttgaagaagaaggtattcaagaaaaaaggaaattaggattaaacattatatttaggaaattgcctaaatacatatatctaagttctgctaaagagattagaaaattgtctaatccttctcttataaaagagagataccaaagtgtggtattcctcatgattttaagcgttaaggttgagaactttagttttgagttattttctaaagctaaaaaagagaattattcttaataaatcttgaatgcttaatctttgtgtgttctataatattggcaaaacaaaaattctttagtcgttttgaatttgatttctaaatataattgtatttgcttatatacttgcggtctacattaaaagtaaaacatttactcgttacaagatgcaacttttgaatgaggacagttggcttttctaattggacaaaaacaaagcgttatgaaaaatatttttgtccaaataacctcaagtagttatgatgtaagaggttagtgtaactgtaccaaattacgagaaagtaagttaaaattatgtgtaattcaaatatttataatatttatttacattttagcagtttgatgactctgcacaaacacaaaataaaattaaataaccaaaactattcagtaatatttgttttagtaaaattattgaaatattttattatctattggtatatacttaaaagacaaatcgttaaaaacgtaaatcattataaaagttgaatctaatagagttgaaacagtttgcagtccaaatacgatatttgaataacttgaacatacttgaaaccaaagcataaaaatataagtataaagtttaaattggcatagaagcacatgggaggggtgatttgtttctgacaccggcttggtactccaataaatgcagtacattttaaggttgggaattgggatgaaaacttgaacaattgcaatatttattttggtcaaacagttttaggtataattttagtattataggaatacaatcaataatatattaatatgaatgtagtagtttgaacgaaatgaaagcaataatataaatgatgaaaaaagaataatgttgccggattaagacgcggttccaccattacactcgttgctttaagtcgtctttagagagtagagaggccaccgttttctttctattaaattattcaaaaaatttcaaaacaattaatatatatatatatttggtagattttttgacaaaaatatctctactatttactaataacatacaagtctttacaaattctatctcaaccaaatattctattcctaaaaacttacaaattgttaatttacgatttcttctatttagtttttagtccctacaaaatttatctaaaaaaatcttattctagatttatatccttaactaaatcttagatttattaaattatattaaattattgttaatttcctcaaatctctctatctacattaataatttgatttttcttttatttttatttgtttttatatttgatttatttttattttatatataaaatacatatagttaaaaacttattagttttgttttttgcatattatgtaatttgaaattttattcatacagaaaagtaccaaatactttatatacgcaactaaatcattggtgacaatgatatctttttttggatgagtatatttggctaaacgacaactatttatggcccagaaaatgtattcagaaatagaaatcgctttcgcgaatgatagcaacaacagaatttgccacttactatccactaaaatatattagggttttataatgttcgcacagtaattttgtgaccttatgttaccataaattgcatggatagattcaacgtcttgtcaaaagattgtttaagtcattagtggctatatgtgacagaatttgctactaattatccactaatattaaggtcatattctaagtttaaatagttgtcacagtatttatcttaccttccattgccataaaacagaaatatgccatgttttaagtctttctcaaaaataaaatccatgttgagttttaatgatattgttgtgattttagtgataagaaacaaatcagaatgatagtcgtctaattaaaaattgaactgttttatggaaaatgttttagtgagtatgttttcatattaggagtatagattgggatttacaatgtgaatgtgagaagacaataaatcaaaaatcatgttctatttgactatcctccatcaattcaaaatatagactttttgtatatttttcctgcgctaagcatgtacatgatccttcgatctatatgaatcttaacatttttttatgaagacattattgtgtatggatttactcttggaaatcccgaatatctcatgtattatttgttcatactggttgtaatgctataattcattttactattattttaagttcatcaacctcggtgcgtattttttttcttttataagaaaaccttttttatttctgatccatatatatgttttattgattttgtactatttatttttttcttttgtctggcaatttttttttttttttttttggcaacgttatctggcaataattaaagtattactattgagaagaaaacaaaatagctaaaaatttaagataaaagtatttaacatgtccccacaaaagaagctattccccgggtctttacgttgtctctttccactgaccttcctcttctcttcttaaactctaaagacataatatctccaccagcttctcaataaacatcacaagcttcacaactccaaaaacctaattattcaaacttaaaacaaagaagatgaaatgcatggtgaagaagctactatgttgtggagccaagagcttctcccaaagagctagattaccggacgaaggacgagtccgagtttatgtcggaaacgatagagatacacaatgcaagttagagatggatgctgatttcttgacacatcctttgttcgaggatctcctccggttatccgaagaagagtttggtcactcatacgacggtgctttaaggatcgcctgcgagatacaagtttttctaaacttgatccattaccttaagtccacgagtcatgctcctcattattatattgatgcatctcattatctttattgataatacaatggtgatggtgggaatagaagatagcgtccttctcacctatgagtacttgagatttcatattattctttgaagatgatctcaaagattatctcttcttattctttattcttcaacaaagtatggaagatgttccatatttattgtttacttctgatttgggagtgaaagcaaatgtaattcatctcgatctttattgtttttccttctttttttggaaaattgataatacaattttaatgttattgggtttacttttgtgggtcaaagttatatgatgaacatttgtttttccattaaaggactttcttcattaatgaatttattccacagtttactgcttttttaaaataaagtgtaaaagaaaacgaaaactttacttcattttttcgttaattattttgtttaagagtatgtgtggttagacgaaacaaatattatattcaatcaccaatctatttcggtcgcagtttgaaatatatttagtaatatttcttttgttgcttatggtgaagtttatgtaagggattttgctttgacttggaaagaaagctacagagaacttttttcgaaacttaaaaacaaaaaaagagataacaagatggaattacagctaatacaagactttagtaacaagatgagtcatgaggctcccacatgcctagggctatcaagataattgtgcaatgtcctaaaccaatcatcaatttcatatttatccaactggcacatttaatacaaactaattcttaaatgaatatcatttgtactatttttatcaagaagaatgtcagcatatttcacacatattagaaataattcaaataaatatatatgtccttgctaaatagggaaattttctaaaatagcacatttaaattaaaaatatttataaatagtttaattaaaatatatttttataagaagttatgtgaaaaggataaaacttttttcttaattattaaaagtaaaaaacatcgaaattagaattattaaacaatgaattacgataaacggaacaaaccttaaaagatatttattgagatttttccttattaattcgattctagtaaagtgttattgttactaactatgatggtaaaattattggaagttaaaaatttaaccgttctgtcatagatttgttttgttgtagaaagaactattcattacgaattggtatgtgtgatcatgatatcatataaacaagaacataaaacataaaatatatacaaaaattaggcaataatatgtaactaaaaatatcatatataaccgaaacggttattttttcgatggaccgttgagtcaatcaagacaatgttgagaaaccatcctaccacgtacagaaccgtcaacattctcgcacatcgctttggattgacctttctcgagtccagtatgctttaggttaatatcaataagttcaacattcttgcacggaaagctcttgctacattgtagattcactgccattatgttcttcgacgttccatatatgttttttaacttaatgtcttggatctgaacgtgagactcaccttgaacaaggaaacacaagtcgtcttttgttttatattacattgtgattgaagaaaaaaataaccaagcttgttcatgcatataatgttaaccttttttcatgttcacaaggtgggtgagggcaatacttctgatcaatgttgatcggttttccaacgtcaatcatctgaatattctcgtatatgaagttagtaactacgattattgaagccgaagattcccaagtcttgattcgaataccatcgcttgtgccgttaaaaactgtgtctcttaccgttaagtgcttaacgtctttctcgtctttgttctttcctaagcttccaacactgatcccatgtacagaaccacacttgacgttagagatatcaaggttagtggtcccagagagaatgacaatacaatcatctctagtaccgatgtttgtgtttgagatgtgaatgttgctacaagaacccattttgatactgtcagtatttgggctatcaccggagctgttatagtgacgccggtaatgttgaagtgatggacagagaagaagttaaagtatcccattttgctgttgagtgatgttatgtctttgattcttgagttgttcacgaatgcaaatcccatagtctgtaaacatttcaaattttatcataccactagaaataaagagtagatacttcaattcatttgtgtataataaatatatatggttcaaaaataaatgatcaaattatacttgttaccattgtataatatattttcaatgtaaacaatatataatcatattttctcaaagaagaaatatattataaaaagaaaagcgtaagaagaaatggtaccatagctaatttaggaaaattggtgtttttgtggcagtcattgagtggccaaaagtattttccttggccttcaattgtaccggaaccgaagatagagagattgttgatgtatcagaagttgatccatgtgtcctgcttaatgtccctagggtttgcacgagccaataaagtttcatcgatgacgaattcaataggatttttgcatgacccacaaactctacaccaccgaggtagaatgttcgtttcggtacgtagattttactacttccacttatccttgtgcatgcacgtttctatacacttgtgaatgcctaattttctatatgttaagaataagataggttaattattaaacaaaaaaatccatagaagttgataaaagatttagttaaatttaattggttaatataataccaatccatatattgttatgtggaaagtcaagaagatttatataaactatcatatcaaaatgttttttcaacatatattattagattatttaaatatatttcgatattgagttgagcttaattcaatgtatttggaagttgggaatcaacaaaactaaataaataactattaacattgattaggaaagatattgtgtacatacattggcattatcagtttttccgtctggtctagaaccatggagtcagacgttgaaaacctttagtctgatagtcagacgacttgcaacagcaatgaacaagaaaaaaacacacaaagctttaaacgtagaagcgatggagaccatcttattcttttgtttgggtatatggagatataacaaaaaagtgtagtttaataataattgttctaagagtgtaagacataatgagaagtgtttgcacattttatctatttatatagagttaacatgtctcaacagactgttaaaagtatttaattattattatcaattaactattaaatatgggctgcttttttattatgatggtgattggttaatatattgttatgatgattttttgagtgtatattgtttactttttaatctcttcattaaaacagaatcttaattttggtgaatgtgctaataagataatctataatttgtttcttcttttaatgggttttaatttaaattggataaacccaaaatgttttcccaatgatttctttgtgaaatttatttttattttgatggatattaaaccttagtatttacatcgttctgtaaacttgtatttcttcaaaattttcataagatataacgattaaattgctaaacccatttgaaagcctaaaattgcatatctccattactctggttgatgttttttattcataaatcacaacatggtagtaaaacaaataaataattactcactaaattaaataattaatgaaaattgtcaatttcttaatatcataaaaaacaaattgcggtctctaaacgaaaagtccaagaaaatacaaaggtgatcattaaaatttcaaactgtttctatgtgaacaatcaaaatgtttcttaattatattcttctccttcatctttttcggcaatctcgatgtctctctgatccgtcagtcaaggttctccttggcgatttagtaagtaggtgatggaagtcgttcccttccggtgtaaaattctccttgcgatgtacgacggcattttgtaaattttgcgctgcctaaacacatgatatacattattgtgtcatgttatttgcgaatattttgggtaatggaggaggctcaaactttgatttttaattcacaaaaacttatgacatcaataaataatttaaatatatatacatgtccttctaaatagggaaattttctaatagcacatttaaattaaaaacacttataaatagtttttaattaaacatatttttataagtaggtatgagaaaaaaagataatactttttcaattgtttattagaattatataaacctttaaattaaaattatttaataaaagttacaataaactgaacaaaccttaaaaaatatttattgagattttccttattaattcgacttctagtaaagtgtaattgttactaagtatgatggtaaaattattggaagttgaaaacactagattttaaccattttaagcccttgtttttcatgcatttggcttagtttcatgtctcttttcatacattcttagtccattttccttccttttcacattttgtattgcattgcatagcatacttacatttggagtgatttacaggtgaatcatgtacttttggatttaacttgggagtttctagcacaaggagtggactacctcgagtttgtgcgatccaaggaaggacatggagtatactcgggatatctactcggctggagatcgagcggagcacacaagggagaaggaaggattatactcggccaatctactcggctggagctcgagtggtgcacatgaggaagaagggaagctgctcgattgaagctactcggcctgaagccgagtgatgtgaccaaaggaggctactcgacttttctactcggccaagacccgagtggtgcagcgccgactttcccattttgtctttttcccaattagggcatcctagtattgcctattaatagacctcttatgtttttgtccaaaatatctttgctttgtctactggatattagggttcttagatttcttttgcattttctggttgttgtgctgagaatctgaatttcatttcttctgcatacttgtttatcttattgaaatctatcatttgctaagtttataatgatttctgggttttatgatttttctaaattttgttctatgatgtttttcattgttcttgagtagtcttcttcagagttcttgaggatgggttaggtttaggtggattcctctgttctttagctagctaagtatttatatgcatgattccctgctattttctttctgatcaattgaaaattgatttcagactttctccaccgactaataagtgtttgatgaaatgtatgaaccaactaatttcagagatttgtagactctaccccaaaacattggatgtttagactgcttattgattagcccaagaaatttgtagactctagcccaagacattggatgtttagactctagcctgctttattatgtttcatcaataaaagttgagattaggaagtgataaagttataaggatcattgtcatgaaaatggattgatctggttttgaatctattgtctagggataacttgatttagtttgttagttagctaatggattgaggagtccactagaaccaattaccctaatcttaagagctctgttttgtttattgtgcaaaactcgtgtctttagtactctgctcgttctgtttagttcttgtgcaaaattggtgtttttagtattctactcgacctgttttagtagtatgctcggccgagtacttcactttgtgctttgtttactttcttgttcttgtatttgactgttcctggtctttagtttcatttctgcttttatcacttgtgttctttaccttctccttaatatagtttcacttctgaatttgatttgcatgttaacctattgtttaggtttagtagaaacacaccaaacctattcacacttggcttgacttagtattctctgatcgcattctgattgttagcaattccacccaattggattgaaaccttaaatgctacaatgacataagatgcatttatggaattgacacacaaaacccttgtatcaattttgcgccgttgccattagggtgtttttcttgttacatttaggatttctgagttattaagatcaagttctatttacttctttttggttactcacttgtttcttcatttgcttgtttttgttttgcacgtactcatactagactagcacgtcgagtatacaagccgagcaacatcaaaacatatgcaaactcgttcttaaggttctggtaatctcatgcggtacagagacgacatcgacaggattcagcgtgaactcagagaacaacaagccacttcaaacacagtaccaatggctaatgaggcgaatgctaatgagttgccatgcaacattggagctggagatgcacctagaaaccaccatcagagagatggtattgtccccccctcttattcagaacaacaactttgagatcaagagtggtcttatgatgagaacataaccaatgcaaccaaaccacttgaaccacaagaagacgaggagcagcttgtaccggaggaagcattaatcgttccggcgagtcctctaacaagatcaaaatccaagaagttcaaccaagctatcaatggactactcaaggagctaaagaagaatcaagaagacgtggttcaatcctccttcatagtgatcacggctcaagaggctcgataaagggttaagtgttgcttatgcactctttttcccttgtcaagttttgtcccaaaaggttttcttgacaagatttttaatgaggcctaagtaacactttcaagcctccctttatcagcccaattcgtggtccaaggcccactcacaatgtcttgccccattctctcttttctattcaaactttgcatttattgcttttgttatttccaaaactctttgtatgagcttgcatgagtgtggacttgtgcatgctcttgcatgtctttcttctctcacctcttccctttcttcctcctctcctatttaaactcattgtagttctcatttgcaatcatcaaacattttaatcaaaaaaccttctcttttacttgtttgatccgaaaagtgtgtaatatcttttcaacttgttttcttcttagtgtgtaatatctaagttggatccaagctagtagtttaagagtctttcatcactcttggaagtacaattcgttcccctttcattccgctgtatccacccgatcttgtcttcatcccggtttatcgtctttccaccgctttgttccgaatccatccattattcaccatcaagtacataattttcaattcaaaaacaacaaagtgagtccttggaacatacatccacgtccaagaatgtatcatgtggtatcagagccattttgttatcaggttttgaagttccaatcctaaaattctgtttttcttctttcagatctctgttcaatcttgcgtgaattttataaagtatttggctcgttcaaaaattaagaaaccaattgcattcgaaccggttacgagtctagtatttttagaaattaatttcggaatgttttgagtcgttttgataatttttcagatccgtttttatttgcttgtttttgaactgttttactagttaaatttataatttttcatgtacaatggtgacaagtgaagaagatgaagcgtcatctgcctctagcttagaaaggaggattttgaaaacagtcatatcagctatatcaacattaatcgatgaaaagcttggtgctctaaacttacatcaaatcaacccggacgcaaatccacgtctaagacaagaagaaccaagggaagatgaagaggcaagaaattactatagtcacacctcctctcacagtagccaacgtaggcatcgacgagagagaccaccacttagagatcccttgggaggcctaaaactcaaaattcccgcattccatggaaccaacaatccaaatacttacttggaataggagcagaaaattgagttagtctttctttgtcaagaatgtcttgagtccaacaaggttaaaattgcggctactgagttctacgactatgccttaagttggtgggatcaacttgttactagccgaagacgtacccgaaactatccgatcgaaacatggaaccagctgaaaaccgtcatgcaaaagagatttgtgtcgagttactatcatcatgaactacatcagcggttgagaaatttggttcaaggaagcaaaaccgttgaagaatactttaaggaaatggaaacccttatgttaagagctgatcttcaagaagatggagaagcggtcatgtcccgattcatgggaggtcttaaccgagaaatccaagaccatctagaaactcaacactatgtggagcttgaggagatgcttcacaaagcggtcatgttcgaacagcaaatcaagagaaagaacgcccgatcaagtcacaccaagaccaactacagcccgggaaagccaagttatcaaaaggaagagaagtttggttatcgaaaggattacaagccgttcgtcaagccaaaaccggtcgatctagatccaaaaggaaagggtaaggaagtaatcacgagggctagagatatccgatgctttaagtgtcaaggacttgggcattatgcgagcgagtgttccaacaaaaggatcatggtccttagagaccatggcgaagtagaatccgaagatgagcgtgcggaagaagacttaatggaagaagatgtggaatcccctgctagaggagagttacttgtttcgagaagatcgttgagtgttctaactaatatgttgcgtttttggtgtcttaggtcctttagttttgaatcgtttgtcgtgtcatagtccgtcttttgtgtcttttcggttgtgtcttgagtcatttgcaggttttaggtgtttaagcgggatgcggatgctttcgagacttgtcaggctcatttggaccaaaaacaacaatagaaatgaaggttcagacccgccagctcgggatcgatcgatcccaggaggggaccgatcgatccaggtcgtctgccagatgaaggttcagacccgccaggatgggatcgatcgatcccagggccagatcgatcgatccaagtcgagaacaaatggagatttagacccgccagctcgggatcgatcgaccccaaggggggatcgatcgatccaaccctctcgacgaccagaccggttttccttaaccggatttatctgcctttttctgtaattgggtatgaaaacccgagagacctaattttatttctactttttcttttacgcttctttttctgcaacatttctaagaacctttttgtaagcacatttgggattagagattcatccactttgacactttggagaagatttctgaaccttatctcatttatttaatttgaattatgttttctttcatatctctttgtgttgttcattttgctatgagtgagtagtctcttaattgggtgttagggttctaagtaggggattcaatgaattgatggtttgattgttgtttggagttcttaatctttaagttctttaattcacatgttcttaatgctagaatatgattgatcaccctgttttagattctagatttttctatgcatcaaaagtgttcgatagaatgcccgaaccaatgtgatttgagcaatgtatttctagccaacgagagttgatgctagaatgcattgtgaacctaatgaacctaattgtaatgcgaacttgactaggaaattacatgcgaaagtttagtaatcgagtagtcaaatttagtgattaatgtcttgagagagaattagtctaaacttgtgttcatgttcgagaacggttctttatgctgaattccttgtttattatttccattaatcattgttctctgaaataccatattgcccaatgtctttaaatcttggaagttaaatcgtttaatttatttgcatttttattttacaatctgataactcaaacaaaaaccatctttccgctttagctaagaacgtgtctcggaaatctttagagtatctttggtccttgtggatcgacctcgaatattctacttcggttagatatttcgggtaattactcgagcaatcactaactaaggccgaagaacaagggcaaagggaaaacttgtttcatacacgttgcttggtcaaagataaggtatgtagtttaattattgatggtggaagttgtactaacgttgcgagtaggaacatagtcgagaaacttggtttagaagtgcttaaacacccgagacagtattcgctccaatggcttaatgaaacgggtgagatgtccgtcaaagaacaagtcaaggtaccactaacaattgggaagtatcatgatgagatcatgtgcgatattctacctatggacgctagtcacatccttctcggatgaccatggcaatcggatcgaaaagttcttcatgatggcttcaccaaccgacaaaccttcgaacacaatggccgaaagacagctctcatcccgatgactccgcacgaagtctatctagaccagctaagtatgaaacaacgggccatcaaaccaaccgaaccaatcgatacaaaaggcaagaacaaggtaagtaaaaatagtttactctttgttttcaaagaaacacttacttgttcaactaatcccgtaccggtgctaccgagtaagatcgagttgattttgcaagagtataaggacgtgtttccagaagacaatcccataggtttaccacccatccgtgggatcgagcatcaaatcgacttcgttccgggagccgctctaccgaaccgaccagcttatcgcaccaacccgaccgaaacaaaagaactcgagagacaagtgaacgagcttatggacaaaggtcatattcgagaaagcatgagtccgtgtgccgttccggtcttactagtaccaaagaaagatgggagttggcgcatgtgcgtggattgccgagccatcaacaatatcacggttaagtatcgccaccctatccctcgattagatgatatgcttgataaattgcatggttctagcatcttttcaaaacttgatcttaaaagtggttattatcaaatccagatgaaggaaggtgatgaatggaaaacggctttcaaaactaaacaaggattatatgaatggttagttatgccgtttgggttaacaaatgcacctagcactttcatgagattgatgaatcatgtccttaggaagcatattggagtatttgttgttgtttattttgatgacatcttggtttataccaaaaacctggaaaatcatgttatgcatcttaaactcgttttggacttgcttcgaaaagaaaaactttatgcgaacttgaagaagtgcaccttttgcacggataaccttgtttgtctaggctttattgtaagtgcagatggaatcaaggttgatgaagaaaaggtcaaggcgattcaaaaatggccgagtcctaagaatgtgagcgaagtgaggagctttaacggtctagcgggattttaccaacgatttgtcaaagatttcagtaccattgtcgccccgcttacggaagttatcaagaaggacattggattcaaatgggaagatgcacaagaaaacgccttccaagccttgaaagagaagctcactaattctcccgttctaattcttcctaattttatgaaaacttttgagattgtgtgtgacgcctccggattaggtattagagctgttttgatgcaggattacaagcccattgcttactttagtgagaagttaggaggagcgactcacaattatacgacctacgataaggagctttacgcattggtctgcgcactacaaacgtggcaacactatctatggccgaaaaagttcgtcattcataccgaccacgagtctctcaagcacttaaagctcaacaaacgtcatgctcggtggatcgaattcatagaaacctttccatacgtgattaagtacaaaaaaggtaaagataatgttgtagccgacgcattatctcggaggtatgttttgcttacttctttggatgcaagattgttgggttttgagcaaataaaagacttgtatgctaatgattctgattttagcaaaatatttcaatcttgtgagaagtttgcctttggaaaatattatcgatatgatgggtatttgttctttgaaaatagactttgtgtgcctcactcttctttgcgagaattgtttctaagggaagctcatggaggtggcttaatgagacactttggaattgctaagacgtacaaggtaatgcaagaacacttccattggccgcacatgaaaagagatgtcgagcggctatgtgaacgatgtgcgacttgtaagcaagctaaggctaaggttcaaccccaaggtttgtatacccctctacctattcctttgcatccttgaaatgatatttctatggactttgtggtaggattgcctaggactaggaatggtaaggattccatctttgtggttgttgatcgcttttctaaaatggcgcattttattccatgtcataaaaccgatgatgcatctcatgttgctagcttgttctttagagaagttgttcgtttgcatggcattcctaagaccatagtttttgatcgtgatactaagttccttagttatttttggaaaactttgtggtcgaagttaggaactaagttgcttttctctactacatgtcatccgcaaaccgatggtcaaactgaagttgtaaaatgaaccttgtctactttattgcgtgtgctcattaaaaagaaccttaagacttgggaagattgcttgccgcatgttaaatttgcttataatcattcgatgcattccgcgactaagttttctccttttgaaatcgtttatgggttcaaacccacatctcctttggatctaatgcctttacctttgagtgaaagatcaagtcttgatggtaagaagaaagccgatttagtacaacaggttcacaaggaggctagggaaaatcttaaggctcgaacgaagcaatacgagaagtatgcgaacaaaggtcgaaaagaagtcatcttcaacgaaggcgatcaagtgtgggttcatcttaggaaggaacgttttccggaagagcgatcatccaagctaatgccaagaatcgatggaccattcaaagtgctcaaacggatcaacaacaacgcctacaaactcgatctccaaggtatgtataatgtgaatggtagtttcaacgtttctgatcttcaacctttttttgcagataatttggatttgaggtcaaatccttttcaagtgggagaggatgatgagaacatgacctatgcaaccaaaccacttgaaccacaagaagacgaggagcagcttgtaccggaggaagcattaatcgttccggcgggtcctctaacaagatcaaaatccaagaagttcaaccaagctatcaatggactactcaaggagctaaagaaaaatcaagaagacgtggctcaatcctccttcatagtgatcacggctcaagaggctcggtaaagggttaagtgttgcttatgcactctttttcccttgtcaagttttgtcccaatggattttcttgacaaggtttttaatgaggcctaagtaacacttacaagcctccatttatcagcccactcacaatgccttggctcattctctcttttttattcaaactttgcatttattgcttttgttatttccaaaactctttgcatgagcttgcatgagtgtggacttgtgcatgctcttgcatgtctttcttctctcacctcttccccttcttcctcctctcctatataaactcattatagttctcatttgcaatcatcaaacattttaatcaaaaaaccttctcttttacttgtttgatccgaaaagtgtgtaatatcttttcaacttgttttcttcttagtgtgtaatatctaagttggatccaagctagtagtctaagagtctttcatcactcttggaattacaatttgttcccctttcattccgctgcatccacccgatcttgtcttcatcccggtttatcgtctttccaccgctttgttccgaatccatccattattcaccatcaagtacatcattttgaattcaaaaccaacaaagtgagtacttggagcatacatccacgtccaggaatgtatcatcttatctccatgattcaaggcaataagtttcatggaataccaatggaggacccattggatcatcttgataactttgatagactctgtagtctaaccaagattaatggagttagtgaggacatcttcaagctcaggttattccctttctcttttggagataaagctcatctttgggaaaagactttgcctgttgaatctatagatacttgggatgattgcaagaaggctttcctagctaagttctcctctaacttaagaacagctagattgcggaacaaaatttcaggattcacacagaagaattcacaatcattctctgaaacatgggaacgcttcaagggctacactactcaatgccctcaccatggtttgaagaaaacctcacttcttagtactctctacagagaagcgttgcccaagataagaatgctattggatacagcttctaatggcaactttctcaacaaggatgtagctgaaggttgggaacttgttaaaaacctagctcaatctgatgggaactacaatgaagactatgatcgatttaacagaggaagcagcgattctgaggacaagcacaagaaggagatcaaagctcttaatgataagattgacaagttggtgcttgctcaacagagaaatgttcactacattacagaagaagagcttacccaaatccaagatggggagaatctgactattgaggaggtgagctacctacagaatcaaggtggctacaatagaggtttcaacaattacaaaccccctcatcctaatctctcctacaaaagcaacaatgtggccaacccacaagatcaagtataccctcaacagaaccaacaaactcaagctaagccctttgtaccgtacaatcaaggttacaaccaaaagcagaactttggacctccaggtttcacctagcaaccacaaactacttctgcacaagtctcagagatgaaaactctacttcaacaacttgtgcaatgacaagtctcatgctccatgaccatggataagaagctggttgagctcaccactaggattgattcctcttataatgacttgaacatcaagatcgatgcacttaacactagagtcaagagcatggagggacacattgcttctacttcagctcctaagcaccccggagtatgcccatgctatctccacagttcatacttctgaaactgaggactgcgagattcaagagggggaggttttgagatcaagatcaagacaggaaattgaactcgacttctttgctcggcttgttgaacgagcacatgacccgagtaacccaatccctattccaccttcctatttgcctgaactgccatttccaggaagaattgcacagattaaagaagggatcttcaagaaacagaagatgatgttcatcaagtgcatcaaagagttagaaaagaagatacccttggttgatactcccaaggaagtgattatagaaagactctaagaagtttaggaaatagttgaattgagctttgagtgtagtgctatcatacaaaggaaggtgataccaaagaagctaggtgatccaggttccttcactctaccttgttctctaggacacttagtgttcaacaagagtctttgtgatttgggagcttcaattagtttgatgcctttgtttgttgcaaagagattggggttcgataagttcaagcctatatgcattcactttattctagctgatagatcagtgagagtgcctcatgggatgctagaagacttaccgaaaaagattggattagtagagattccaaccgactttgtggttctagagatgaatgaggaaccgaaagaccctctcattcttgggagaccatttctagcaagtgcaggcgctctaatcgatgtgcaaatggggaagatagatttgaaccttggtaagaatcactatataagctttgaaatttcaaagaaaatgaagaagcccaccatagaaggacagcttttcttcattgaaaaaggaaatttagatgatgagttgttgagtgggttggaaaactccattccaaactccattccaactcaccacctaagagagcctaagcaacccaagaagccttctatgatgaaaagaggacctagctcaggggtagggattgagggaaacccattggatgttgattctattgctagagaacttaaggagctcaggaaggagtatgaagttcaagaggaacccatagaaaagttggacctcaagatgaaagaattaaactatactatcttagagcttaaacaaatgattaagggttatccaagtcctgaagttgaggaatggtttgaggaacctgatttgggagaaggagactacgctactgatgagatgaggcttactttgaggaaagatccaatggatatttttctctccagctatctagagaaaatgcagagtatgattcagactttgaggattcagcaagtgaagatgaggacttctcagttcctctcttcaatctcttctctacctaaacattgtgagagtcaagcttagtgacattgggaggaagtcccatgtctatccctgtatatattgctttcttgttctttttaatgtttttgattaagtgtttcagaaaaaatgaactttgggaattttcaggccacactcgactgaaccactcggctacaggtcgagtgtgggcttcaattgatcaaagcccataagtgaaccatactcggcccaggccactcggtccatagttgagtatgggcctcacttttcaagacccagaccactcggccagaagccgagtaagaagaagcccaacactgtactcgacacgcacgccgagtatgtcggccgggtacacacgtgcgaagtcaacacaattcaaattcaaatttgaatttgaatctactcgaccccacacatcaaatcctgctccccaaatgccatcaaagattcttctgcaaacagtgaaagcttgtctcgttgaccaaatgaagggtggagatctagagtgtttgaagggctaggatcaaatcttcttgcctataaacccacttaaacaagctaagtcactcactctttctctttactcaattaatttcgcactttgctacttctctctagatatctcaagattttactctcacttctctctagaattcccagaaattgaaccataatttcttactttctttccatacaaagcatttcaaaacctctcttaaagcttttgatcagttgaaaatttcaaattctcttctactttgacctactttcggttcttttgggtgattatctgcagtaactcaccacaagaccatggattctgaagaagcaagaagaagcaagaagaagagcctctactcgtgctgtagatagagggttgccatgatcaacaagaaatgtccggtttggaatcaggaagctgtgagtcctggttttactcggttgacaggccgagtacagtggctgagtatgactccagaatcttctgtgggtcgttctgctgctgccagggaggaagttgcaaggggaaagagggtttgggaggctgagccagctacaatagaggagtagcctatgttagagagggaagcatctgaggaagatgtagagattgctgaggaggtcttgccagttcttgtaagaaggagaatgaacaatccaaggaagaagaaagagcccaccattgaagagcactaccagtacctaatggagctgagttttgaagggacaagatatctccataggccaaccatacaagcattggggatctgtagggatgttgaatatctcatggagatgaccaagctagagacattcttttcctacaagtgcgagggatacaaggaggagagctgccagttcctagccaccttgaagctccacttccatgccgatgagagacagagaaagaactacataaaggggtggagtatatcacattcatggtgtatggaaatcactaatcccttgctattgggcagctagatgttgtattcaagttccctaccaagtatggaatccgccagaactttaacaaggaagagctccatgatttgtggttaacaatagccggtctgcttctctacaagtcagctagggctaagagttcagcaataaggagtcctgtgcttaggtatctccacctttgtattgcaaatgccttcttcccaaagaagacaaccggccatgttattgagggagagctgaagatgcttgatcttaccttatgcttcattttgggttacacaaagaagaaaatagagatggaaggggataggtctgatacatctctttcggtggtgttgatagatcatttgataagcttctgggaatatgcaaccggcattcttcaatccggttatggaggcagcttgtgtgctagaggagtgatcacacatattcttatagctgctggagtctctcttcatactctcaatgtcacagccaattacattgatatggagcatttgaggaaaaaaggcttcctggataggtcagctccagctgatcaatttcagttcaagtttaagcaccccaagctaggtctctctaggctagcacttccatgcaaggagtacaccacagttagaactggaaacaaaattgactttgatcctcctccatcaatcttagtcaatgtccatgtgcctttccacgacgagccaagcataaggagtgagtcacaagaagaagaagcggagttcaaccaagcggaagctgaacaggaagaacatactcgaccgagtatatttcagcaggccgagtatggccaggccgagtacgacctgtccgaattcagtcgagccgagcagtttgatgagaaggaggattcgtgtgaagctgcagcagaatagtatttcttcgaagattatgctgagtccgatcaaaaaagggatcccggccaagtacacaaaaaactgggaatgctcaagggtctagggaagtttcacagaaggttgattagtgggttgaaaaagaaggtgagaaaaatgaagagggcaatgaacggtatggctattcaaattcaggagctgcaaagaaggcagagatcaccaccacctccagctgagttcaggagaagcaactcgatgagtgttgttgataccggatcccgcaaactggatctctgaagtatttcgaaggcccatcagttttcaagtccaagaaggaccacgttgcacaaaggagatggtcaaatcttgacattaatttgtagtttaattcatgtattaattactatggtcaaaggaataaacttgtcattcaagtttatgaattgattgtggaagttattttgtgaattaattctataattaatagccaaataatggcacattggaagaaggaaagagaccataaaagagaggtgaagactccaagaaaagggggctagagattctagattttcaccacaaatcttaatattaaacattgttattttctgataaatacacaaaagattacttcttccctttttatgtaagatctttatacaagaaatactataccattttttatgtacaaattcttcctgcatttctatatactctattatacttttactatgcacatttgtcttgtacttttgtactcgagagttttagcccacaaataatataaatacatgagtgtgtgaatccgacatccacattttggtgccgtctgtggggacctgaagttctcaagcgtttcagaagtttcaagacataaacaagccatattgccgatcaaaccattatcgacgcccttaagatgctagctgacttcgtaactaccatctcgggaagttcgatgacttggagaagttattagttgattgcaagcagcccaggtaacatttactaaaaactaaatcttgtttctactcgtgtggaatttttgattgtaggaacaagacagaaaatccagtgaggattacttagttctcccaattctcgttctcgcataactctcgtagccaacgagacaccgatagctgaagactaggaaacaatcggagctcaatcccagcaagagatccctagtaagctcgatcaaggagtcatccgagatgaggaagagctcaagcgaggtggagaagaccatatccctttgacacataaagcagactatgagagagtccaccatgacctaagggaattaaatcaaaactccaccaaaccaccagttcggctaaaaacattgatatgagaatcacttagaggcattcaacatatagagcacgaagttgttgcatcaaaggaaggagattcacttttggatatttccaaaaaactcggcaacgacaaatttgacgatgcatatctatctacctctttgcaagacattttcccgctgatttctggataccatcataacattcaacatatgctcatgatgccccaagagtcagctttccaaggagccggacttttccttaaacggaattgtctatgaagagttataatcagatctctgcaagagtcacaacatctccgaactcttaaaacgcagatacaagctgctacatggcgaggtagtttcccgatgactctcgacgaacctcgtgacgattaacatatcaacgcgttaccccaagagtaaatttttcaaggagcccaaacttgctttggaaagaattgcccgtcaagagatatcgtcaaagctctgaaacagatggaacctcgtgaaggataaactaccagcgcgttgccccaagagtcaacttcctaactagcacgactttgcatcaaacgaagttgtctgttgataattatcgtcaaatctttgcaccatgtgcaatccgtacgaaatttaaaaaacacagatccacgcttttcaaacaagcccacttcgggaagggtttcccggcgaactacctggaaccacaagtctatttacatatcagcggaaagccccaagacttatctttccagcgaaaccaagcttgcatctgttaataaatctgcgtggaagttcttgttatgtacttgcagtcgcttcattttggtgaaatctaagtgatgagttcgcttttcacaaaactagatttcacccctcaagaattttttggattccacctcttggaaaactatattcgttccggtgaaatctaagtgttgagttcgatcttcacaagactagatttcctccctcaaggatgtttccaagttccacctcttggaaaaatatattcatttcggtgaaatctaagtgatgagttatctcttcacaagactagatttcatccctcaaggatttttccgagttccacctcttggaaaaatatattaatttcggtgaaatctaagtgatgagtttgctgttcacaagactagatttcatccctcaaggatgtttccaagttccacctcttggaaaaatatattcatttcggtgaaatctaagtgatgagttatctcttcataagactagatttcatccctcaaagatttttccgagttccacctcttggaaaaatatattcatttcggtgaaatctaagtgatgagttcgctcttcacaagactagatttcatccctcaaggatttttccgagttccacctcttggaaaaatatattcatttcgtgaaatctaagtgttgagttcgctcttcacaaaactagatttcatccctcaaggatttttccaagttccacctcttggaaaaatatattcatttcggtgaaatctaagtgataagttcgctcttcacaagactagattcatccctcaaggatttttccgagttccacctcttggaaaaatatattcatttcggtgaaatctaagtgatgagttcgctcttcacaagactagatttcattcctcaaggagttttccaagtttcacctcttggaaaaatatattcatttcggtgaaatcttagtgatgagttcgctcttcacaagactagatttcatgtctcaagaatttttccgagttccaccgcttggaaaaatatattcattttggtgaaatctaagtgttgagttcgctcttcacaagactagatttcattcctcattgatttccaagttccacctcttggaaatatattcattttggtgaaattaagttttgagctcgctcttcacaagacaagatttcatccctcaaggagttttacaagttccacctctcagaaaaatgtatttcattttggtgaattctaagtgttgagttcgctcttcacaagactagatttcatcccttaaagatacttttgatgtccgaccatcggaagaatgtgctcattctggtggaatttacgtatcgatttaactcttcatggactcaaattccaggtaatgcggtggcgattcattttttcggaagcaagaaaaaaaaaagagaaaaaaacgtcctatgattgtccgagatgtcccattggctacacaaccttaacaaagaagtcctggacctcaacaagactacagctcgtggtggcgcaacaacaaccttgtcaccttcaaaaaaggagcacaagtttcggtagaagcaaggctgagtctactaaggtcaactcaatcgatcaagccatggcacaatgatacagagaagttttcatggaatttcttcggaaatcattagcggatgaccttcaacaattacaaccttgacatgacaagatcatatttgctcaaaaacatttggatcatgtatgaagcatcgaaaataagttcaactatggtgtacacgtttactccttaacgtgaaaagtctccatcttaagttacgcaaaattgttatgacgagaagcatacatatctaagaccaaaacggtggggccgtcttccaaataatacaaagcaacgtcaagccgcttcggaggtggtccataacatctatgggatgaagacaactgaagtcattatctacaagcaaataaagcgattcttctccaaagtataggagaattttatagcattatcacttgacgtgattaacgaatcgttgctacaaatttggagtccttatttatatcatcacccgaaattcaaggagtcaacattccacatttatcaacaagaagcgattcaagtttgaagagacaactttgatgctttacgacggtcttctaatactgtttaccttcatggagatgcgaattcgatttggtggaatctaagtgcttagttcgctcttcaggaaattagattccatccgatagagattttttcaagctctaactcttgggaaaatgagttcattttgatggaatctaagttttttgtttcctcctcacaaaattagattccatcccgaagagatttgtccaagttctaactcttggagaaatgtatttatttccttggaatcttagtgttgagtttggttgtcacgagattagattccaccctgaggagattatgccaagttctaactcttggaaaaatgtgtttgttctggtggaatttaatcgttatgttcactcttcatgagattccatccagaagtggaagacgagaagtttattccgagcaaacaattagatggaagtggaagacaagaagattagcttcacttcacaaagaaaagtaagctcactatgccaattgttattgtcccttccaggaaaccgaagttaaagggcaacaaagagatcaaactacttggattaaacccgtttaacaattatgtggagagaccatctctaggaaaaagaagatttaaacaaccatctcttacaacatggagttgcgttaagaaggcatacgacatcatccatagagtaaatgatcatactacaaaagatggtaccgatttgaagaagcatcttgctgagctacggacaattggtgacctcgcaaaacctcgacatccgagagttcgtgaaaacttaccacgaagaaaaggcggaagctgaaaattcatcactagcttagaaaatacctaaaacgtctaatcccggagttgcttttggttctaagaagaagattaaaattgtcatgaacgagtctaagttttgtagagattcgatcactatacaatcaaaaagttaaagagaatgttctattaaaggcgagcacaagcgacaaactcgaacacgctagagcaatcataatgtttaaggaagaagaaattcgtcacctcgcagaacctcatgacgttgatttttgtcctcaccttagacgtggctgacgtcggagtttcaaggattgtgattgatgttggaagtttggtcgatctactattcttgagtatgcttggagagagtggaaagtagctagactgacatagttggagcaccgtggatttatcgaatcaagaagtgattctagaattatcaagcaggcaagtagtggatgacgtcataatcgaagtggccatcgatgaaaaagatcatgagcgaagagttcggaaaggagtagcatctagttacaaccaaataatgatgaatcctcacgattaagaaaaatacatcgttcaccaccaaccgaggtatatactattttacgatcatatcgattgaactaaaaatgtaggtgtgacataccaaccatttgcgaacaagatgatcaagaatcacctcggaaaatgatggaggtctatgtagacatgctcgtgaagtcgtcaaaagagagcggtcacatttaagacttgggagaatgcttcaatatcttgaacaagttttagaagaagttaaatcttaccaaggagacattctgagtcccatccggagaattcctcggttacttagtaacaaagagagaaaccaaagcaaacccaagacagattaacgctcttttcgaacatgccagccccgaggaacatcaaagatgtctgaagactctttggtacgattaccgcgttgaaccggttaacatctcaatcaacggataaatgcctttctttctatcaaatactaaaagggaacaaggagtttagttggatgaaagatgctttcggtcaactaaagacatacttaaatgtcgtctctaattctctgaagccggaagccgatgaaaaattatacttatacatctcattttcaaatcatgccgttagtggagtaataatttgtgaagaccgaggagagtgaaagccgattcgttacttgggcaagtcatcaaccagtccggaattaagttacacaataatggagaaacttgctcttgatgtagtcacttcaacttggaagctgcaaccttatctatgtttcatccaatcatagttcaaactcttgggaaaattggttcatttcggcggagtctaagtgttcaattcgctcttcacgaaactagatctcaccccgagaagatttttccaagttccaattcttggaaaaataagattattttggtggactataagtgttgagttcactcttcacaaaactatctcgagaagatttttccaagttccaactcttggaaaaataaaatcatttcggtgaaatctaagtgttgaattcgctcttcacaaatttaaatatcacttcccatcaacaaccatttgtgacgaaatctttgagtacaagctcggaagaagatcttcagttttctctctagattgcggctcaataacctgccttcgtattctataagcagaatacactttgtaaactcaagcttatagctcccatgcgatagtcgagttcactttgcaacaactaaactcgaagtcagctcccatgcataactcgagtttaattctcatactaaaactccatgattaaactgacgagttcgagtcaataaaatgaattcagtcctcttggacacggggtcgactagcaaaacaaagatctttacggtcaagtttagtcgatcaacctaatacttcttaagccgagcacagttctcgcaatcaaagaaagttcgaagattgacttcgggggtctgatcaacctatttctctcttagccacatggcccaaatttctcttagccacatggcccaaattttcgaaaagtacggactttgcaaatccgggaacttcgaaacaaatacttaaagcaagtatcattgcaaagcctctaaggtaacgcaaaggaaaaatgttcaaaagatccctcgagcaaacaaccaataagtgttaaaaccccttgggaaaatagaaaattccctctcgggaaagtcgtgtttataaaataaattgggacaaatcccgaatattatggtcatagccatgaaagagttaagttgggccgaaagcctcatcaacattcggtgtaatttcgtcttggttcggagtagcaatggtcgttccttgctcgcgagtttctgttttgtacttaggagttgaacatgagccggatgaagtatcggcaacaatttggacatacattttggcgagttcgagatcagcttgcaggaacttagtccaaattcatctccggcaccttaacaagaaaattggtcctccgaccaagtcaacttactcgaagaactggggagcttatgttgataccggatcccgcaaactggatctcttaagtatttcgaaggcccatcagttttcaagcccaagaagaaccatgttgcacaaaggaggtggtcaaatcttgacattaatttgtagtttaattcatggattaatgactatggtcaaaggaataaacttgtcattcaagtttatgaattgattgtggaagttattttgtgaattaattctataattaatagccaaataatggcacattggaagaaggaaagagaccataaaagagaggtgaagactccaagaaaagggggctagagattctacattttcaccataaatcgtaatattaaacattgttattttctgataaatacacaaaagattacttcttccctttttatgtaagatctttatacaagaaatactataccactttttatgtacaaattcttcctgcatttccatggttacccttaaaatatttggatcttcttattcatttcaccactccaaatagctgactctcatctttagaccagtttcctcacaccctaacctaagccttctttcaagtcatatatcacttgtgagtgtttgttaggtcttatttcgattaagcttggtagaaagtgttaggttcgtaacgacaaagatagtatctcatatagttctagttcgcgttatccggactagataagactaggtggatacttatactaagggttgggaagagtttaaatgagaaaaagggttgggtttcattgtttacaataaaagggaaaaggattttaggagaagtaagctaaagaagttagaaaaagtctagtaaagggtttgagattgttaaataaaaagattgggttattgttagctaatgaaaaagggtaaaaaccttaagcttaaaagagattaaaaacagaaccttagtgctgaagaaagccaaacccgctagaaatatcgaagaaaaaaaaaagattctcctagagttaagagaaaaagaaaagaatgggttaagaaagagtttaaaagatcatgaatgcaaagggtagagttaagttcttaattgggatgggagatgggatttccattagatcttcattgattatactttgggtagatgagatcttatctttgtatgcataatttgggacttacctttagcattctactaaagcttaatcattcttgagagatcccttgttactaaagcttattcttttaaaggaccatttttgtctcttgaccctttacccttagtcaaatgagtttaatatggattgtatagtatgatccatggttcttgcttaatgaatgttaaagggagtatgctgatttgaatgcttgaatagactaagttaatggttaggtcgtgttgtaaagaagatggctaaagtttttaagtagagatcattcaacctagcactctagaactaccaacatggacattgagaccatttattttacatgcatattttggttctaaatccccaccttcgaacctcactcctagcctagttctatttgttgcttgaggaaaagcaaagagctaagtttgggggtgttaataacactaggttttaaccattttcagcccttgtttttcatgcatttagcttagtttcatgtctcttttcatacattcttagttcattttccttccttttcacattttgcattgcattgcatagcatacttgcatttggagtgttttacatgtgaatcaggtacttttggattcaatttgggcgtttctatcacaaggagtggactagctcgagtttgtgcaatccaaggaaggacatggagtatactcgggatatctaatcggctggagatcgagtggagcacacaagggagaaggaagaactatactcggccaatctactcggcaggagctcgagtggtgcacatgaggaagaagggaagctgctcaattgaaggtactcggcctaaagccgagtgatgtgaccaaaggaggctactcgacttttctactcgaccaagacccgagtggtgcaacgccgactttcccattttgtctttttcccaattagggcatcctagtattgcctataaatagacctcttatatttttatccaaaatatctttgatttgttcgctggatattagggttcttagattttttttgcattttctggttgttgtgttgagaatctgaatttcatttcttctgcaaacttgtttatcttattgagatctatcatttgctaagtttataatgatttctgggttttatgattttttctgaattttgttctatgatgttcttcattgatcttgagtagtcttcttcagagttcttgaggatgggttaggtttaggtggattcctctgttctttagctagctaagtgtttatatgcatgattcccttctgttttaggagttcttaatgctattttctttctgatcaattgaaaattgatttcagactttctccacctaataagtgtttgatgaaatgtctgaaccaactaatttcagagatttgtagactctagcccaagacattggatgtttagactgcttattgattttaatagattggtgtttaaagcctgctttattatgtttcatcaatgaaagttgagattaggaagtgataaagttatgaggatcattgtcatgaaagtggattgatctggttttgaatctattgtctagggatagcttgatttagtttgttagttagctaatggattcagaagttaaaaatttaaccgttctgtcgtagatttgttttgttgtagaaagaactattcattaagaatttgtatgtgtgatcatgatatcatataaacaagaacataaaacataaaatatatacaaaaattaggcaataatatgtaactaaaaatatcatgtataactcaaaaggttattttttcgatggaccattgagtcaatctagacaatgttgaggaaccatcttactacgtacagaaccgtcaacattctcgcacatcgctgtggaatgacctttctcgagtccagtatgctttaggttaatatcaattagttcaacattcttgcacggaaagctcttgctacattgtagattcactgccactatgttattcgacgttccatatatgttttttaacttaatgtcttggatctgaacgtgagactcaccctgaacaaggaaacacaagttgtcttttgttttatatttcattgtgattgaagaaaaaaataaccaagcttgttcatgcatataatgttaacctttttttcatgttcacaaggtgggtgagggcaatacttctgatcaatgttgatcggttttccaacgtcaatcatctgaatattctcgtatatgaagttagaaactacgatttttgaagccgaagattcccaagtcttgatccgaataccatcgcttgtgccgttgaaaactgtgtctcttaccgttaagtgctttacgtctttctcgtctttgttcttccctaagcttccaacactgatcccatgtccaggaccacacttgatgttagagatatcaaggttagtggtcccagagagaatggcaatacaatcatctccggtaccgatgtttgtgtttgagatgtgaatgttgctacaagaacccattttgataccgtcagtatttgggctatcaccgggagctgttatagtgacgccggtaatgttgaagcgatggacagagaagaagttaaagtgtcccattttgctgttgagtgatgttatgtctttgattcttgagttgttcacgaatgcaaatcccatagtctgtaaacatttcaaattttatcatatcactagaaacaaagagtagatacttcaattcatttgtatataataaatatatatggttaaaaaataaatgatcaaaatatacttgttaccattgtataatacagtttcaatgtaaacaatatataatcatattttctcaaacaagaaatatattataaaaagaaaagcttaagaagaaacggtaccatagctagtttaggacaattagtgtttttgtggcagtcattgagtggccaagagtattttccttggccgtcaagtgtaccggaaccggagatagagagattgttgatgtaccggaagttgatccatgtgtcctgcttaatgtccctagggtttgcaggagccaataaagttccatcgatgacaaattcaataggatttttgcatggacccacaaactctacaccaccgagatagaatgttcctttcggtacgtagattttactacttccacttatccttgtgcatgcacgtttccatacacttgtgaatgcctaattttgtatatgttaagaataagataggttaattattaaacaaaaaaatccatagaagttgataaaagatttagttaaatttaattggttaatataataccaatccatatattgttatgtagaaagtcaagaagatttatatatactatcatatcaaaatgttttttcaacatatattattagattatttaaatgtattttgatattgagttgagcttatttcaatgtatttggaagccaatataaattgggaatcaacaaaactaaataaataactattaacattgattagaaaagttattgtgtacatacattggcattatcagtttttccgtctggtctagaaccatagcgtcggacgttgaaaacctttggtctgatagtcggacgacttgcaacagcaatgaacaagaaagacaaacacaaagctttaaacgtagaagcgatggagaccatcttattcttttgtttgggtatatggagatataacaaaaaggtgctgtttaataatagttgttcttatagtgtaagacacaatgagaagtgttcgcacattttatctatttatatagagttaacatgtctcaacagactgttaaaagcacttgattattgttatcagttaactactaaatatgggcggcttctttataatgatcgtgattggttaatatactgttatgatgattttttgagtgtatattgtttagtttttaatctcttcattaaaacagaatcttaattttgggaaatgtgccaataagattacctataatttgtttctttttttaatgggttttaatttaaattgcataaaaccaaaatgttttcgaaatgatttctttgtggattttatttttattttgatggatactaaactttagtatttacattattttgtaaacttgtatttattcaaaattttcataagatataacgattaaattgctacacgcatttgcatgcctaaaattgcatatctccattactctacttgatgttttttattcataaatcacaacatgctagtaaaatgaatatataattacttactagattaaataattaatgaaaattttcactttcttaatatcataaaaaacaaattgcggtctctaaacgaaaagtacaagaaaatacaaaggtgataataaaaatttcaaattgtttctatgtgaacaatcaaaatgtttcttaattatattcttcttcttcatctttttcggcaatctcgatgtctctctgatctgtcagtcaaggtccttcttggcgatttagtaagtaggtgatggaagtcgttgcccttccggtgtaaaattctccttgcgatgtacgacggcattttgtgaactttgcgttgcctaaacacatgatatacattattgtgtcatgctatttgccaatattttgggtaatggaggaggctcgagctttgatttttaattcacaaaaacttatgacatcaataaataatttaaatatagggaaattttctaatagcacatttaaattaaaaacacttataaatagtttttaattaaacatatttttataagtaagtatgagaagaaaaagataatagtttttcaattgtttattagaattatataaacatttaaattaaaattatttaataaaagttacaataaaccgaacaaaccttaaaagatatttattgagattttccttattagtttgattctagtaaagtgtaattgttactaagtatgatggtaaaattattggaagttaaacatttaaccgttctttcttagatttgttttgttgtagaatgaactattcattaagaatttgtatgtgtgatcatgatatcatataaacaagaacataaaacataaaatatatacaaaaattaggcaataatatgtaactaaaaatatcatgtataacccaaaaggttattttttcgatggaccattgagtcaatctagacaatgttgaggaaccattcttaccacgtacagaaccgtcaacattctcgcacatcgctgtggaatgacctttctcgagtccagtatgctttaggttaatatcaattagttcaacattcttgcacggaaagctcttgctacattgtagattcactgccactatgttattcgacgttccatatatgttttttaacttaatgtcttggatctgaacgtgagacttaccctgaacaaggaaacacaagttgtcttttgttttatatttcattgtaattgaagaaaaaaataaccaagcttgttcatgcatataatgttaacctttttttcatgttcacaaggtgggtgagggcaatacttctgatcaatgttgatcggttttccaacgtcaatcatctgaatattctcgtatatgaagttagaaactacgagttttgaagccgaagattcccaagtcttgatccgaataccatcgcttgtgccgttgaaaactgtgtctcttaccgttaagtgctttacgtctttctcgtctttgttcttccctaagcttccaacactgatcccatgtccaggaccacacttgacgttagagatatcaaggttagtggtcccagagagaatggcaatacaatcatctccggtaccgatgtttgtgtttgagatgtgaatgttgctacaagaacccattttgataccgtcagtatttgggctatcaccgggagctgttatagtgacgccggtaatgttgaagcgatggacagagaagaagttaaagtgtcccattttgctgttgagtgatgttatgtctttgattcttgagttgttcacgaatgcaaatcccatagtctgtaaacatttcaaattttatcatatcactagaaacaaagagtagatacttcaattcatttgtgtataataaatatatatggttcaaaaataaatgatcaaaatatacttgttaccattgtataatacagtttcattgtaaataatatataatcatattttctcaaagaagaaatatattataaaaagaaaagcgtaagaaaaaatggtaccatagctagtttaggacaattggtgtttttgtggcagtcattgagtggccaagagtattttccttggccgtcaagtgtaccggaaccggagatagagagattgttgatgtaccggaagttgatccatgtgtcctgcttaatgtccctagggtttgcaggagccaataaagttccatcgatgacaaattcaataggatttttgcatggacccacaaactctacaccaccgaggtagaatgttcctttcggtacgtagattttactacttccacttatccttgtgcatgcatgtttccatacacttgtgaatgcctaattttgtatatgttaagaataagataggttaattattaaacaaaaaaatccatagaagttgataaaagatttagttaaatttaattggttaatataataccaatccatatattgttatgtagaaagtcaagaagatttatatatactatcatatcaaaatgttttttcaacatatattattagattatttaaatgtattttgatattgagttgagcttatttcaatgtatttggaagccaatataaattgggaatcaacaaaactaaataaataactattaacatttattagaaaagttattgtgtacatacattggcattatcagtttttccgtctggtctagaaccatagcgtcggacgttgaaaacctttggtctgatagtcggacgacttgcaacaacaatgaacaagaaagacaaacacaaagctttaaacgtagaagcgatggagaccatcttattcttttgtttgggtctatggagatataacaaaaaggtgctgtttaataatagttgttcttatagtgtaagacacaatgagaagtgttcgcacattttatctatttatatagagttaacatgtctcaacagactgttaaaagcacttgattattgttatcagttaactactaaatatgggcggcttctttataatgatcgtgattggttaatatactgttatgatgattttttgagtgtatattgtttagtttttaatctcttcattaaaacagaatcttaattttgggaaatgtgccaataagattacctataatttgtttctttttttaatgggttttaatttaaattgcataaaaccaaaatgttttcgaaatgatttctttgtggattttatttttattttgatggatactaaactttagtatttacattattttgtaaacttgtatttattcaaaattttcataagatataacgattaaattgctacacgcatttgcatgcctaaaattgcatatctccattactctacttgatgttttttattcataaatcacaacatgctagtaaaatgaatatataattacttactagattaaataattaatgaaaattttcactttcttaatatcataaaaaacaaattgcggtctctaaacgaaaagtacaagaaaatacaaaggtgataataaaaatttcaaattgtttctatgtgaacaatcaaaatgtttcttaattatattcttcttcttcatctttttcggcaatctcgatgtctctctgatctgtcagtcaaggtccttcttggcgatttagtaagtaggtgatggaagtcgttgcccttccggtgtaaaattctccttgcgatgtacgacggcattttgtgaactttgcgttgcctaaacacatgatatacattattgtgtcatgctatttgccaatattttgggtaatggaggaagctcgagctttgatttttaattcacaaaaacttatgacatcaataaataatttaaatatagggaaattttctaatagcacatttaaattaaaaacagttataaatagtttttaattaaacatatttttataagtaagtatgagaagaaaaagataatactttttcaattgtttattagaattatataaacatttaaattaaaattatttaataaaagttacaataaaccgaacaaaccttaaaagatatttattgagattttccttattagtttgattctagtaaagtgtaattgttactaagtatgatggtaaaattattggaagttaaacatttaaccgttctttcttagatttgttttgttgtagaatgaactattcattaagaatttgtatgtgtgatcatgatatcatataaacaagaacataaaacataaaatatatacaaaaattaggcaataatatgtaactaaaaatatcatgtataacccaaaaggttattttttcgatggaccattgagtcaatctagacaatgttgaggaaccattcttaccacgtacagaaccgtcaacattctcgcacatcgctgtggaatgacctttctcgagtccagtatgctttaggttaatatcaattagttcaacattcttgcacggaaagctcttgctacattgtagattcactgccactatgttattcgacgttccatatatgttttttaacttaatgtcttggatctgaacgtgagacttaccctgaacaaggaaacacaagttgtcttttgttttatatttcattgtaattgaagaaaaaaataaccaagcttgttcatgcatataatgttaacctttttttcatgttcacaaggtgggtgagggcaatacttctgatcaatgttgatcggttttccaacgtcaatcatctgaatattctcgtatatgaagttagaaactacgagttttgaagccgaagattcccaagtcttgatccgaataccatcgcttgtgccgttgaaaactgtgtctcttaccgttaagtgctttacgtctttctcgtctttgttcttccctaagcttccaacactgatcccatgtccaggaccacacttgacgttagagatatcaaggttagtggtcccagagagaatggcaatacaatcatctccggtaccgatgtttgtgtttgagatgtgaatgttgctacaagaacccattttgataccgtcagtatttgggctatcaccgggagctgttatagtgacgccggtaatgttgaagcgatggacagagaagaagttaaagtgtcccattttgctgttgagtgatgttatgtctttgattcttgagttgttcacgaatgcaaatcccatagtctgtaaacatttcaaattttatcatatcactagaaacaaagagtagatacttcaattcatttgtgtataaaaaatatatatggttcaaaaataaatgatcaaaatgtacttgttaccattgtataatacagtttcattgtaaacaatatataatcatattttctcaaagaagaaatatattataaaaaaaaaaagcgtaagaagaaatggtaccatagctagttcaggacaattggtgtttttgtggcagtcattgagtggccaagagtattttccttggccgtcaagtgtaccggaaccggagatagagagattgttgatgtaccggaagttgatccatgtgtcctgcttaatgtccctagggtttgcaggagccaataaagttccatcgatgacaaattcaataggatttttgtatggacctacaaactctacaccaccgaggtagaattttcctttcggtacgtagattttactacttccacttatccttgtgcatgcacgtttccatacacttgtgaatgcctaattttgtatatgttaagaataagataggttaattattaaacaaaaaaatccatagaagttgataaaagatttagttaaatttaattggttaatataataccaatccatatattgttatgtagaaagtcaagaagatttatatatactatcatatcaaaatattttttcaacatatattattagattatttaaatgtattttgatattgagttgagcttatttcaatgtatttggaagccaatataaattgggaatcaacaaaactaaataaataactattaacattgattagaaaagttattgtgtacatacattggcattatcagtttttccgtctggtctagaaccatagcgtcggacgttgaaaacctttggtctgatagtcggacgacttgcaacagcaatgaacaagaaagacaaacacaaagctttaaacgtagaagcgatggagaccatcttattcttttgtttgggtatatggagatataacaaaaaggtgctgtttaataatagttgttctaatagtgtaagacacaatgagaagtgttcgcacattttatctatttatatagagttaacatgtctcaacagactgttaaaagcacttgattattgttatcagttaactactaaatatgggcggcttctttataatgatcgtgattggttaatatactgttatgatgattttttgagtgtatattgtttagtttttaatctcttcattaaaacagaatcttaattttgggaaatgtgccaataagattacctataatttgtttctttttttaatgggttttaatttaaattgcataaaaccaaaatgttttcgaaatgatttctttgtggaatttatttttattttgatggatactaaactttagtatttacattattttgtaaacttgtatttattcaaaattttcataagatataacgattaaattgctaaacgcatttgcatgcctaaaattgcatatctccattactctacttgatgttttttattcataaatcacaacatgctagtaaaatgaatatataattacttactagattaaataattaatgaaaattttcacttttttaatatcataaaaaacaaattgcggtctctaaacgaaaagtacaagaaaatacaaaggtgataataaaaatttcaaattgtttctatgtgaacaatcaaaatgtttcttaattatattcttcttcttcatctttttcggcaatctcgatgtctctctgatctgtcagtcaaggtccttcttggcgatttagtaagtaggtgatggaattcgttgcccttccggtgtaaaaatctccttgcgatgtacgacggcattttgtgaactttgcgttgcctaaacacatgatatacattattgtgtcatgctatttgccaatattttgggtaatagaggaggctcgagctttgatttttaattcacaaaaacttatgacatcaataaataatttaaatatgtatacatgtccttctatatagggaaattttctaatagcacatttaaattaaaaacagttataaatagtttttaattaaacatatttttataagtaagtatgagaagaaaaagataatactttttcaattgtttattagaattttataaacatttaaatttaaattatttaataaaagttacaataaaccgaacaaactttaaaagatatttattgagattttccttattagttcgattctagtaaagtgtaattgttactaagtatgatggtaaaattattggaagttaaacatttaaccgttctgtcttagatttgttttgttgtaaaaagaactattcattaagaatttgtatgtgtgatcatgatatcatataaacaagaacataaaacataaaatatatacaaaaattaggcaataatatgtaactaaaaatatcatgtataacccaaaaggttattttttcgatggaccattgagttaatctagacaatgttgaggaaccatcttaccacgtacagaaccgtcaacattctcgcacatggctgtggaatgacctttctcgagtccagtatgctttaggttaatatcaattagttcaacattcttgcacggaaagctcttgctacattgtagattcactgccactatgttattcgacgttccatatatgtttttaacttaatgtcttggatctgaacgtgagactcaccctgaacaaggaaacacaagttgtcttttgttttatatttcattgtgattgaagaaaaaaataaccaagcttgttcatgcataaaatgttaacctttttttcatgttcacaaggtgggtgagggcaatacttctgatcaatgttgatcggttttccaacgtcaatcatctgaatattctcgtatatgaagttagaaactacgatttttgaagccgaagattcccaagtcttgatccgaataccatcgcttgtgccgttgaaaactgtgtctcttaccgttaagtgctttacgtctttctcgtctttgttcttccctaaccttccaacactgatcccatgtccaggaccacacttgacgttagagatatcaaggttagtggtcccagagagaatggcaatacaatcatctccggtaccgatgtttgtgtttgagatgtgaatgttgctacaagaacccattttgataccgtcagtatttgggctatcaccgggagctgttatagtgacgccggtaatgttgaagcgatggacagagaagaagttaaagtgtcccattttgctgttgagtgatgttatgtctttcattcttgagttgttcacgaatgcacccatagtcggtaaacatttcaaattttatcatatcactagcaacaaagagtagatacttcaattcatttgtgtataataaatatatatggttcaaaaataaatgatcaaaatatacttgttaccattgtataatacagtttcaatgtaaacaatatataatcatattttctcaaacaagaaataaactataaaaagaaaagcgtaagaagaaatggtaccatagctagtttaggacaattggtgtttttgtggcagtcattgagtggcaaagagtattttccttggccgtcaagtgtaccggaaccggagatagagagattgttgatgtaccggaagttgatccatgtgtcctgcttaatgtccctagggtttgcaggagccaataaagttccatcgataacaaattcaataggatttttgcatggacccacaaactctacaccaccgaggtagaatgttcctttcggtacgtagattttactacttccacgtatccttgtgcatgcacgtttccatacacttgtgaatgcctaattttgtatatgttaagaataagataggttaattattaaacaaaaaaatccatagaagttgataaaagatttagttaaatttaattggttaatataataccaatccatatattgttatgtagaaagtcaagaagatttatatatactatcatatcaaaatgttttttcaacatatattattagattatttaaatatattttgataatgagttgagcttatttcaatgtatttggaagccaatataaattgggaatcaacaaaattaaataaataactattaacattgattagaaaaattattgtgtacatacattggcattatcagtttttccgtctggtctagaaccatagcgtcggacgttgaaaacctttggtctgatagtcggacgacttgcaacagcaatgaacaagaaagacaaacacaaagctttaaacgtagaagcgatggagaccatcttattcttttgtttgggtatatggagatataacaaaaaggtgctgtttaataatagttgttctaatagtgtaagacacaatgagaagtgttcgcacattttatctatttatatagagttaacatgtctcaacagactgttaaaagcacttgattattgttatcagttaactactaaatatgggcggcttcttttataatgatcgtgattggttaatatactgttatgatgattttttgaatgtatattgtttagattttaatctcttcattaaaacagaatcttaattttgggaaatgtgccaataagattacctataatttgtttctttgtttaatgggttttaatttaaattgcataaaaccaaaatgttttccaaatgatttctttgtggattttatttttattttgatggatactaaactttagtatttacattattttgtaaacttgtatttattcaaaattttcataagatataacgattaaattgctaaacgcatttgcatgcctaaatttgcatatctccattactctacttgatgttttttattcataaatcacaacatgctagtaaaatgaatatataattacttactagattaaataattaatgaaaattttcactttcttaatatcataaaaaacaaattgcggtctctaaacgaaaagtccaagaaaatacaaaggtgatattaaaaatttcaaactgtttctatgtgaagaatcaaaatgtttcttaattatattcttcttcttcatctttttcggcaatctcgatgtctctctgatctgtcagtcaaggtccttcttggcgatttagtaagtaggtgatggaagtcgttgcccttccgatgtaaaattctccttgcgatttacaacggcattttgtgaactttgcgttgcctaaacacatgatatacattattgtgtcatgctatttgccaatattttgggtaatggaggaggctcgagctttgatttttaattcacaaaaacttatgacatcaataaataatttaaatatgtatacatgtccttctaaatagggaaattttctaatagcacatttaaattaaaaacacttataaatagtttttaattaaacatatttttataagtaagtatgagaagaaaaagataatactttttcaattgtttattagaattatataaacatttaaattaaaattatttataaaagttacaataaaccgaacaaaccttaaaatatatttattgagattttccttattagttcgattctagtaaagtgtaattgttactaagtatgatggtaaaattattggaagttaaacatttaaccgttctgtcttagatttgttttgttgtaaaaagaactattcattaagaatttgtatgtgtgatcatgatatcatataaacaagaacaaaaaacataaaatatatacaaaaattaggcaataatatgtaactaaaaatatcatgtataacccaaaaggttattttttcgatggaccattgagttaatctagacaatgttgaggaaccatcttaccacgtacagaaccgtcaacattctcgcacatggctgtggaatgacctttctcgagtctagtatgctttaggttaatatcaattagttcaacattcttgcacggaaagctcttgctacattgtagattcactgtcactatgttattcgacgttccatatatgtttttaacttaatgtcttggatctgaacgtgagactcaccctgaacaaggaaacacaagttgtcttttgttttatatttcattgtgattgaagaaaaaaataaccaagtttgttcatgcatacaatgttaacctttttttcatgttcacaaggtgggtgagagcaatacttctgatcaatgttgatcggttttccaacgtcaatcatctgaatattctcgtatatgaagttagaaactacgatttttgaagccgaagattcccaagagtcttggacagattcttagccgaagattcaaaagggacattcttagccgaagattcccaagattctacgatttttgtattggtgtttgggaggtaaccttgtatgatcacttgacccgcttaattgagaaatctattagacaggcggtgatttcattttggtaccaagagtctcccaagctacggaaatcttttccaaagatggtttctagcaagaggaattcgtttattgttgtttgtattggttccttttcattacttttaagttcttgtacataatcacattttatcttatcaatacatttaacatttcatcaaagaaatgaaaggtaaaggtactagcgcagtggaggtaggtgtgttggatttaaaagctccaaaaagaattaacttaaaaacttacaattgtcaaatacatatcggacatagcccggactaacacctagtagatatgtaaaagtaaatcaaaataattcaggaatgagtaaaaacaaaaattaacaggaacaatattactgtggagaaagatgatcatccccacacttattgcaccattgaaacgaccaaaagaaaagcaattaaccaagtagaatggctctgaccacaacaatgatctcagaaagcaaaagaggcaaaactacataaaacacgccctaatatgcaaatgcacgatcgagggaaacaaggtaaacgaagacaatggcagacactctaaatcctgacttgtgttggcgataaaagaagggtaacaaggatgtatgggactgaattttgagtagtagataaattcgtgaatgtttgttactacatatgttaaaataattcacgattgagcacgacgcgtaaactatctttacacggtatagaggccatacagctattaactaaagtctgttgagaggaaccctgagactgtgttggtgaggagttctgtttgttgtcctgtccacatgagatataacttgcggcattgtcatccccaccgatactatgatctctgttgcatcgaaacaacaaacaacatttgaatctgatgtttctcataaaaagaagtagatgatgaaacgtaaacagctcaagactgacctattccttctcggatcgataaatttggccttatgatttcttcgctactcaccagaaacacatctcctatgtacagatgattcgttggtacatacacactacataactcttcttctccatggtcagtctgttacaacaaaaaaaaagcatgagagcaagtaactaatttgcttacttgggttttaccagttttgttgctgaataactgacctgaagtgtcaccgatgatgtaataaatccaaatgcgtattcaccaatacgagggtgacggatgattgctacctctttaaaggcagtagtgttttggtctgagaacaaaaatcaaaggttcttccattacaaaggacacgaaaaaggcaaacaacatagcaacataaaaaggttacttgtgaattcaaatcattgtgtctgaaaccacacaaatttgcttgcactttttgctagaaccaaagacgagtttctttaggtgctccattacacaaacaatgacatatatttgaagaaaaggagacgaattgagcaaatatatttggatgcgagaaaaagctaaagcagggaactggtgaagacaatgaaacagtacacagtcttacctggagaaatagcagtgctaatttgcttagaagctgaatatatgtgcttgacaaagggcattcgccttataaactgctccccaagccagaaaactgtagaacccaaccacgacgaagcaaatattccgacaaagaaagtgaaaagtacagatgtaatgaacccaagtcctgcaacatacaaaaaggaattaaaagatgtagttcaagataagaaattaatatctgatatttatatctctttggaaatctaggaaactttcagatagagatgaaactaaatgtttcattttaccagatacattgtcacaagtaagagttggactaaagaattaagcaaggaaatctagtaaaactttagaagtccaacaaacttgtacaacattccactaactctagcagtaagaacaaaccctgaatcctaatctattaagatatcttagacttcatagacgaagtttctacatcaagttttacttagtacataacattacgatacaagtcagaagaatttcaattcataccaaatatgtcaacaccaaggttctcgtatatcggactgaagaaaccatcaacgaactggataaaccaccaagtgatgaggaatgtaacagctacaggaaagagtacgacactaccacacaacacccaattagaccccaatgatacaaagatttcaaatcatgagtatgaaaataaaaagggtgctacgagttatttacaatccagtcataaacttcttagacacccaactctgtagaaccccataacaagcctgctcaaatacaaaagagaaaacactgtaagtatctcaaataaattgaatcaaacacaaacatatagaagtgaaaatgcttaaacctctaaatcttaggctccctaagatcaattatacttgtcatttttgccaaactgaaatgctacaataaatttcacaattcggagttctttcacaaaccagaagtagaactataacaacaccagaaccctaaacatctctcaacgaatttcacaaaagtaagtaagatatgacaactcaaaactctcctcaccagcacaaaatttaccatccaaggaccaagatcatcatcttatcgttatttgcaatttttgtcaagaaacgtcaattagttgattcatacaaaatttcacatcgccactcatagtttcgcagtcttcacaagatcatcatcttatcgattctgctatatcattctcctacccagcttaaccttcacaattcagagttgtcttacataaacagaaactataacaacaacactagaagaaccctaaatctctcaacgatttcgcaattgtactcgaatttctatcaattcgacatctaataataattgattcatcaaaatttacaaatcgctactcattgtttcactacgattttaacatttcccactaaagcatcatcagtgatgtataagatcgctataattcaaattcaagagcaacaaaatcgaagaatgcttctaaaattctccgaatccaacccaaacttagcaacgagtaagcacagaaactttagctcacaggctcgataaaatcggcggaggtttcggcagagacagtaccttgcgagtagaagaatttggagagttgggaggagacttgggagcatcgtcggggtcttggtgaggagtgagtccttgactcagcgaactcgtcgtagcttcttttccttccgccatttttgccggcgaggaggttgaaattggttcttcgtctggtttagtcagaccagatctctgattttgtttgaccttagaagatctttttgggtctatgttacccctttacgtaatctatactcagcttaatccaacgactgaaactgcgacacgtcatccatcaaaaactttaaacgccgtttcttcttttccaaatagtgatctattttttttcttttacaaaatattaacatgaatagaaattgtgaccaaaataaattatatagttgactaaaatttctaatacatgcaattcgatgtgaaattttatttttttaaattgctgatctaataaattataagatcttttttatctctatagttttcttacaattattttgtttaattttaatatttgtattacttagttatgacataaatatgtgatgaattttaaagtagctttctttgttactaaatgtatctacgaatgaagtagctttctttgttactaaatgtatcaacgaatggccaagttcggatatgtgaaaaaattctagagacacttgagagacatgaatctctggcctagactcatagagaaactctatatctcagcggaatttatgttgcaaccgataataaccattcaaaacatctacctatagttgcgttagttctcgaagaagctgtaggcttgtttttcgaagttttgtggactgatcgcgattagaattgctcatgacaactaagataaggattccagtgcttaggtactgtggcaaccacgcaaatttccgagttttgcgagttcggaatcggtgttttacctcgcaactatgctttttccaattagaagcgatccaaagctatttaagtagttatgttatatttattttctgtagattgttttgatattttttttgttatctttataattctgtcacaaatcaaaaatggtataaaatttaatcttttaccaaaaaaaaaacatctacctattttattctatatctttttagtcatgtttatcttctaattttaaaatttaattcgtttctagaatttcatatgcgttaaaaaatcaaagaattagtttctgattatttaagtctttgtatgctttgcatctctaaaatttgagtaattttagtctcacaatcgatgagagataggaactaggaaaggcaactacaccagtttctttctgtataataaaataattattattattattatagtttccagatttctacttccttaaaaatgttaattttatgtttcttctactttgactattaaaaaaggattaaaaaaaagtgtatatattttcttaaaagaaaaaaataataactaaatttcaccgcgggttaccaactctatatatacatcttctgtttctctattaggttcccaaagctctccaaaatccctgtgaaatcggattccatagtcttctaaatcttctggtacgtgacaaaattagggtttaagattttcaacgagttagggttagcgtcacgtttctatactcgtttttaaacgagttagggtttacgtcggcttctctgtactttgttgattctccaatttgctttcagtgattattgtgttgcgctttgttttctctcttggggattcatcgccatggctacgtaatatcttgttatcgttgttagtctgattagttttagttttgtgttttgaatgataataacctcttctgttgtagttattttgatatatctcatgtcttagtattactttactgtagaatcttgttcaaggtcataatgatgaaggagttaatcctattggaggaaggatggtctgtcatgaagactggtgttgcaaagc

SEQ ID NO: 1186 - DNA, 122543 bp, Arabidopsis thaliana
gaattccgttttgagtttgtcgactatggagtcaaggaatctggatgaggatgttgtaagcattatgtcatcgacatagagcaacaagtaggccttgtcttgcccgtgtttgtacacaaatagagaagcatcacatttactctgcacaaaacccatcttttaacataagctacaaaccgagcattccaagcccgtggtgcttgtttcaggccatacaacgccttatttagcttgcatacataacccggattcctattgtcaacaaaccctgctggtggatacatgtaactgtttcttcaagctctccatgcaaaaaggcgttttgtacatccaactgatgcaccaggcaatgtcgttcaaccgcaaagttcaatactgcacgaattgtagcaggcttaaccactgggctaaacgtttcatcaaaattgactccttgttccaaaaatttaccattagagacaagtctgaatttctatctagagagtgagccgtcagcattaaacttgtgcttgtacaaccaaatcgaattgatgatgtttgtacctgcaggtttaggcactaaactccaagtgtaagtcttaatcaaagcatcatactcttctgtcattgaaggattccaattcggatccattagagcttgcttataaccctttggaatttgggaaagtgtttgagcatttagtgagagaattttctttggtttacgaatgccctgctgcgatctagtcaccatacgctgtggtggtggttgagtcgctacatgaggagcaagagcagtcaaaactagatctgtttcatttgtcgctggaagagaaggtgtaagcaaaagctgcttttgaatttgagaaggctctgtatccgcttcaagaaagtcataagcagagtcgattttagcattggtgatttggtaagggaagatatcctcttaaaatgtgacatgacgagatatcacaattttccgtgtttttaaatcaaaacatctataccctgagtcaagtagaggataacttaggaaagctgatggtgatgaccttggatcaagtttgttttgattatttgtgtgaggataacaaagagaaccaaaaactctaagatgagagtaagatggtgttttgttgaataacactgagaaatgaattttgttatcgatagaagtggatggaaggagattgagaatgtgaactgcattatttagaccatctccaatgatcacctctatatttttctctattttagagggaactctattttagacgcattgtgctccagtggtcacctctaaaatagagtttcctcaaaaataaaggaaaaaatagagatgaattgtagagatctctatttatagagacaaaaagtatatatctctattttttcctctatttcagaggaaactctattttaaaggtgaccattggagcacaatgtctttaaaatagagtcatctctataaatagaggaaaatatagagattactattggagatgcccttagagcttctacccaaaacgtattgggaagatgagcttgaagcagcatagtgcaaaaagcattgttgatgggttcgtatcatgcgttccaatctgccattttgttgagaggtgtatggacacgaaaaacgaaactgtatcccgtgtttagcaaagaaatcatgaaactgtgagtttttatactcaccaccattatcacactgtagagatttaatgtgtttctcgaattgtgttttgacataggtatgaaattgcagaaattttgagaacacatcactcttattgcgaagaggataaatccatagaaaatgagagaattgatcgagaaacaaaacatagtaacgaattccggatagactaggaataggagaagtccacaaatcagaatgtattatttcaaacgtagaagaaactttagagcatctccaacggtgagagtcccccatgggctctcaccaattgttttagtataaattatttgaaattttgttagatgagaacttgtgttttttattttaagttttcttagtccaatggttagtctctctaattaggttcttaggaaaaaaaaaattgtttcataaaaattaataaaagacatcaaaagtatttgaacattgaagaaacaagatttaaaccaagaagaaaccaacttctttgaaccattctataattatcctttgtttccacaattcgatcattagccaaatgacagcttttgcagccaatgacaacaaacgttcagttcaaaacagaaataaagattgacagagcttaaaagtgtcccaaagccaagaggactaggagtgcttggaatttggttatatccaatgaatctcatttcgtagttagtgtctgtatttgctaaatcttgaatggtggtagaatgaagttatgattcaccggaatgctattaatatacatgcattcacacacacagttatcatcaactatcatgtatgaaactgaccgttgcttttcgctactatagtaaagttttgtttaatcacagtcttaagagcatagggaaatgttgcataatcacaatttaatcacatgaaattcaaagtctccactgctcctaacgccgaccatattacgtccaccaagactaaatccaaaatcaagactttctaaatctgaaagcatcattgcctaattgttccaatcaagcatcaatcaccataaaatagattattgtttttgttcttccctagtaatagattacattgttgctaagagatgaggaggtcctgtaggatcatagtttgactaaatctaaggagtttattattaatacccaaatcatcagacccaataagcttcatcatagccatcatcagctcgtgattttttcatttcatcgcagtaacaaaatattggccaacaaaaacactaatgtcggttccagattctaattcaaccagtagtgtctattatagaccaaacaagaaaacaaagtatgaacactaaccataagccttaagtcctcaagatatagcacaaaagcaactaacttggaagcattcttctataagataatatctccttgttcgatgtgccataactacatgtaacaaaacttatgctccaatcattgtttctaacaaaaatcaatccaaaccaacactacttaagagcaaagattagtgttttagccttagttttataactaccaccatctcagaaattgaaagttatcagttggggaattagccaatgaataaaacaccatcgagcaaacaaacccaattcaaaatttcacaaattgatcacacaaacacagattaaaaacgagattcatgtacgcaaaaattcaatgctcggaacaatttctaactaaatatgacaggaaactaacaaaggagatcgaaaatcgaaacttacagatcaaaatgggtataaagcggagtcttcagaatcaccaaagcgaaagggatgaagcagtttcaaagatgatgaatttggtgggtaagcaagagaaagaggttgaagaagaaaatctggacaaaggagactgcctcaaatgatcgtgtcaatcgtcggagcataagtcaccggaatcaccatcgctatcgccatcgcatcgtcggagaaagtcggggaaaatcgaaaaatgtttgggtttaattgttcacgcgttttttttccttgttttgtcaaacatccgaccaatgggaacgcgccacgtcatcgtctctcttacctctcaaaacctctctcaagagagacagctctctcaataatacatcattttgatttaattttgaaactttttttctcggagaatcagggagagaactccatttatcaaacattggagatgctcttagatgtggatgaataaaacggaagcttaacatgctttccaatttgacatgcattacaagtcaatgtgagagtctttttatttggatgaaaataagaataagaaattaacgtcttcaaaacatcgttgctagggtgtggtagtcttcgatgccatatgtcagacgattgagctagaaaggtagaggctggagctgaagttttattgaaagctggaaaaaccggatatagatccccactgctatcattgcgaagaagagtcctcttggtgcgaagatcctttatagaaaagccaaatgggtcaaattctattgagcatttgttatccttagtaaatcgacgaaccgaaacaagatttttgattatgtcaggtgtgacaagaacattatgaagagttaagggacgaggtttattagcaataaataaggatccagtggcagtaacaggaatgcaaccaccattcccaaaaatgacagattttccgatgctaggataaagagaaagttggagattattacctgcaccagaagtcaagtaggctgttgcaccagagtccatgtaccactgagaatcagggggatcttgaagagaaaaggtgttgaatgcttctgcaagatcagccgtgctctcaggtttaggagtcctgaagtgagcgtttgactgctgagaatggtaaggaggtaaaagaccaaaaaagccttgtccattggcattcagctgcggtgggtatccccactgatgattccacatctgatacgggtttggatagaatggtggcctgttccaggagttgaagccttgacgattgtaaccatatgaggatcgtcctccgccccgaaacctgttgttgcctccgccacgtcctctgtaagtcatctgagtaggacctgagcgttggtagttcacatgaggcgcctctgagacaacaagcacagtagaggaggatgagtggtccacatgtgttgggttcggtcttcatgatgagccgttcaggtgatcctcttcatcttgtaacatggttgtggcgtcgtcgaagcgtggaagtggctggcgatgtttgataacattgatgatgttgtcaaacttagcattcagaccattcaacacgtacatcatgagtgtccgatcttgaactggagcatcaacatttgagagagagtcaggaagctttttcatctcacgacagtaatcggcgatcttcatgtcaccaatctctttcgtacggagctcattgtccaaacgaagagcacgagcatccttgttgttgcggaattgattttcaattctcagccagatctcccttgaggttgaaccaaagacgaacgaaccttggaactgctttggtgtgagagttccgtagagccagagcttcacaattccatcacgtttctgccagttaacatcagcggcgttggcaggttgaagggttccatcgatgtgaccaagaacatcaaaggagaggcagtgggtgagaaagagttctctccacgcatcgtagttactttcttcaatgtcaagaatcacaggaatgtgagatttgatgttagagacaccatagatcttttctgggttcatgatagcggccatttttgagtaaggaaaagagaatagagaagagatataagagagaagaagcaatcaaagagagatgtgctctgataccatgtaagattgtgtaagtctccttgaggagatagctttgcattagagtgaatatatacatgattcagttacaagagttcagatctttcctagattctgggtacatgaggatattaacaaagtcgtaattaaacttataacaaacatattgagaagaatattgagaagaatatcctatctcccaataccctcccgtagtcttagcatcggtctcctaattctttacgcaattaaacatctttaaagaggcttttctaactatgaaatggcccgcactatcacccggacattgttctatgaccatcgttttaagaacataacaaccagataaaagcaagaggacaaatttatccctaaggtacttcaatgatagaagagccaaattttttagagatgtgtattagaatgtctcatatcggctgggactaagatctttgaacaatatataaaggatgtggcaatccttagctctaaagttacattttgggataaattaagccacattcccaatatggtatcagagctcatggttggctcaacaaacaaaatttccaaaaaatggtttcccacctatgtggcccatacaagtggcatgtcttgttgtatttccgagatgttaggcttaaactgatttctgttggatcgtttcacacccacatctcgaggaggcttattagaatatccatattggttgaaatcaacatctttggacaatatataaagaaggtgacaatccttaactctagaactaggttttgagatcagttaatgtgggacattctaataacagaaaagaaaccaatgaaaacagatccataagaaccacattgtacagcatcaaagtcacaagcactgaagtctgaagaacgtgtacacaagctacttggaagtaccactagagcagacccaatagaacaagtatcactctcgaaacatagctcacgcacacatcgttcaatagcggttccaacacatacttcaatatctctataagcatcactcttttgactaattagttttatactcaaactttctagaaccggagcctgtgtaatggcaatgatgtgtgaataaacagctttgattttttttttttttaattttttttttttcatcaaacagctttgattcaacatctaaataatgcagcaaaagaaccttgccggtgattagcagaataattgggccaaggcccattagcagagcaaaatcaactagacgaaatgcataccaatctggccgacgtcgaataaaaaaacgtttaacgatccaacggttatgaacaaacagaaaggaaggtgtacgataaaactccgtaagaccaaccgtagaagattcgtccccaattgtcagtcggtgaaattaaagaggcatcttaaccaaagaagtctctcttacgagttttctcttcggctttccactttttcctctgttcgtgtcattcttctcgtagatctcgagagagagccttaaggtaaagagaaacttaaaaaaaatcgatcctttaagttaaagtttgtatctttcgattgttttgttccgacccttgtaaaatttgttctcaggaaattaaaaaaggttggattttgatcgatgggttcttcgtcaggacaacccgaatttgattacttgtttaaggttttattgatcggagattctggtgttggaaagagctctcttttgttgagtttcacatctaatacctttgatgatctttctccaacgattggtgagttttagattaattgatcaagctttaaagtaccgatcttagcttttgtgttttgttttttgatcttggatctgttttgtctaggtgtggattttaaggttaagtatctgacaattggagaaaagaaactcaagcttgcgatttgggatacaggtgagagatcaatactcttgttgttgttgtttggaatttatgtaaatgtcacacatcttgtggtttcaatttagatgtttaggggaatcattgaacaatatagagtttgagaatgtctcccacaatgatgtgtgataatctttttttatgttgtgtcttagtcagtcattgttgcctaagctctaatgtgactggtgaagaagaagagtcttggatttgcaatggtttagagattagtatcttgtatttgaatagtttagagattagtcttgtctttagaatattttaaaggttagtcttgtatttagaatagtttatagatgaagtaacagtattacttataattattttaagattagtcttgtatctagaataagcttaggatagactcatctatttagaatagttttgatattagaacagttgagagaatagtctcttgcgatttgtcggttgttctgtgatcactgatcagtttttgggtgtttatgatcactcagctgggcaagagagatttaggacgctaacaagttcgtattacagaggagctcagggtataattatgggtatgtctcactcttaataaacacagttatttgtcatccgtgatccctataagtgacttggaattctccaattgtgtagtatatgatgtgacacgaagagacacgttcacaaacctatcagacatatgggctaaggaaatcgacctctattcgactaatcaggattgcattaagatgcttgtcgggaataaagttgataaggtaagatcatctcgtctctccgtcctcatgttgagtgtctataatgttgcatagcaattgatctttatgtaatttccaggagagtgaaagagctgtttctaaaaaagaaggcatagactttgctcgggagtacggatgtttgtttctggagtgtagtgcaaagactcgagtcaacgttgagcaatgttttgaagagcttgttcttaaggtagtaaattttgcagctagcttctagatttttgttctgaggatatatgagtatgtcgtaatctttctttatttgcagatattggaaacgccgagtcttactgctgaaggttcgtctggcggaaagaagaacatcttcaaacaaaaccccgcacagaccaccagtacctcgtcgagctactgctgctcgtcttagacatggttttacagtttatgacaaattacactcttgctcatcatcttgttcttgattgtctctttgttttcctaaaccgcagcatcttggatgtaaatctcaaccctgatttgaaagttgtgttcactagtttcgaatctcggatttttctctgttctttgaaaatcatttatttctgaattgtagaactcagattcataaacacaataactgttgcagagtagctcaaaaagcaagaacgtaagagaaaaaaaaaaaacacctactactaaagttttgggtatatgtttctatctctttgacttctcttgcaaccacaatcatatgaggcacattttcttctggattgaatcttacacatctcaaagcaagtttaccgaaagcttccatttgcaatcttagattatcgtcactcgcggttgttcaacagtgattggtctatcagtccggtgaaggaacctcgctccagcaacttgccaacatagtcaggcaatgggacacaaccatcatccaaggtgcattgtaacttcccagtcaagagaattagcatgatgataccaaggccatagacgtcaatattcccagtgacaaaacctattttgcgataatcggcctcgatatagctggttgatccgcaaagtatgtcagttacaccttattctccttctagaattggtatgctgaggctaaaacaagacaatttacccataaggtttccattagcatagggtcttcccttgcttttcatatactcataaggtttccattttcagcgtatttgcaaacaagaaccggaagaggaaactctagacaaccacccaagagatttagaacgtttttgtgactactcatcaaagatgaaaccgcgatatcacgaaataaattgtcagggtcgtagatcttgccttgacatacctttatcagcacgcttctgttttctattatacatttgtaacacatgaatctgtctacatcgatcatgtaagtccagtcgaagttttttgtagcttgagcgagacgaaaacgtacggatgggattgtatatacctcgtgaagatgcaatgagtttcctccaacaataagctcccattttcttgaaaaggaatctcctcttctttcttcctttcctccttcttatttaccctcaacaaattcaaacaagacatctcttaaccaagataattgtggtaaattgagatcttaatttcttgcaaacaaagagacgcaagaaagaaggagatagacactaatgcaagtcaaagtccacaaagtgaaaaacaaagaaaaaaagtcaatgaagcgaaagagtaaaaaaaaaagaagggttttgggtggcatggtctacgacagtttgggcatggaaggtgggctataaagtgttgatgggctcaacaaggaagaaggaagtctggcccgtgtagcagtttggtaaatgaaagacggtgcaaaatgcaaatcttgcttttatatgttgacgatctatgagagtcagagtctcatagactttttagctcaaaagagcttgcgatcaggcttgttagaatgatatgaaagaaaagtagtcataaccagtcctgcatcaacatatattagagtcttagagcattattattggtaatattttaaattagtcttagcataattttttgaaatatatatatatatatatatatatatataattgatttaaaaaaattgtgatgttaagagtttggttaagagattaaaattttggcaatatgtaatggtgggttcttaacttggagttcttaagaaaaaaaaaattaaaataaaaacattttaattttaaaaaacttaataattattataaaatttgaaacatacataacatcaaagtttaaacaaacatgacgtaaatataaacgaaaaagattagttaaactagtgattcctgcaaaaaaaaattctatatatgctcgaccaaatcagatttcaaatattgatgcgcacatcgatcatgaagtcgagttctagtgtccaacatattttcaagattttaaagcatatatgtagaacatgtgaactccacgtgtgaacttgttgttgattccatttgtacgaattcgaatacatcaaatagattgtacacatctcgttcttcttctactatcatattattaagtattatacatgcttgcataatatttgatatttttatcttatctcaaataaaaactgaattttttacaatggcaaatcgaggttgcaaaactccaaaagaacactcgacatctatacggcaagctttttgattggatgcaaataaagttgcttttcgactttgtggaattgaaatagatcggataaattcatcaattagagtggccaaatcgatgtgtgcaaccagcgttggtggagatggatggcaggaggtcataaaatcggtgacatcgatgattggtttcgatttcaagcgaatcgattccggtgtcgcgttgtgtgaaagagagagaggaagaagaaacaaaagaaaaaagaaacactcaattataaaataccacaactcttagggttttagtttgacttttatataagagtcatatttcatataatcaataaaaatattatatttcatttctaattaaccgaagaattactctaagatactaccaataattgtgctcttagggtaaaaaaattgatttggaccttttgttatctgtgaaaatttttgagtattttactatttttttgaagtaagtagttttaacatttccctaataaatatggactcttgttatataaatcatttagaaaagatattatggtttttctaacatattttggggaaaatgtcggaaaaaaaatcccaaactttcaaatttgaggcaaaaattgtttgaactttcgaaatgttataatcctgcattttagattgagtttttgataaattggtctattgtaatcaaaattatctataaatttacacgtaaaccaaatttcactcactttactagtagtttgaaagaatactattgaaatgtaatttttgatattataatttctaaatatcattccaagttgtagcattattgtgggaaacttttaatctatgaacatcctactaattaattagatttggatagcctattggacttttaaagaaaactagtcggtatccaatcgtgcaaaatcatacatgactgctgacatggatgcttggagacgtggatgccacgtccttgatgacgtcgttgtcatatcattttcttgttaaaaaaagatttgtatcttttttttttctcaatcactattattttacggaattatgaaaaaaaaatcatttttgatgtaaggattaaaatcttatttttgaaacttataaccaatatttaaaccaaatataatatttaaaccgagtttataaatccaaaattcacaactcttcttctaatttttttgaatcaatttcaatgaagaacataaaccatacattaatcttatatattaatcttttgaacctttttcttcgcctaatcataaaatctacattctttatataatccacccaaaactatttcattgacattggcccattaatggcccaataagagtttcgatggacctagaaaaaaatcattcagactctattctcagttattttctacattcgtaataccatttttggatccaaatgtgagtcaaatttgcctctcgactccatcaatgctgagaaagtttatttccataagttactataaaattctttgagaaaatattgtatactgatgtttagatagtactagttttgtaaacaaaattaatgattttgaagttattatagataatcttgactatcgcaatacccccaaactgttgatagtctagttgactatctaagtgaaaacaaaaaatattcaaaagcttagactttatgtagcaatatattatcattgaaagttttgacgatgatgaagatgaagatgatgctaaaaataatttatacgtatatttagaaccagtttacatataaaaaataatttatacttatatatcttttcatagtttttggatatatagttcaagaagacaataccaacaaaaattgatgcaatgaaaaacatttatagacgaatatgagaaagttgcaatttttttataaataaacaataattcactatttatcttagtttctgtctttaataaatttatataatattaataactatttatatctttagttagtgagatcaaaaccattaatttagccattttttaatgcatttttccgagtttcaccaactgaaaagatttatttgttatcctttatttcatataaattaaattttaaagtaaagacaaactatattatttggttttgtcgtttataaatatttattttctggttttggtgattaagttctcttcttaaaaagtattttttttttggtgaatttaacatcaacaccgatcggatttgtctacctttgcaatgcatcttgcgtaattattcaatcttagatggacattaattagtttgatattttgatgataaccacaacaatcttaataaaaaggttttaacaaaatttctcaatatttcgtgggtttaacattaataccattaaatcggccaaatttacgacacatcttggcgtgttcctccatcttaaatgatttttttatttcacgcaggaattcaatatttaaattttgaaattataaatcgtaaaattcctatctattctccaatccaaaatttcaaaaaatttatagtatatcaaaattatctaaatgttttacatataaataaacttgaaccaaaattttactcgttcaatcagcaattttaaaaaatactttagatatgtatttttgatattttaatttctaaatataattcctagtcgtattgttattgtctgattatttttatttaaattgaacatcctactaattagatgttgatagcctagtggactatccaagtgaaaataagaaatattcaaaagcttagagtttataaaaattgtattagtttgatgatgaagttgaatatgatatggcgaaaagaaaaaaaaattgaagatgacactatagtaaatttggaaacagtttacacatacaaatttattcacatttataacttttcataatttttagatatagttgaagaaaaccacaccaaacacatttgatgcaatgaaaacatttagtgatgaatgaatatgagaaagttgcaatttttttttataaataaacaactttttcactaaattctcttagtttatttctataataagtttatataataactaatttatgaatttaattgaatcataaattacatttcttttttatttagagttttttagtctcactgaattatattaaatttcatactattataacttgagaataaaataaattattatttgatattattaataaatttgtaaaagttcaacgtagtagatttgattaatcttgttattatttaaatacttaaaattggaccaccatctaattagcatcagtttaacatttttcattcaaagatttatagtataataaatataacaaaacaatataaaatttcatcaatataattgcaaaaaatcaaactaaatccctgaaaaaaaaagaatatatgcctagacagaaaaaaagaaagaaagaaataaagtaatgaagaaaactagaaatgttgcttcttctcctattgaatgtgtccacctccagaccaaacccaccaccactcttgttcggtctttcttcttcttcctcttcaactctcaaacaatctcttcctttatcatcttctatctcttcctctgttccttcttctggttttgccaatcaccaaacctgactaacccttctcctcctcctctctccgtcgctccccttcgcggggatgccaattctccaccgccggaatcttcttcttctccggcgacgaaatcttctttaatgatttcttctagagatcccaatgccctctttagcggcggtggaatcaggtttctaaaaaattgaatctttctatcgatttttctcaaattttaggatcttaatttttttgtttctatccggttttgttgtagctttttagcaggagttagaactgtgaagtttagttatggttattctagtcttaaaggtaaaagagcaacaatggaggattacttcgaaactagaatctctgatgttaatggacaaatggttgctttctttggtgtctttgatggtaacttgtttctctaacaacacattattactctttaaccaaagtgttgtcatttgacttgtttttgtttggtttgttaggtcatggtggagcaagaactgcagaatatcttaaaaacaatcttttcaagaatttagttagtcatgatgattttatctcagacactaagaaagctattggtaataatgagacaaagtttgagtgttctagtagctttttccatggaatttgtgtttttgagactttgaattttgattctgcagttgaagtttttaagcagacagatgaagagtatcttattgaagaggcaggacaaccgaagaatgctggctcgactgctgcgactgcttttcttataggtgataagttgattgttgctaacgttggtgattctagagttgtagcgtcaagaaatggttcaggtttgattattgttctttctagatttatttaactggtgtttaaggttttggatatgtgacggctctttgtttgttctgtagctgttccactctctgatgatcataaacctgatagatcagatgagcgacaacggattgaagatgctggtggctttattatttgggctggtaaagtttctacattctctcttcttatgtttgctttagagtgtatgtgcaatgtgttttgggttgtttagttattagttattacttggaatacaccaggaacatggcgagttggtggaattcttgcggtctctcgggcttttggagataagcaacttaagccatatgtgattgcggagccagaaattcaggtacttagatggtttactctcttgttgcatggccattgagcctctttgttcttttgcgcctatactcacacacagtactctttaggaggaggatataagcacattggagtttattgttgttgctagtgatggactgtggaatgtgttgtcaaacaaggtttgtttccagataaagctcttttgaattcttatgctttactctatgtatggttttgcaaatgcacatgttgtctataaccattaacaaggaattgagtacctacctaaaccacactctcgaaactattttgtcaggatgccgtggcaatagtacgagacatttcagatgcggaaacagcagcaagaaagcttgtgcaagaaggttacgcacggggtagctgcgacaatatcacttgcattgttgtacgattcgaggtttcttgagcaagaaccaaattcatattgttcttgttctatgaatgtaccatcttcagctgttgaatacactaacatatttgggttatacaattttataaaagaaagatatatttatgagactctatgtcccctaattgttcatacatcaacatgtagttttagctacattttgtttcatctggtctaaagcaatgatatttattaccaaaaggagctgaaacactagagttacttctaataaagtcttatgtttctgcttctttagtctcagcatcttcaatctctccctcttcctccacactagaatcttctccctttttcaacttcttgttctccaagaattcagcaaggcctttaagcgcgatatcagcgttcttactcgccatgagctgctgcgtgacttcagcgggagtcgaactcacttcaagaatgagcttctcaatgggatcaaacaagacatgctcatcggttttaaggtacaaagccacaagcttcttgaacacaaagggagtacaattgtccatgagaatatgaacatccatccgtcctggtctaagcaacgccgggtcgagcttctccttgtgattagtagtgaaaattatgattttctcttctccacaacttgaccaaagtccatcaacaaagttcaatagaccagacaaagatatctgtaccacaagaaagaaagattcataagactaaagaaactaacaaaacagaggaaattttcattaaacttaccccaacttcaaacttcttcttcctcttttgtggctcaccatcatcttctccaccatcttcttccttcttcttactctgacgtctacgagaagcatcagctccacaatcaatatcttcaataagaagaatcgaccggttcttggtcgaagtaagaatctcccgcaactcaccatcatctctaacactttgaatctgaagatcatagatatgatacttcatatgattagcaatggcagctaccatagaagacttcccggttcccggtggaccgtaaagaagatatcctcgcttccaagcacgtcctacgctcttgaagaagtcttttcctttagagaaagcatcaagatcgtcaatcaaagtcttctttaggtctggctcaacagctaacgtctcaaaggtcgtgtgatgctcgaagatagcagattcccatttagaccggtcttggttataagtatagatcttgagattctcgcgatggctcattatcttctccgctgatttcgctaagtaagtgaagtaatccgtcattatcttctcacgaaactccttcttacatgtcaaatgaaagtacctgaacacacaaaacatgtcagatcaaagaagaatagagtctaagagataaaagacaacagagtttttttagggttaccgtttttcgggtagatacttcttagtttcaacagagtgaagagtccattctagatgaatcccttcaaagttatcaatgatcttagtgttcacagggataccaagttttggctcagcagctggattcttaagattacttgaacccacaagaagtttgcctgtagaaagtccggcgagacaggtaggtaagtaaacttcagcagcacggaacgtctgattctcaacaaactcccaacgttgctctatcacaaaagtgaaatcagattgaaagtaagaagagaagaagtctacagctttcatagctatgtactctctgattcttttaggcacaatctcgttgaggattgttcgaaaaagcatcgtgattgcggaaaaagatgtgtaaagagagaaaactgctgatacagaaggaacttgactataaagagtcgccatttgtgcttaagagaagaaggaagatgatgcaaaagtgaaagagttgtgtatatgtttatataaagagttttggtgagtggtgaacaagaaagttttatttttttaatattaattttttgtaaagttttggtttttaggatttttttaatattagattgaattttcagggaaagtgtaaggaaaacttgggtggaaagctccaaagatggatgagagaaagtggaggacgtcatttaggtcaaggaagaaaggacaaggcaagtcacattctcacatatgctttaagacgtgcacatatgtggacaactaaacaatgtgattaatgtatctatgtacactttttttcgaaaactaaaactttctagtgaacttattgaataatctaatgtatgcaaagaaattaacgtacaaattaggttggcggcgtgcaaataaactttgggtccggagggtttccaaaagctataaattctcttttattacaaaagtttagctctgaagtctcaaccttatagtttttccgagtttgaagatgataaaatctaattgtatcgtttatgagaagaaaatgtatgcactatttgaaaaatagatacaaagataacattgacaatataactaatttagcatttttgaatttatagagaaaatctgaatccactagctcgattaaggattgataagtaagtccggaatcaactcttctcaaacaaagcaagcagagatagaagatacgtaagagtctttaactctggtatgcgaaagaatctgatttttaacaaaaaaattaaagttatgtataaaaaatttattaaacacacgataaaatcgatgtaacaacgatatttttcttttgaatttaatttaacattacatttgacaaaaaaaaatgataagtgaatacaaaaaataacattaccaacatatataatttactagcgtttttgatcttttgaattcaaaccattgaccaagataatgcatattgttatagatttagattagtctactaaatcaagagttgtgtggttaaccagcctgattaagcgtataacctaatacgtgtaaacagcagacaacaaaacaagtggcatgtacgagttaagaagtaagattttgtcatgtatgtaaattattacacgcaaggaaaataagtggaagctgacatgtaggtgaaactgatgtaatacaactagggagattggtcggtcttattcaaagaaaagaaaaaggcaaaaatataaattaaacgtaaaaggacttattggctaaggaagaaaagattctcaatggagggtcgtaaattgttttggtttttgttatttatattactattattttgaaagaccaatgtttggagtcgtgcacatggcaaatcaattgaataatgttgaaaaaagcaaccaaagttataaaagccgatccagattggtcggtcggacctgtatatcactttctttcactaattttggtcttgttttatagctaaaactagcgatttatcgagttggtaatatttggaaaaaaaaagctcaccaataatgtttttacttaacgccttttagtttccaacattcattaatgtttttttgtatagaaatttgtaattacataaaagaagaactgaagaagcaacctagacatgttcctcttattaggatgaaattctcctctctgaatatcatgaaactttggtctcaagatagagagacaattactttgataagtttggttcgatgagtgacatcaacattgctccattttctatggatattgcatttgactagttgctttacgaatatctatattcaggatcaaaacaaagtgaataacgaatcaaagtcgatctaacagaaatttttgcctagtcttaatgtattgttattatacttttttgtcttttagtttaaactatatttaaaaatgatttatttttgtttatagatatagtattgagtatggactcatgctcagaaacgaatagatctagtaaacagaaagatacttatttcaatttgttttccgagtggtttaaaacattggaaacaacgttagccatagtaaaaatgttaaaaaagcatgaactttcaaatttgggacgattaaatcttcaactacgcggaagacaaataaatcacaaagtttctgttgactttaaatttaaatcgcaaagtttcggttgaccagtcattttagacatgtcgttaagttgcttaacagagaatgttaacgctgtttaagtgtcgttagttgcctctgttatctcaaaaacgacacagtttactgttgaaacaaaacggcgtcgttttgtaacttgaaacaaataaagacctaaatcccaaatcgaaattcatttcccccaaatcaaaaatcatcttctaaccctagaatttcttcttcttgctcgtgattctttctgttcgaattagctcgggattctttctctctgttccgatgagttcaagctctgccacatccggtgtcgtcggagatcgtggtgtcccgtgtaagtgtgtgtgtggtttaagtgtcacagttttcacatcgaaatcacaagataactcaggacgtccgttcttccgttgtattagcaaacgagatgctaagacgtggacaaacaacaggaatgtaagttaagtatgattgtgtaacttgtggtttagatcttgcaatgtaagcttacaatttgtaatattttttgtggcataggggcatttgtttaagtgggtcgaagaagcagtgtttgaagaggttgaagatgctttgccaagattagcagtaattgcaaacgagattaacaaagccaaatcagaggcacttgagttaaaggctatgattcaggaaatattagaagaagcattgatcaataagatgcaaatccgaagaaattggtgcggcttgaaactgggttttgtgtggctttttgtcatcaccattgtgattgtttacgtgttgtttggtcaggataatgagaagaaacttgtagcagggtactagtgtagtgtatgcattgtagtattgtagtattgtagtagttatgcacttgtatggagcttgtattgtatgcattgtatggagcttgtatttgtgaaacatgactttgattaatacatgtttggtttggttcgaacttgttgcagtaagcgaattagaatgacaccaattttgcatacaaactgaaaccatgttttgcatacaaactgaaaccatgttttgcaaccaaaagaaacaccaatccatgttttgaaacaaagacaaacacaaccagcagattctaatccgactaaaacacaaaaacaaatagaacctgcagtttcagtttctaaaccgtgaaacacaaaaaacaaaccaaaccaaccaatcaaacaatcctagtttgaacaattaaaccatgcttccaacccttgtaatcctctccctcctctctgtgaccctcctctccctcctctctgtgactctcctcttcttacactccgtgttcctcttgtctcagttggtgctgcttgagatggtgcttcttgagatggttgggaaagagattgtgctccttgagatggtgctccttgagatggtgcttcctgagatggttgtgaaagaggtgctccgtgaaaaacttgagatggtgctccgtgagaagatggtgctccttgtgcttgcggttcttgccatgtttgaccttgtccaaaaaagaccatcctcggatcctgttttcaatcaaccaaaatatcaaaactattcgcagaatttttgtgaacatcaagatgttaaaatgttaaagaggataccttgtcttttcttggtcgaccccttggtcttttagctggaggtgcaactgtctcgttcttacatccttgcttattgtgtccttctccttgacaatttgaacaagtcatcactcggtgcaaacgtgataactcggtggtacttgagctagaggcagttgaagattcaaaaacgccttttctcctagcatgattctttggtcttcctggattgcctcttctccatggaggtggtaacactcctactttattgactgttggccacaaaagcttaccttgaacaggcccaataccgtcattgtatgtttgcttccacatactagttgtgtaccagtcactaacataatcctccactttttgacgctttcctattatgacagaggcagcatgaatacatgggatacctgtcatctgccacttcatacaaccacaagtgttattattcatatctacagtgaacgaatccactggacccaccttgatctcatgtttattgtgcctagccatccatctttgacaaacctgtgacccagcaatcatcttctctatctcagcatgtgccctttttgtgaatcgagtcctcaatctatcagcaatcacatacctcttctcattacgcaccatacactgcctcctaatgtcttccaacatgtcaagtaatggcttcctccttgcttctctaattgttctattgaaggactcactgagattgtttagattgtcattgcagcagctcccaatcttgaagaaagctctagaccatgtcacaggcagagtcttgagtaacaactcaaaagcacttgcattgtagctcttgagtgctcgcatatgagcaccaaattcgccttcagtgtagctcctaacaattttccagaagaggcgttgaagctccatatcatggctatttctcttccagttttccatgatgtgccttgcacattgtctatgctcagcttgtggaatgaccgaatgaattgctttcactaaaccctgaaatagatgatagaaagaagatataattaaacaaggcaatcgaaagctgaaactaactaaattaagttagtaagacttacactttgtttgtctgatattattgctacgtttcttccatcttgaagatccaaagttcttgatagcatccttacaaaccaatcccagttgtcatcattctcaatctctacaactgcccaagctattggtactattctattatctccatctcttccagtagcagccaataaatgtccctttatgtcccatttaaggaatgcaccatctattcctataataggcctacatgtttgcttccaagactctttttgtgacttaaaacagatgaaaagacgaagaaacctttgtaagcttccaatggttggtccgaggatagtctcaatctcaaaagttgtcccaggattgcttcgaaagattttggcttgataatcccaaatccgtgcaaagtgttcttgatgagtagcttgtctttctctcataaccattgtcttcgccttcgaacattgatcttctgtcacagtgagtttatactctctcttgatctcatccaccatctcttgtttggttattttcggattctttctcaacctttccctgaataaccaagctattgttctttgcttcagcatctttgagtaacccgatctaacacacgaatgcccatctttgtataccttaacttgcatcttctgtttcttcttatcataggaacagtagcatctccattgacaattgacatcagtatcagtgcacttcgctcctacccttaaactctgtgatctatacaacttaatatcatacctcgtcttcaaagaatacctcaacacagcaattttgaaatcttctgggttgttgaatgttttcgctaacctcaaagactcttcaggatcgtctgtttgtggagcaccatcttcgtcgtcattatctccttcatcatcactgtgtactaatggatctggaatcctctcgtcatcccagatatcatcaccactatcaccatcgctttcgttttcctcttctctcgcctctgctccaaattcggcttcaaaatcttcgcaatcttcttcttccatatctagacctccattgccttcttcttcaacactctctccattgtttacttctgcctcgacaccaccaccatcgtttacttctgcctccgcattacctccattgtttacttctgcctccacaatacctccatcgtttacatctctctccagaccacctccatcgtctacttctacctcgacaccacctccatcattcacttctgcctcgacacatacaatgtggcactctccctcttcaccaatttgtttgttgttcccgactctctcgtctgcatagcaaacctcatcacagtcttcatcaccatcaactgcacaatcatcatcactcagagcctcgcgatcttcctcacaatcaacaacgtcgtccttcttccgttttcgcgacttccgattcgatttgggttgaacaacatccactagttgaggaacatcctccgcttcatcggcagaggcttgactcaatctctgtgaccgacgaagaataacctttcccccccgagtacgagccatttcaatgggatttttaattctagggttagaatgatttttcgatttgggggaaatgaagttcgatttgggatttatgtgtcgttttgtttcaacagtaaactgtgtcgtttttgagataacagaggcaactaacgacacttaaacagcgttaacgttctctgttaagcaacttaacgacatgtctaaaatgactggtcaaccgaaactttgcgatttaaatttaaagtcaacagaaactttgtgatttatttgtcttccgcgtagttgaagatttaatcgtcccaaatttgaaagttcatgttttttttaacatttttcccatagatttatagtgacttttttttattaatggtgctaagtaaggtttttcttaaattaattaataagtatattctacgattaaagcttttagttggacaaaaacgttaacgtcgatgccattgaaacgtgttgcacctttcactgtctaaagttttttttttcagagtttctttaaagtttttctaaagtgaagtatattcagataatccacgaaatttttgacaaatgatatttggctccacgacatgttcacgtccacgaaaatcatgaacacacgatgatttattttggtgggacttgtgagtgtattctgtagacaggagttatgtcaatcgttgttcgtaccaatataactcaattgctgtgagaaaataaatttcaagaaaacaccacaaaacaaaattgcaaaacagcctggttacagcttggtaggttactatgacatgaagtagaagtaccaatgtatcagtggttacagcctgttatagaagttaagaaaccaaattctagctctaggcagaaaaaaaatgaaaaggcctaggaagtttgagttagaaaataattgcaaaaagagagatgactacattttgttgctatagtatccctccaaaacccatcactagttcagtttaatatgaaataacaaattgttaatagcttgttacaaataatattattcgtaattttgtcacaaattaaagatggaattacaattgaattatagcgttataaattaacttcaaagatacatgtcactatcattttaatttctatgagtattggctatcatcattattttagcaagagtagattcgtaacgaaaattttgttggtgttttgagggaaattattggctatatcgtttcgtttttccgtttttttttatagatattttcatctataataacatattcaaatttgaattttcttaagagatctcgatttcttggtcttttgagggaaattttatttttgaaaccaaagatgtaataatatacaataacatgtttcttataaattcaatgttgttgttattcctaaatatattttttctgttttatcatattctcatgataattataatggatccgattaagttaacaagcgaagctatggtcattacaacttagagttagagattagaaaattagttcaggttgtgcttagagtgttaaaagagacattcctagctctaaccccatttctaaaatcttcgcttagaatagtgaagtttgaggcatctgcctttctaacactataactataagcaaccataaacaaatcttttagcctctaatcgtataactttcttgtcctattagaagctaatagctttgtttgttaacctaatgagagccactagagttatcaatgaaataagaaaaaaatcaaataagcagatagaataacaacaaatgacattgatttgagtctacaagacaattatacttcatatctttgatttcgaaaataagtatccagtcgagagacccaagagaaatcaagatctcataggagaaaaaagaagagagaaaactgaaatgatgtcatgtacacacacgcatatatataggagatttcttgctatggatgtttcagaatactttctaaatctaaattttttttggaaacaaatatttagctttgactaatctatttaataaatatcttgatatgtataatttggaaaaagatattagcattgaccgatttatatgtgttttgtgtggtcaaagtgaacggttttatgttaatccatttcattcacaattctagaaagaaagttatccaagaattgttaaaagaaaaatgttccaaataaaactcatccaaaattttgttaaaatatgttagactctctttaaatgtttataacaaatatgttataacaccccgattttaagaatatgttggtgcatgtagagaggtttaaaagaattgatttgggcacctatatcatcaaagtgcactaatctttttggtcaaacgtcctaacaaaactccacaattaagagtgtctaggctggagtagtttcaggatgggtgaccttccgagaagtgatcgtcggaaccatgcgagtgaggataaagcatggggaaagatcatgtggtgatttgtagggtcggtaacaaatctttaaagcttcctagacgtggtgcaccgactgtcggacaaaggtggacccgagagaggacgtggggcccactactaaaggcggtcacggcattacaagtgatatcagagccgaacccagatgagtgtagagtcaagaaggctcgcaccaacgggagttacgatcttggtgcgcaacgaggacgttgcgatctgctagtggggtgaattgtaacaccctggtttcaagaatattttggcgcacagaccgtcggactggggtgggcccatgtgcccgagagatgtcgtggaacccactggtaaaagcggtcggggcgttacacatgttaaaaatacaaattaaaaatcaaaagtatccaaaagaaaaaatcttccaaataaagtaattaaataggaaattatttattttaagaaactattttgcaatatttttggattaataatttgtgaaacaaattaaatagtaagtaatattggtcgtatattttagaacatataatattatatatgttatcattttttagttaatataaataagaacttatcaattataaataaaataaatgatgaaaaataaacgcaaatattgattgaagcaaaatataaataaaaaatgaagtggttaggaaacttttgttctacatccattatagaagagaaaaagattggagaaattggacatcttatacatcttatacatcttcctgatgaatttattgggtcctaatgggccacatctccttctaatatctcatgtcttgtttattaggttgagaaccacacataacctatgtctaatcttgtataaaaggcgtttgctgtgaatcaaactgaataaaaaaatctctttaagaactcccaaggtttcttgacatggtatagagccaaaacctaatctctaggtatttggtttttcgttttctttgggatctatatcttttggtcttctaaacaatctgaaactctcataattttttttttctcatctcttctccctaatgtcggacgtcgagactttaaatcctgttacagattgttcttccattctgaaaaggaagtctttaactcgattttcttatgttcaaaggcgtacaatatcttcgtacgatcttactcacagtgataatcctggaactcttatctctcaacccttgcttcctagacctaactatgataaatggtccataaacatacgattggctcttcaagctcaaaagaaattcgggtttgcagacggctctattcctaaacccgatgatgactccgaagattatgaagattggtgtgctaataatgcccttgtagtgtcttggataaagctcacaattgttgaaactttacgatcctctttcacatagtgatgattctcacgagctttggatgcacataaagaaacgtttttttgttaaaaacggtcaaagagttcaaaggctaaaaacatcttcttctaatatctcatgttttgttgattaggtcgagaaccacacataacttatgtctaatcttgtataaaaggtgtttaccgtgaatcaaactgaattggaaaatctctttaagaactccaaaggtttcttgacggaattggagcatatgatattggcatattgtgttttataatattgcgacaatcaaaacaaagaagcatgttttttttatttattttttgggtagggagagatttaccttccaacatttgaagagattgcaaatttggttaacatctaacatggtcattctttggtattggccatgcatgtaacagttagcatcgttttatgttgggagggtcaagattcaagcggaaaatattggggcagtaaacctgttatggctttgtgtatatccaccataaatacaacctactcacgaaattcattgagatggatgtttgagtagagaatagtgacccttgccctctttataaacccctttgaactctggttggggagagtttttaaactttgtttcacaaagtatgatgttttgaagaaacaattcaagttttcatgcaaaatattaagttaaacagattttggaccattaatgttcagcagtaaattatatcattggtcaaattattttaaatagatattaatgtgtgtttttaacgttaaaaactcaaattaattaatttcttagattttgtgattgtgtgtaaaataagggtgggcatttcagtttaatttcgggttcggttattggatcttataaaactttaatcaaactcaaccgaagttagtatggtttggtttgggtttgggtcaatctattttcggttcggtttggttttaattcggttttaaaagactaatcaatgtaacgaaacaaaattattttgtcattatcgtttgaactttgaatttgataatagttaactgaattaaaaagtttaataactcaaataaaccataaaaagaaattaaaagtgcaaagaattacatatttagtaaaattcaaagaaagtgtttaactaattcttattgactataaatataaaatatatttctaggagttttaaaggttagaataaaaaaaatgtcaataatgttttagaaaatagattatattaaccaatcatgcaagtatagttattagtagtattaattagatatggtatttgcttaaagtaaaagatatgcatactcacatatcctttaaaaaaaaaaaaaagagtatctgttatatgttttgtagctatatcttaactaattgatacgttatatggcttaggaaacttgaaaaccgtaatttttaaaaagagaatgaaattgattcaataccaccactaacaattgaagaaatatttgaaatcatataatacaaaacagaagatataaaagacttaaaagatgaaaagattgtttcttatgtaaagaaaattacaaaattaaaaagacacttcacttaataacattttctacttcccaactattaaaagtttttaaatatacttttttttggtgcaccaactttttgattcaaactagagaatacaataggattgtttatattcggagaaacccaaataacaagcttagaaattaaagtacatgagcatacataaataaaaatatagagacacaagctcgtccaagcttgataaagcattagaagaaatgtcgaaacaaattaacacgagcaaaactatgagaaaaaacacattaaacacataatcatcaactaggtgagtagataatcaccatactttgtgacgttttgttacatgtgttttcagtgatcagttaaaaatcttaaataattgtttaagcatgaaatccagagatgaacgcctacaacttataagctgttatgttgctatacaaaaggaaatggaattaataattaatgtataatcaagaaagaaaacgacatcggaagcgcgatatagagaaaatgaaaattagagttgatggacgagtcttactgaaataagagtgtaacatttatgaatgaaaatgttttgtgggagaaaagagactacgctgctaagagcccttattgtcacaaagaaggaagccgacagagaagaaggtaagagggacactgaacctccatcaatgattctcgaattcttgctatggagttcatgaatgtttatacattggtttgtgagtagtgtgttaagatgagtaaatcagcgatttacgtgatatgggttggggtattttcacggatgtaaacatatgattaaggtgttagttaagtcattgatgtcttcgtagtagatgactagtgttgagagctataactggtcgatggtgaattgatgaatcagaaataccactataaaagaaactgatattttaaacaaaatagtcttatcctttttatttgggaagtgagtaccatgttttagatctttcggaaaacatggtgaataggctactcgacagctacactcactgtggaaattctagtcagatggtaaatgcttatattatccatagttatattatatacaaaactttactggaaaataaactaatatatagaagaaaaaaaaaatcaaaatttctctgccggtaacgatgttgttttaaaatgtataaatgcattactacaattatcgatatgtttaagtgtgttttatactttttgttatgtacaaacaagacaaaatatatatctaatgacgtatatttgaatatgattttatttatttgttactcgaatgcaataaaacttactatatacatttgacaataaatttctttttttttttgtagtattcttgcatataaactgaaatgtttattaaacaaataggttgcatctatgcaactaatattatttttacaacagtgattgttcatattcatttttgttcgccgaaaagaaaaaaattaagttagaaatatccttttctcttccttcattcttcttgacattatcaattttgtctttatattcctgatttttcatataagttacattttaaatttccaaatcacatagtatcctttttttatgcaacaatcacatagtagtgttttattcctattctcccaaaaaaagactacattattgaccgtattaatacaattcaagcatgtgaaatgaagaaaaaactctttaccaaaatctgaatactcgtgatgccgttacacccgatctatgataacattttatatctttttatgcctctacttcattgtttatgaattttccccaatcatgatagttgaagtatctattcacacaatagtttattttatgtatgatttcgacttagtagttttatttgaatatgaattggccgaattccttaattttctattattatatattaactagctagttgtgagtggtgaaaaaattatagtgatagatttaaggaaatttttatttaaaatataaacatatttacagtatcaatttgtttttgtctccaaagtatccggttttgcaagtacaataataggtaaaataaaatctttcatttattgaatgactatatacttcgtgttacaaattttcttttcaaaatatcataaaataaatactacactgaaatttttagaatgtagattgtatgaattagaaaggaagctcaaaatcacgacaacaagggggttttattttagttatggacgatggaaactgaagtacattatacaaatgcatgcaacaatagataagagaaaaataaaaatagaacaagacaccggtaacattttctacccctttttattacataagttttgattcttatttcaacttgagagactctttttggacttcaagtttttgacctcctcttttgaatatatgaatatcttcttcaccatgttgcataattcactacatgcaaaccacacaaaaattgaaatatcaatgtctctcaagattttaactaatctttcaatcgatagaaatagaaaggaaacttacggccatggatcgtctccaactagcatctcaagttgaccgaggaacattggacgaagacattaaatgtttgatgtcccatggtgaaactttcttaggtctcggaaatgatgcaaattcatcccactgcacctgcaaaattagagttaattagtgatatgttatttattgtacttaaaaacatatttctaaaagaatgttataaagtgtaaatgaaattttacttctaagctgcgccactctgaacacttccaatgaggagagaaatcactaattccaataattgtcccaaaatatcttaatcaatagaacaaaatgtgttatcatagataatattagacgttataaatatatttgagcagaaaaaagttttcatctaataataccttgtttcagataaatcatcatcctcaaaccgcattgtatattttgaaccgacattgaacttattgttcacagcgtctaagaatttttcgtgactgacaatatattgacttgacctgatacttataaagacacaaaatataaacctacatgttgaaggaactaatctattgataaatgaatataatctaaaatgtgagttctaatggttctttgaattaccttggcttgtaaaccataatgaacatacattggttatcaaaagcatgctttgcggaagcaattaccccatgtctcatactttctattgatactattgatgaaggtatattcccttgttgacgtcttgctcatctgataccaactcgtaactctccagtctctcccctgaaaacataagtaaatagtttaaagcccaaaactcaagaaccaaaagatatataaaaagaaccaatattatacctagcgaatacaataacatcccctacaaccaatttttttgatgttgtgaatgcattccaaccagttgtgtctccgcggggtacttgcaaggaataagaagcttattaattacttctctaggatttattacctcaatagctgtgtttgaattatataaataaaaggaattattacctctatagctgtgtttgaatctccattgattaccatggagatctatagcaataagttcttgtgccggtataggttgagacatatcctaaaccaaattttaatatgtaatgtctaatgaaagcttaaaattcaaattcgtttagtaaaaactataaaataaaataacagcggagggagacattcaatggcatgtttacatggaacagagaattcaccttgagcgcttgtatctgaagccgttaaaacctttgtaaaggaattaactattggcctaaattgattttcattctcagtagggattacaacttgctaaaaatttaacaaaatcagaaaatcaatgcgatataatagtagtaaaatagaattaacttaaaaataaaacagaaatactaaatttttacttacagttgtatctggcatcaaagtaatctcaacataagtctcatcactattgttttccacctaaaatcaaacatcaaacaattaaccaattagtttttttttataattaaatcaaccatagaaattctgcgtattcgcaaaaacataatagagatataccttaagatgaatagcaataacacgacattgaagcttagaaggaagatcacaatttggttgtaactcattcaactcttctctagtagatgcctcaacctgaaaagttgttaaatggtttcatatacgaaagagaaggagagagagagagagagagagagagagagagagagagagagagagagagagagagagagagagagagagagagagagagagagagagagagagagagagagagagagagagagagagagagagagagagagagagagaactaacaagctctatatggccttgaggaaagtaatacactttttctccaagttttggaatatcacacaaaggtcccgcacagagtttccataactgctcgtacatatagctcttggacccatcaactgccgaacaaaaaccaaaacattataaccaaaataagtttttaataaaataaaataaaaaagtcaaaatttcttacttatgccagataattcagactgtacattcacaacattgccactttccataagctcgtatccaaagattggtatagaaaaatatgttatctcaacagttattatacaactttctccttttcctcaacttctcgcgctaccatgaaagcgcataatatcacatttataggtgagaaatatcaaaatacattaaaatacttccttagatttaaatactaaatttaataagattaccaaaaattaataaatgtaatttagagaaatgtcattaatattttgactacatgtaagaaaatcaaatttcttatatgtttatgattaacttactaaaattaatatattcattattcatatataagttgagtaatataatacagttttaatacttacaacaaaaaaaaatcaaattttttttatagatagccatataaatttaaataggagttctttcttgatcatgattgcatgaatatgaattctttagtgtcgtggtcatgcctttcatataggaactatggtacgtctcatgttagctttttcttttcaacatctgcattattcatatataaaaaaacattctgattgaaatttgtttgaaagtagccatataaattttaagtatgagtttttgcttcatgctgattgcatgaataggaattctctagcgccgtgatcagacatttcatatgggatctatggtatatcccatgttagctttttttttcgctttctttttaagtttttaaggattccttataaaccagttttctcatatattgtcgctttttggagacatctccaaagacatgttcccctttccattttccatttcgtaatgatgtgaatttccatgtatcccatggctattgggaatgtccttggtatcatgggtggattaccggtggtggttgttgttctgccttagaagagggtgtggcttatagtatgatgagttccatcaaaaatgtacaagggcttctcgctgcctcttaacccgaatcatgtatgaagatgcagagtttgatcaatcagctgatggcgatcagaacgttgatggatttcaggaagctgcatcgagttgcatcagacgcttgagttgctgacatgaatgcaagagcagacgtggcaagttgtggcggatgatgtggagagccaagaatggaagctggcttggcgtggtatcaaagacaagattcactgagaatatatagaagatatcatctcgaagaataaggaaaggaataggcttggaaacaaggaagattccatatcaagagattctcggagttcctaagtttagggttctggagaataggtataagtattctacgacaaagggggagcagccttgagcacactagaatattcgatacattgtaaaacttcaaagcattgtaagagcttgaaggtgagtgtgtagttctctttgtcttcacgggttagtgataagaaacagaggagagaattagagtttattatacttgtaaaagagtttattatcaataagaataagttttaagcatttcaacatcttgtgacgtctttggacgcaagtcttgataaagaagtataaagtgggggatactagggatacgacctggttaactaagaagaatacatggtcgcccacctggcggagtatcacggctgggctgcgagaagtagtgctttcggggatgagttgggttgtaggggacggtcgaaaaataagattttggaaggataaatggctgtttaataagacagtgagtctgttggcgattgaggatcttcatgcgggtttgaattggtccttgcgagtgatttatggcacgaaggaagagggtgggactttgagaagatatcgccgtttataactatggtgttgctatctgtggtgttggacaaggtaacaggagctcgagactgtatggcatggggggaaactgttgacggtgagttctcagttagatcggctcatgctttggtgacaagagatttgagtccgcaaccaaatgtctcagctctttttagtcgcatttggggagtggtggcgacggagagagcaaagatgtttctctgcttagttggtaatcaagctttaatgacagatgttgagcggttttggagacatcgttgcataacagaggtatgtcaaatgtgcaaaggaggaagtgagacgattctccatatgcttcaagactgtcccgcaatggcaggtctttggaaccaaattatccctcggcggaggaggagactcttttttgagcaatcattgattgagtggctgtattcaaacctcggtgatgatcaggagacgtatgagagtgtatggtctacggttttcacgatggcagtttggtgggcttggaagtggcgttgtgataatgaatttgacaagcggggtaagtgtcgagatagaatgcgtcttatcaaggaggcggctaaggaggtcactcttgctactaataagatgaacggaaggtcggggtcagtcggcagcattgatatattggttggttggagtgtgccttcggaggggtagctgaagcttaatacggatggggcttcaagaggtaacccggcgttgtctacggcgggaggagtgttacgggatagagagggagagtggcttgggggcttctcgcttaacattggacggcgtacggctccggtggcggagttatggggtgtctattatggcctttttttgcttgggagaagaaagtgacaagagtggagttggagatagactcagctttggtggttggttttcttaagacaggggttagcgaacgacaccctttgtctttcctggtacgattgtgtcatggctttttatcaaaggactggatagtccgtatttctcacgtgtatagggaagctaaccgtcttgctgacgggttagcgaactatgcgtttttgttgcccattgggattcatgtttttgtttctgttcctgatgttgttgagccgctttttagtgatgacgttattgggtctgcgcgccttcgtcgagtacgctcggatttgtagtttgttttagttttaataatatgggagactagtctcccctcttctaccaaaaaaaaaaaaaacatcttgtgacgtctctatacctttatcagagcagacacctactaacagtttatcaggtgagatcttgcgacaagggatggagaaatcacaacaccacggtacgttacagcagacccagaaacttgttgataaacaatgtagctactggaaggaagcgtcaaggtacaaaatcaacttgtatggtctgagcagaaatctgattaggcaatgtgctggatacgagggatttggtcactcaacatctctttgtcctactctcagaaacaaagaaatgaagtgttacggttgtgaaggatatggacacacaaaggcggaatgtgttgaaagtgttgttgtagataatgtcacacaaaggactgaaaaatgcaacgttgcgtacacctctgagattaacaagtccgaatgcaagccttggtattttgacagtggttgttcaagacatatgacggaagctcagaaaaatttgctaaaatatgaggatgtatcagcaggaaaagtgacttttagtgatggagctaaagggaaaatcaaaggaaaatgagtcactaagggggaaatgcaaccaaagttgaagaatgtattcttggtggatggactcaaagcaaatctcataagtataagccaactgtgtgatgaagggcttgatgttacctttactagggttggatgcagggcattggataagcaggggtcagtcaagctggagggacaacgatctgcaaacaattgctacatgtggacatctaattccacttgtctgcgcccatctttggaaaatgatttcaaggtctggcatcagaaactaggacatttgaacttcaagacattgatcaaactagcaaatcatgagattgtcagaggaatgccaaagctgaattctgatagttcgtttgtgtgtggaccatgcaataaagggaaacaagtcaaagttaatcacaaagtggttcagaatattggaactacccatgccgtagagctgattcatatggatttaatggggccaatcaatgttcagagccgagcaggcaagacgtatatctttgttatggttgatgacttcacacgctacacgtgggttcgtttcttgcaagaaaaatcaaatgcatttgagagtttccgagttctagctctccaattaaagaacggacgggcaggtattgaaacaatttgaagtgatcatggtggtgaatttcagaatgagttcttcgacaagttttgcaatgatcagggaattgttcatcaatattctgcaccaagaacacctcaacaacaatggggtagtggaaaggaagaatagaacactacaggagatggctcgtgcaatgctacacgaaaatgatgtaccacggcatttgtgggatgaagcagttaatactgcttgttacatcatcaaccgggtgtatgtcagatgagggacaaccaaaactccgtatgaattatgggaagggaagactccaacagtgacatactttcatgtcttcggatgcacttgctatatactgaatgataaagatcaacttgggaagtttgatgcaaagagtgacgaaggaatctttttggggtattcagaaagaagcaaagcgtacagagttttcaacaagcgcacgcgactgattcaagtagtaatcaatgtaagctttgatgatacctatgttccagttctaccagttcttcaaccaacaaacaacagtgaatccgttaatcatgagtctgattctgccattcaaaagtctcgtgaagaaagtagtcatccagaacaaatacttgataaatgacagaatatctcttagaatgatgaatcggctgcagtgcatagaaatcactccaaaactgatgttataggagagattcaggggggaagaattactagaaacgtgaaagtagactacagacaactcgcgggcaagcgacaaactacctcaccaactaacgcggaaatagttcagtttgcatgttttgtttctagtgttgaaccgaaggatcataaagaagcattgatcgaagagtattgtatagcagcaatgcaggaagagctaggacaattcaaacgcagcgaagtgtgggacttaacacctcaaccggctgattcaaatgttgttggtacgaaatggatattcaaaaacaagatcaatgaggatggtctcgtggtcagaaacaaggctagattggtagctcaagggtactctcaagtagaaggcgttgactttgaagagacgtttgcaccagtggcaagactgaagtcaatcaggtttctgtttgggatggcatgtgcattaaacttcaaattacattagatggatgtgaaacatgcctttctagatggtgtacttcaggaagaagtatatgtggaacaacctaagggttttgaaaactctaagcatccaaaccatgtttacaagcttaaaaaggccctttacggattaaaacaggcacctagagcatggtacgaacgtctcactaccttcttggttaatcaaggatatgttcgtgggagtgtagacaagactctgtttgttttgaaggatgacaatggtctgttgattgttcagatatatgttgatgacatagtgtttggttcaacatgtcaagagtatgtcgaaaggtttgtttaaagtatgaccaaggagtttgagatgagtctgtgtggtgagctaacctactttttgggtctgcaaatcaaacaaacagaacatggtttcttcatatctcaaagaacgtatgccaagaatctggttgagagatatggtttaaaaggaagcaaaacagctagaacaccaatggatgtgactgataagctgtccaaagacgaagaaggagaggatgttgatgagcgggtatacagagggatgatcgagagtttactctatctgactacaagcaggccagacatctgtttagctgtgggagtatgtgcaagatataaggcaaaacccaaggcctcacatatgttggcaataaagagaataatcaagtatgtgaacggcactgtgaacctgggcttgtactacaccaaggatactaccagaagtttgatgggctactgtgatgctgactgagccggatcgctggaagatagatggagtaccagtggaggatgcttctttatgggaaacaacatggtctcatggcacagcaagaaacagaagagtgtttcattatctacggttgaagataagcatagcaaaaaatcatgttcaacactctcgcacgaaacatattgatattaggcatcattttattcgtgaacttgttgaggcaaaacaaatagtgattggtcatgtgggtagtgagcatcaactagctgatctatttaccaaaccattggatttcaacagatttattagtctgcgaccttccattggtgtatgtgaactatgaattgtttgtgagttgtgctgatctaaaacagggatataaagtgagaacaggtcacagaaatccaaagatgaatagaggatcatcactatgtaaaattatgtagaaaatagctgcctgtcatgccggttcaaatcagacgtaaaacattgccatctaacaggaggtcaaagaggtgagaagatcaaccaaccgaatggatttgatacacaaaaaaaaaaatgtgtatcaagatcactaagtttgaatattagcaattgagaagttaagtgatattgctgatttaacaaaagagggagcaattcgaaaaacacatatcatcaagctcttgtttggtaaagctatcttcaaaggaaattccagctgcctgttacacgttgccctgattgtttagaactgaaggcatgacagtgtgaaagactagccgctgaacattgagctgatctatcaacgatctgaatggttgtgacagtttcttgctaagttctgaacaattgatgggaacaatggattgaaccgggtcacaagtgaaaggtatattggtgcgctcaaacatgtaggtactcgcgtgtatcaattgactatttgggtcactgttcaagtgcatgatgaaagttgtgcttgctaaattatcactgaaaatattgtggttattgattaattgagtgtacatggatgtgtatttgcaagtgagcactaatgaattgttgagtgtttcagattgtcatgtttgctgagcctaagttcatctgggccgtttaggcttatgaggtgcaagtccatcatgcgggaattgattggagggaaaaagctagagttttgaggatcatatctgaaccgctcaggaaagtgaaaagtctcttgcgtgctctagagaactcactctgatctctaaggaaaatcattctgtgcaaatgaaatcgttcttcaagggtcttgtgcaatctccaatcgagtcttcgggttctgaatcttcatccatagcatcagaaagctacagcccaaatctgatggatgatcttgtgagcactcctcacaatcagttggttctgcatgcaaatttcggcgggccacatttgcgacgtgcttcatcaccagactgctccacatgtccagcttcctgtagaacttgtggatattagtgatgatgatgaggacgattcgtcttccatcgttccagtcagaaaccgacagaactctgtgccaatgtctactgaagtcccaggggtatcatccgtgacatcgcgtctggcgaagcgcaaacgagacactccaagtgaggagttcctgtcacagaaacaacagaaaggaaagggagttgttgtttcaggtcctagaaggagcaatctatttcaggagttcaaattcagttctcctctcgctgaacaaaggtacttgtatttctctcgtcgacaaatgatcaaggaactgaatttggatcctctggctggtaaatggatcacggatgtgatctctgaggcgggtcttctcaacacagtaacgggaattcaaggattttaggacgaggtggtctatgaattctgggccaacttaccttccgttcgagtggaaggggactcagtcaaggtgttagtaaggggtttcgagtgtgaattctcacacgcgaagatcaatgctctgttttaccagaaacctgtcggggccagaactcaacgcatttagactgctgggttggtttatgatgaggtggctcggtacttgacagatggtcgagtccaaaatctgcagaacattcccatgaataagttttcagagaactggaagaatctgttcaagatatcttgttgaaattggtctcccacaacaaaggaagggtatgtgagcattgacagaggaaggcttgtctatcgcatagctcacaaaatggcgattgattttggagaagtggtgtatgatcatgtttttcaacttgctctgaagcctgtctccaacttctttctgtcgtttcctagcctcatttattgcttgattcagactcaacatcctgacatccagatactcaagcgcacatcggccagggtttcacaaggtcagtcagctggcaagaaggtagcatcttcaacagcaccagccacgcctttgggtctacgggcagctgtgcaacaggctgtcaccattctgcaggctgccttagatgcaggtaagtgatgtgcctctatcctttgctcttctgttataataatacctattgaaatttttgactaagttgtgcactcaagcagggggagatgatgcgagaactgcggatgagtatgggaactttgatctatgactaagggggcacatgatttgagggggagtatttgtttttagttggttttgtttgttcttatcgtttgggtctagggttatttagaccagaacaatgctttgctcgggtgattgtatcatcacgatgtgtaataagatgtttaaaaacagggtttttaaaactaattgcaatatgttgattatgctagtttatggctctagattctgtctactggctgtgtgttgtgtttcctgattgcattttaggttatatcaatggaggaatgcttgagtatcaaactcagtaaaaaagggggagattgaagatgtagagtttgatcaatcagctgatggcgatcagaacgttgatggatttcaggaagctgcatcgagttgcatcagacgcttgagttgctgacatgaatgcaagagcagacgtggcaagttgtggcggatgatgtggagagccaagaatggaagctggcttggcgtggtatcaaagacaagattcatcgagaagatataaaagatatcatctcgaagaataaggaaaggaatgggcttggaaacaaggaagattccatatcaagagaatctcggagatcctaggtttagggttctggagaataggtataagtattctaggacaaagagggagcctccttgagcactctagaatatttgatacattacttcaaagcattgtaagagcttgaaggtgagtgtgtagttctcttggtcttcacgggttagtgataagaaacagatgagagaattagggcttagttattcttagtcgggtttgatttcttgggtagattagatcaagtaagaaccgagataatacttgtaaaagagtttattattaataagaataaattttaagcatttcaacatcttgtgacgtctctataccttttaatgtcatccaaacattttgctctatgtgttttattgatggcttttattttttccttaaaatttagatgataacgcttcagatctcactcttcatttcatgactttactctttgttgtatgttatgttaggcaagcaaccttgaatcaaacttctttgtgggactcctacaattgaggagagagacaatgtcgagatgtaacacaaattttattgaaaatctttatcggctgatccgtgtttgtatggaagagaataaatctatttgtggtgagattaagaggttcaaagaatataaccatagttgatgcaaaattagatgacgctactcccggccggcccataccttaaagtgtaaaacatctaatattttgaaatagaggggtgtcatatttacattatatttttgaaatataatatattaagagaaaatagaataatatgagttgtctataaataattataaattttaaataatattaatatcattttcacattataattttccaaaaataataattttattaattaaatgaaacctaagtaacggacatggtgaattattaacttatgttgtcgctaatgtactgtaggtaggaattaaacgaatatacaattttcaaatgtttgaaacattatgttaattttgcaatatgtataatacattgtcaacttcatccatgatataaataagatgttgtatggactgtataaaaataataataaaagaatcataccattcacatacagtagaaaatacttatttttacttttaataaataatagctattatcagtaaaactataatctcatcatgttatgattgatttccaccaaaaaacaaatcatggtatgattgataagatttcaaattacatggtgaccatatcaataaacttttaaattttatcattattataatatatttttatacattgtaaatatcatcccaaagtaataataatttcatttaaccgtgcatgggatggaaacttatttagttcaaattttaaaaaatgaaaagaaaaaacaattggtgaacaaaaattgagatttttaaaatgtggacattttaattatgtaaacaacccccaatatattttaatttaaatcaaagttttcttataaaactaaccaccccaagttaagcttggacctcgtctggtttccctaagagacaactctgtttccattacaaaaggttttcaacttaatccactttgagtcatcatcgttagccatccatcttttcgagtaacccaccgtgtacactatatattcaaaagaggactagagtaagagtttatagatttttttttaatacatgtaattatatataagatatgtaatcaattgttattaatttgtttaaaattttacggcattgttaccataatcaattaattataataactaactatatagtcatttttcttgtattttgaaccgattcgaaacagtatgctttgtttctactccaacatgataagcttatgcctattaagtctgctatggtttgtcacgctatcaatttattggtgatgtatcacggccattcattatctaccggtaaattttaatcaacctctcattcgccttcacaccaagctcaaccgtcttcataatagttgtcaaccatggaggtctaatattccaaaaattggccacctttttctttctcatttttcttattctccttcacgactgttatcttgaaccttgatgatatagatggtcaaatcaattcctttaaacctctatgtatacagtaacatattcataaaattaggttgttacaattcactcatactaacagatcgcaacgtcctcgttgtgcaccaacaccgtcacccccaaaggtgtgaaccttcttcactccacactcatctaggttcggctctgatactacttgtaataccacttgtaacaacccaaccgcccttaccagtgagccccacatcctctctcgggcccataggcccacccctatccgacgatcggtgagtcacgtccggaaagctttaaagacttgttaccgaccctacaaatcaccacatgatctttcaccatgttttgtcttcacttgcatcgttccgacaatcattttccggaaggtcacccatccgaaaaattactccaacccaagaacgcttaactttggagttctctcacgacctttgactaaaaagataattgcactttggtgacataggtggccaaattatttattttaaacctctttgcatagactaccatattcttgaaatctgtgtgttacaattcaccctcaataatagatcgcaacgagttgcacaccaagatcgttacccccaatggtgcaatctttcttgactccaacacacatctgagtttggctctgataccacttgtaacgccctaaccagtgggccccacatcctctttcgggcccatgggtctacccatgtccgactaagtgtgccacgtttgggaggctttaaagatttgttactgatcctataaatcaccacatgatgctttgttctcactcgcatggttccgacaatcacatcccggaaggtcacctatcgtgaaactactctagcccaagcacgcttaactatggagttctctcaggacatttgtccgaaaagataagtgcaatttggttacaaaggtagccaaattaattattttaaacctcttcgcatacactagcagattcctgaaatcaatgtgttacagaaataaaaataattaagtaagcgaatttcttatttttacattgcaaattaaaaatagtaacttcttattttacaaattttttgctacaataataacattagattttctatttttgatttattaaaaagaaaaattgtgactttttctgttgtttatgcgttattatgaaaattttccttaataattttacaaaattaacaatatattatacaaaaacaaattagactaaagagtatggaaaaatatgtatttatttttctaactgtgtactaacaattttgattttagcaatgtaaactttagactagagacctcaattcttttttagaaaaaataattaaaaacatttatttcacttttaattttgttttgaaattgaaacaattaactaattgtaagaattatagaaaatatattttttttgaacatagaatgtgttgtacatttctttatctaattaataattttagaaaaagaaacaaaaataaataaaaataagtttttgaataatttattgtcaatgatagtcaataccggtcaacgttggtcaatattggattttgacaatttatgcattggaataagatgttcgtgatgttgaccatatatcaccatttagttaatatatgtatgcatgcaatacatttaatttgtttacttggttgtacattcttaaatttggcatgtgtcgttatgtatttagttctagttcgtgaagctgaatatgttttttcttaaaacaaatatgtttactaatttagaaataaggataaacaagtttttttctttccttcacaacaaaaaattattaaggattttcattttctgctttacctgttttcgcctcttcttttttttggacattttgggcctacggaactcgtattctttttttgttcaatgaagtttaaaaaaaaaaaaaaaatcactagaaacttgtccggatgtgagcgaaattagaatacaatttacgagattaaaatttactttaaatataatatctatattctcgtacttgtctagttgtctttgaatacaaagctatactatataaatattttacttgtatgaaaccaaaccgtaagtcccatgcttttacacaactctactaatttacttcattcgacttggcctatgaaagtgatggtctgatagagacccttgacaaaattgacgacaaaagtcaaaaactttcttattaccaaattgatttctcgatacatcaatgtactgtgcaatgctattaacttcttttatgtggaatcaaatattgaaattgtccctgactaacgaatacaacctgtgccctgaggttaaaagtaaatgaaaaaatcactttatagttggaatcttgttagttaaaaaaagttatgcagaccaatgaattttctgatcaaaagaatcccaagacaataagtccaagagtgcgcaagtatcatgacctccatgaatttgcaactggtcagcctcgaagctgaacacactgctctctatactgatcttgctcgatccttgagccgatttcaacttatgttcattcatggcgtatcttaacttcactgaattttcccagcgccatgtcatctcgtatatcttaatcagaaccaggtaaggaaaagatgactttggttcagattctaacatagttttcgctacagtctcagcgagtcttgtgtctccaagatcaagagatgcacagagaatcggttcccagatatgagagcttggttcaaaaggtatcttgtcagcaatgtcctttgcttcattgatcataccgactctgcaaagcaattcgattatacaggcgtaatgctcgttcccgggattaactccatgagccttttccattgaagagaatatctgaattccttcattaacaaagccagcataacaacaagctactaagatacccattaacgtcactctatcgggtttcagactttggttcatcagcaattgattgaaaatggcaagggactcaactgctctactgtttctcgccaagcccattatcactgtgttccaaaagatcaaatcttttccatctgttttggcaaacactcccattgctaaatcaactgaaccggttttgaagtacatctccatgagtgaggtagctactgccgtatccaaatcaaaccctaacttaataaccaaagaatgaacgtctgctccgtgatctagcatcacagcattcattgagctcagaacgctactgaacgtgaacttatcaggcctaacactctgcgtcatggcaaggataaagagccgaagagcatcttctccacaacaatgccacgaatagctaccgatcatggaattgcacaacactgaatcccatttctccaactctctaaaaagtttaaccgaatcatccaatctgttacatttggaaaacatatcaatcccagctcctaaaacaatactgttagataaaaaccccatcttgatacaaagagcaagagcctgcttacccttactcagttctcgtaaatcagagcaaatagacacaaccatcgaaactgtatattcatcaggttgaatctccatttctctcatcaaccaaaactgatccaaagccacttccttattaccagaatcggaacaagacaaaatcaaacagttccacgagacaacatctctatcctccatagttaaaaacaccgataacgcgtaatcaaaaactcctaatcttctatacatatccataacagagttccacacaaccaaattatacctactcacaccactacaaatagcattaccatgaatctgttccccatgtcgaacacaagtaacaagagaagctagaatcgaaaaagtaaactccgttggtctaatctcccatctctgcatatcgaagaaaaccctaatcccatattcatgaaacccacaagaaaccaaccctgaaatcattgtattccagctaacaacatctcgttcaggcatttcgtcgaacaggtcaagtgcgttattgagataaccatttttaaacaaaccctttaagcaaacgttccaggttatggtgttcttatcaggaatatcgtcgaacagttggagggcattgatgacggatccggatttgaagtagagctgaaggcagcgatttccccaataagtagtgcgtacgaatccagcttccaggagctgggcatggacgattttggctaaagttggagactttgagagtaaagagcggtttacgagacgcgagaagtagagagaggacggcatgcaaagtccatgagctcgtcggagcagttggaacatacatgtgcggatttttattttatttttttccaaaagaaaactcaagagaaagagatgtaagagattaaatttaatatgcttaattcatattgtttacaatttgtattttaaaattataatttttcttttttattgtgtttatgtattttacaatagtataagtatcggaattatatgtatataagtatcggaattatatgtagtggtgtgacaaatttaataatgacaaatttataatgatattaaccgcggacctatattttcattaaataaaaaataattgaatattttttaggatgatttaataaatttatattattgtttgatttaaatgtataatttaccgtgagacgaaattttataacttaaattttaaagttttaagttgtatttgtttattttgttaaatatttaatattatataattgtattttgattgttgtttttcagatttcacccgtaatacaccatcccatattaatatcgaatttaacccgtcattgtaggatttcacacgtggtagtatttaattgtataataataatttgattgtaattctagaatttctctgcatggttgacaactattatgaagacgtttgagcttggtgtgaaagcgaatgagaggttgtttaaaatttaccggtagataatgaatggccgtgatacatcaccaataaattgatagcgtgacaaaccatagcagacttaataggcataagcttatcatgttggagtagaaacaaagcatactgtttcgaatcggttcaaaatacaagaaaaatgactatatagttagttattataattaattgattatggtaacaatgccgtaaaattttaaacaaattaataacaattgattacatatcttatatataattacatgtattaaaaaaaaatctttaaactcttactctagtcctcttttgaatatatagtgtacacggtgggttactcgaaaagatggatggctaacgatgatgactcaaagtggattaagttgaaaaccttttgtaatggaaacagagttgtctcttagggaaaccagacgaggtccaagcttaacttagggtggttagttttataagaaaactttgatttaaattaaaatatattgggggttgtttacataattaaaatgtccacattttaaaaatctcaatttttgttcaccaattgttttttcttttcattttttaaaatttgaactaaataagtttccatcccatgcacggttaaataaaattattattactttgggatgatatttacaatgtataaaaatatattataataatgataaaatttaaaagtttattgatatggtcaccatgtaatttgaaatcttatcaatcataccatgatttgttttttggtggaaatcaatcataacatgatgagattatagttttactgataatagctattatttattaaaagtaaaaataagtattttctactgtatgtgaatggtatgattcttttattattatttttatacagtccatacaacatcttatttatatcatggatgaagttgacaatgtattatacatattgcaaaattaacataatgtttcaaacatttgaaaattgtatattcgtttaattcctacctacagtacattagcgacaacataagttaataattcaccatgtctgttacttaggtttcatttaattaataaaattattatttttggaaaattataatgtgaaaatgatattaatattatttaaaatttataattatttatagacaactcatattattcgattttctcttaatatattatatttcaaaaatataatgtaaatatgacacccctctatttcaaaatattagatgttttacactttaaggtatgggccggccgggagtagcgtcatctaattttgcatcaactatggttatattctttgaacctcttaatctcaccacaaatagatttattctcttccatacaaacacggatcatccgataaagattttcaataaaatatgtgttacatctcgacattgtctctctcctcaattgtaggagtcccacaaagaagtttgattcaaggttgcttgcctaacgtaacatacaacaaagagtaaagtcatgaaatgaagagtgagatctgaagcgttatcatctaaattttaaggaaaaaataaaagccatcaataaaacacatagagcaaaatgcttggatgacattaaaaggtatagagacgtcacaagatgttgaaatgcttaaaatttattcttattaataataaactcttttacaagtattatctcggttcttacttgatctaatctacctaaaaaatcaaacccgactaagaataactaagccttaattctctcctctgtttcttatcactaacccgtgaagaccaagagaactacacactcaccttcaagctcttacaatgctttgaagtaatgtatcaaatattctagagtgctcaaggcggctccctctttatcctagaatacttatacctattctccagaaccctaaacctaggatctccgagattctcttgatatggaatcttccttgtttccaagcctatttcttttcttattcttcgagatgatatcttttatatcttctcgatgaatcttgtctttgataccacgccaagccagcttccattcttggctctccacatcatccgccacaacttgccacgtctgctcttgcattcatgtcagcaactcaagcgtctgatgcaactcgatgcagcttcctgaaatccatcaacgttctgatcgccatcagctgattgatcaaactctacatcttcaatctccccctttttgactgagtttgatactcaagcattcctccattgatataacctaaaatgcaatcaggaaacacaacacacagccagtagacagaatctagagccataaactagcataatcaacatattgcaattagttttaaaaaccctatttttaaacatcttattacataccgtgatgatacaatcacccgagcaaagcattgttctggtctaaataaccctagacccaaacgataagaacaaacaaaaccaattaaaaacaaatactccccctcaaatcatgtgcccccttagtcatagatcaaagttcccatactcatccgcagttctcgcatcatctccccctgcttgagtgcacaacttagtcaaaattttcaataagaattattataacagaagagcagaggacagaggcacatcacttacctgcatctaaggcagcctgcagaatggtgacagcctgttgcacagctgcccgtagacccaaaggcgtggctggtgctgttgaagatgctaccttcttgccagctgactaaccttgtgaaacactggccgatgtgcgcttgagtatctggatgtcaggatgttgagtctgaatcaagcaataaatgaggctaggaaacgacagaaagaagttggagacagacttcagagcaagttgaaaaacatgatcatacaccacttctccaaaatcaatcgccattttgtgagctatgcgatagacaagccttcctctgtcactgctcacatacccttcctttgttgtgggagaccaatttcaacaagatatcttgaatagattcttccagttctctgaaaacttattcatgggaatgttctgcagattttggactcgaccatcggtcaagtaccgagccacctcatcataaaccaacccagcagtctgaatgcgttgagttctggccccgacaggtttctggtaaaatagagcattgatcttcgcgtgtgagaattcacactcgaaaccccttactaacaccttgactgagtccccttccactcgaacggaaggtaagttggcccagaattcatagaccacctcgtcctaaaatccttgaattcccgttactgtgttgagaagacccgcctcagagatcacatccgtgatccatttaccagccagaggatccaaattcagttccttgatcatttgtcgacgagagaaatacaagtacctttgttcagcgagaggagaactgaatttgaactcctgaaatagattgctccttctaggacctgaaacaacaactccctttcctttctgttgtttctgtgacaggaactcctcacttggagtgtctcgtttgcgcttcgccagacgcgatgtcacggatgatacccctagaacttcagtagacattggcacagagttctgtcggtttctgactggaacgatggaagacgaatcgtcctcatcatcatcactaatatccacaagttctacaggaagctggacatgtggagcagtctggtgatgaagcacgtcgcaaatgtggcccgccgaaatctgcatgcagaaccaactgattgtgaggagtgctcacaagatcatccatcagatttgggctgtagctttctgatgctatggatgaagattcatatcccgaagactcgattctagattgcacaagacccttgaagaacgatttcatttgcacagaatgattttccttagagatcagagtgagttctctagagcacgcaagagacttttcactttcctgagcggttcagatatgatcctcaaaaccctagctttttccctccaatcaattcccgcatgatggacttgcacctcataagcctaaacggcccagatgaacttaggctcagcatacatgacaatctgaaacactcaacaattcattagtgctcacttgcaaatacacatccatgtacactcaattaatcaataaccacaatattttcagtgataatttagcaagcacaactttcatcatgcacttgaacagtgacccaaatagtcaattgatacacgcgagtacctacatgtttgagcgcaccaatatacctttcacttgtgacccggttcaatccattgttcccatcaattgttcagaacttagcaagaaactgtcacaaccattcagatcgttgatagatcagctcaatgttcagcggctagtctttcacactgtcatgccttcagttctaaacaatcaggacaacgtgtaacaggcagctggaatttcctttgaagatagctttaccaaacaagagcttgatgatatgtgtttttcgaactgctccctcttttgttaaatcagcaatatcacttaacttatcaattgctaatattcaaacttagtgatcttgatacacatttttttttttgtgtatcaaatccattcggttggttgatcttctcacctctttgacctcctgttagacagcaatgttttacgtctgatttgaaccggcatgacaggcagctattttccacataattttacatagtgctgatcctctattcatctttagatttccgtgacctgttctcactttatatccctgttttagatcagcacaactcacaaccaattcatagttcacatacaccaatggaaggtcgcagactaataaatctgttgaaatccaatggtttggtaaatagatcagctagttgatgctcattacccacatgaccaatcactatttgttttgcctcaacaagttcacgaataaaatgatgcctaatatcaatatgtttcgtgcgagagtgttgaacatgattttttgctatgcttatcttcaacagtagataatgaaacactcttctgtttcttgttgtgccatgagaccatgttgtttcccataaagaagcatcctccactggtactccatctatcttccagcgatccggctcagtcagcatcaaacttctggtagtatcgttggtgtagtacaagcccaggttcacagtgctgttcacatacttgattattctctttattgccaacatatgtgaggccttgggttttgccttatatcttgcacatactcccacagctaaacagatgtctggcctgcttgtagtcagatagagtaaactctcgatcatccctctgtatacccgctcatcaacatcctctccttcttcgtctttggacagcttatcagtcacatccattggtgttctagctgttttgcttccttttaaaccatatctctcaaccagattcttggcatacgtgctttgagatatgaagaaaccatgctctgtttgtttgatttgcagacccaaaaagtaggttagctcaccacacagactcatctcaaactccttggtcatactttaaacaaacctttcgacatactcttgacatgttgaaccaaacactatgtcatcaacatatatctgaacaatcaacagaccattgtcatccttcaaaacaaacagagtcttgtctacactcccacgaacatatccttgattaaccaagaaggtagtgagacgttcgtaccatgctctaggtgcctgttttaatccgtaaagggcctttttaagctagtaaacatggtttggatgcttagagttttcaaaacccttaggttgttccacatatacttcttcctgaagtacaccatttagaaaggcatgtttcacatccatctaatgtaatttgaagtttaatgcacataccatcccaaacagaaacctgattgactccagtcttgccactggtgcaaacgtctcttcaaagtcaacgccttctacttgagagtacccttgagctaccaatctagccttgtttctgaccacgagaccatcctcattgatcttgtttttgaatatccatttcgtaccaacaacatttgaatcagccggttgaggtgttaagtcccacacttcgctgcgtttgaattgtcctagctcttcctgcattgctgctatacagtactcttcgatcaatgcttccttatgatccttcggttcgacactagaaacaaaacatgcaaactgaactatttccgcgttagttggtgaggtagtttgtcgcttgcccgcgagttgtctgtagtctactttcacgtttctagtaattcttcccccctgaatctctcctataacatcagttttggagtgattcctatgcactgcagccgattcatcattctaagagatattctgtcatttatcaagtatctgttctggatgactactttctttacgagacttttgaatggcagaatcagactcatgattaacggattcactgttgtttgttggttgaagaactggtagaactggaacataggtatcatcaaagcttacattgattactacttgaatcagtcgcgtgcgcttgttgaaaactctgtacgctttgcttctttctgaataccccaaaaagattccttcgtcactctttgcatcaaacttcccaagttgatctttatcattcagtatatagcaagtgcatccgaagacatgaaagtatgtcactgttggagtcttcccttcccataattcatacggagttttggttgtccctcgtctgacatacacccggttgatgatgtaacaagcagtattaactgcttcatcccacaaatgccgtggtacatcattttcgtgtagcattgcacgagccatctcctgtagtgttctattcttcctttccactaccccattgttgttgaggtgttcttggtgcagaatattgatgaacaattccctgatcattgcaaaacgtgtcgaagaactcattctgaaattcaccaccatgatcacttcaaattgtttcaatacctgcccgtccgttctttaattggagagctagaactcggaaactctcaaatgcatttgatttttcttgcaagaaacgaacccacgtgtagcgtgtgaagtcatcaaccataacaaagatatacgtcttgcctgctcggctctgaacattgattggccccattaaatccatatgaatcagctctagggcatgggtagttccaatatcctgaaccactttgtgattaactttgacttgtttccctctattgcatggtccacacacaaacgaactatcagaattcagctttggcattcctctgacaatctcatgatttgctagtttgatcaatgtcttgaagttcaaatgtcctagtttctgatgccagaccttgaaatcattttccaaagatgggcgcaaacaagtggaattagatgtccacatgtagcaattgtttgcagatcgttgtccctccagcttgactgacccctgcttatccaatgccctgcatccaaccctagtaaaggtaacatcaagcccttcatcacacagttggcttatacttatgagatttgctttgagtccatccaccaagaatacattcttcaactttggttgcatttcccccttagtgactcattttcctttgattttccctttagctccatcactaaaagtcacttttcctgctgatacatcctcatattttagcaaatttttctgagctcccgtcatatgtcttgaactaccactgtcaaaataccaaggcttgcattcggacttgttaatctcagaggtgtacgcaacgttgcatttttcagtcctttgtgtgacattatctgcaacaacactttcaacacattccgcctttgtgtgtccatatccttcacaaccgtaacacttcatttctttgtttctgagagtaggacaaacagatgttgagtgaccaaatccctcgtatccagcacattgcctaatcagatttctgctcagaccatacaagttgattttgtaccttgacgcttccttccagtagccacattgtttatcaacaagtttctgggtctgttgtaacgtaccgtggtgttgtgatttctccatcaccttgtcgcaagatctcacctgataaactgttagtaggtgtctgctctgataaaggtatagagacgtcacaagatttttttttttttttttttttggtagaagaggggagactagtctcccatattattaaaactaaaacaaactacaaatccgagcgtactcgacgaaggcgcgcagacccaataacgtcatcactaaaaagcggctcaacaacatcaggaacagaaacaaaaacatgaatcccaatgggcaacaaaaacgcatagttcgctaacccgtcagcaagacggttagcttccctatacacgtgagaaatacggactatccagtcctttaataaaaagccatggcacaatcgtaccaggaaagacaaagggtgtcgttcgctaacccctgtcttaagaaaaccaaccaccaaagctgagtctacctccaactccactcttgtcactttcttctcccaagcaaaaaaaggccataatagacaccccataactccgccaccggagccgtacgccgtccaatgttaagcgagaagcccccaagccactctccctctctatcccgtaacactcctcccgccgtagacaacgtcgggttacctcttgaagccccatccgtattaagcttcagccacccctccgaaggcacactccaaccaaccaatatatcaatgctgccgactgaccccgacgttccgttcatcttattagtagcaagagtgacctccttagcggcctccttgataagacgcgttctatctcgacacttaccccgcttgtcaaattcattatcacaacgccacttccaagcccaccaaactgccatcgtgaaaaccgtaaatagaattatatatttatgtttaaagtagatagaaatattttaggaaatcagttaaggtaaataacaaatatggttagtttagagatattatctatattaaatttggtaattaaatcattaatttcgtttttaattattatttttaggtaacttttccaaaaattaatgttatccaagattagaacagaattaaacatgttatcgaggatccgaacagagttaaaccgggttatacccacccatttgaattaattgttgaattatggctcaaatctcaaaaattatcttcaaaaaagtgatacaaaatgtatatatagatatttatgacaaataattttgtatctatactattaattgggaagcattgtgtgaactacaacattgtaagggtagtttaaaactaagtaaatgattttttttcatgggtaatttagtaaataaacaactacttcaactaaataaatatcttgaattttgctttaaaaaaaacgaattaaatcaataaattaatatctacacaatattttcggaaatcatttaaaaacgtttccataacatatcagactattttaattttaattatatatatgtaaacttatttattttggtaatatgttattagataaatcggaaacttcaatctaatttaataacaaattctcatttagtttagatttaatacaattttcttaacaaaactatgttaattgtttatgattagtgcacataaaatttaaactatgatttagcatattcaaaagagaatttttgaattttagatttgtaattatctagaaaatggtttcagtatatattcaacattttaattagaatttaaatgatataaacgtttaaaatattttttttgtaaacacgtaatttttattattttaaaaatatatcactaagctaaatttgaattatataaaaaaaaaaatttttaaatgtattaaaatagttacaagcttttaaaatattcatacttctagattcgattatttctttttttttaaacagtaaaacaaagtttaaataccaatgtttaaaatttttaatgcaaatagtcaaaatgagaacaatcagtaatatgatttttttgacaaatcattaattgtattcgaacaataatgactaccatatttgcgataatgcataaggataagtttaattgaaaaacataccaaaattgttgagatctaattttagcttttaaaaaaatattttcgtcatcctaaatttaaaatatgtaattcagattagtttttttcagtaaagctaagattgaatccaaattaaaatctaattttgtgtacaatctatctcttaaaaatgttatgcatacattcatattgcctcacaatcaatctagaatattgattctttaaaaaaaatagatagagattcatatgtaaattactttatgttctaatgatatttatctcctaattttactatccatttacgcgtattcttatggatttttctttcagggtaaacactagattacaaaaaactagccgggtgttggtcaatattataccacagataaaatcatggaattaacaatcaaaatatagttatacaatctgaaacaataaacaaaacaaatataacttaatttattttttatttttaactaaaatcaacaaatttatcagtttataaaaaataaaataaaaattagcccgtggtaccctacgggtaaatcactacgatttcatgaggttacaatatcaatttatagaaattttgacttttaaaatatattttatataattattgaaaggtatacactaataatcggttttatataattcaatattataaatttataaatcataaattatttttaaatatattgattttttaatatattacaataagaatatttaaaaataacaaaaataatatttaattttacggaatgaagtttgtggatgttggatttcgtatccggcccaatacgcggtctgagcccagcagagggcccatcgagagatgtaagcctgtttaagaagcccatcggttcaaaagtcagatttagctttaattcgagtaacggaaggatctcgaattaaagacgctcattaattgctcgagctagagagttcgtaacgtccgaagtaaacgaagcgagattcccggcgtaaaatcagcgtagtgattaattcatttgattcgaaatatttgtataaatgtagtccaattgcaattgtagaaggacgaatgatttgccactgaaactatacaaaaataaacaaacacttttctgattgatccttgttcgtttaacaagtcttaagatcctcgaaacacgaccacgaaattctgattgtggattccgacatccacaaagttaccaggtggaacgagtttgggttgatactcatacgggacgataatctacgagtgtaatcttagaattaacaattttaacacaattatacaatcttaaacactaaacaaaagaaacaatatttacaaaacaactataacttaaaattcgaatttttagttacaaaaaaatcgaacaacggtgtaccgcggagtaaagtttacattatatcatctaattgatcaaatttcaaacaaaaacaattaatttgtatatacatcaaactaacaaaaatacacagattttccaaatatctctatattattccacaaatcgaaacaaatctaacattcgatttactatgcaaaacacaaatgaaatataaataatataaattaataaaaaaatttagttattgtatcataaataacactatacatttttctatgcacattataatttatacactacaatatctttcactaaaaatgtattcgaatatatttcttaaaatatgaaaccccgcacgtatgtgcgggtcagaatctagtagttttttaatatcggtgaattggattttatttagtgtctaattcattccaaaggtagagtataatgtgaaggtatacacttcaccactaagactgatttgaaagtgtagttgagtgaaagttgtttattttaaccaaaatagaagaagtgtttatagaaggtatttccattgtggtaattatgacagaaaagtgttccttgtaaactaaaataataatttgtaattttataagaataataatatggttgacacatagttttttgtaaacaatatggttgacacatagtttaaaaattgtaaacctacgcgtgggtttttgtttttaaaaattgttgaaaaatatgattagagttttttttgcttttatctcataaacatttatgttattacgtaattaataaagtcatatctattttatttatttataatttttataattagatttatctatgactcaaaatatcaattttatgttttccatatataagtctgattatttatatacctacgatcctaatatttcactatcatgaactcatgaaaatcagattaatacatggaaaacaattgatacaatgaactcataaatatgatatattgatacaatgatatgtagttatgttacttatgtggtttgaaacttgcctaatttaatttcaaacaaacaattatttgtttcatatactctctcattatctattacgccaaccacatcatgatatgctagtaatttaagtaaacattttagatctctctttgcatatagtcgtagaggagagagtcttatgtttaaatttttttggtatatctaacgtctcaaaggaccattgtgtaagaaaacttatatgtcaatattaccaacttattataacccacaaaaatggaaagagaaaaggttaaatgatgagtcatattcataaaacgtaataataaacaaaatattcaagataaaattactaaattattatgaagttagataggaaacatctaaactacaacacatataacaatacaagatacaccctggtttacgtcggtttattatgacttttacgtcacatataatgtaatacacacttcatcgtatagctctcaatagttttcaaattgatgcttttctagtttacacttcatcttgcctgaaagtagatgcaagttaaggaattgtacaagtttcagcgtcatagattaccaaaataaagtttagattgttactttgttacttgatatactagatgatgcttgacgcaacatgttaatagtagtagcaaggtttatgtttccaccattttcattctcctataacaattaataaacatattaatcatatacactctacgacaacaattctcattcttagaacattcatttacttacatggaattgaatttctctctaagcttcaagaagaacttcaagagcactagcaaggtttatgtttccaccattctcattctcctatagaagtaatgtattttaaaagtgtagtactcttaaccaccaagctttgtgttataagaatacattcacttacatggaatcagatgtctctggatttaataagaacttgaagatcactagcaacaatatcaaatttgtcttcaagtattttcattttggacttcatctcgaccatctctagattagttgatgtaacatgcaaaaaaactaacacaataaattaataatacaaaattagaaaccaatttaacaacatagcatcaaagaaacaaagaacgaacgcacaaattgttgcttccttgcaaatcatacttccatttactctcatacgtgatgaaataaacaattctgctcgacttggttcaataccagtctcttcttcctgaaacagatataaagagttactttttaaccaacactgaaacatgggaatgagaacaaccataaagctacttatgtaagcttactatatcatgagcttatctcgccaaactctttttccaagggcatgtggtatctttagtttgcttcgactcttaatattacgctctctcattttctatagttagataatataacaacaataatactttcattttctatagttagataatacacagagatagacagggacactaaccttagcttaatcacttatttgatcataaacaaaatccattgatcttcgggaaccaaggctggtggagccacaagtgattcttcgagggtttttttttctgtgactcctccaaagacgctgctttaaatctttacatttgttccctaaagtagatatcacatattttttcctcctaattaggtctcaaaccagaattttctctatattcaaacaaaaaactattggtttaaagaaaagtacaataaaaaccatccttgtttatatgacagaatgtaatatacaatacttgaatcatttgccatgccatctctttcatatagcgaggaacttttctccaatccgtgtaatttataggcaagacattaagatcatagctgaaggatcctaaccatgaactcaacaaaccacctaaatctttgataggttgtcctttcctattgaaatcaactatgacacgacgattttgaatgctccacacttgctctcttgagacattttcttctgtaatattcccatctaaatctaaaaaccagaatcatgttaactataagaacatctcatatatcaagtagtgtcttacaaatatatcattatacaaacctctaacatgaactttcaacttcccagttgctaattctgtcctaaaacgtatgttcctcgtcttttggtccattttgccgtcaaactcctaaagccttcttgactccaaaaatacttgaatatcatttctttggccttggagtcacaccaaacacttcctaaaccataagaaaacaatagcaaatatgagcgaaaatagcatgttatcaaaacccctaacttaaattttgtcttagccatatctccttctttgaattctaatctgatcctaatgcgtcgaactatgattccatgcctacacaagttgagtaatagagtgtagggaaatttaccggttagtcctatgacctaggctaattcgttcattcgtctttcatagttatgaactagaacgaataaatagaaacttaagagatccttaccttagtttgtcgagaactatgataccgtgagaaccctaagaacagcccaaagtcttaatctcatacttcacaaccgtcatttactttgctttcattcactttcattgtgttagttattaggaaacccaaaaccaaaaccctcaagttcagtgttgtcttagccatatctccttctttgaattcaatactctgtagctaatcctaaaatactactactgattattgtgcacttgcaataaagtgtgattttttaggtaaaaatctaaagtgaaataaagcacacatcaaggaccatcttaagtctttgacaaaggatctttgaaataatcttatgtttgggtcgggttccctcacgaatgagaccgagacaaataacgaagatcaatggtcacctcggggttaaaaagatgattgaacccgagcccaatcacaaagcacctcgggagtaagtccgtaaaacggctcgggagttaatcttagaaacacaaaccaagccgattgtgagaacgcttcgaggaccgcctatatcgcctcgggagatagtcacttgagcacgagggatagtcatcaccgtgccccaagccaaagtgtaccggttaccctgaagccacctcatgaacaatcactgaactgcgaagaagtactccgtggggaaacctcaagaatacgcgagacaaagccttttaaaatctaatcacgctcaaaggatcacttccagaaaaacgggatcatttccgagattctcataaatgataaggaaggatctttgaggataatctgaaatcaggaaaaattctcgaagtccccgaagaataagaaatatttcctaaagcgaagatattctggaaccggataaatggatatatatactaacaaataaaactacaccattaattgaaaatatatgcaataaattaaaaattagaaaactacaaaaaaacaaatatatacaaatattaaatacacttaccatacatatatattttgaaaatttaaatatttaattttcgatatatatgttttttatatttgagaaattatttataattttcagtttttctgtattccaaatatagaaaatacaatagaaaagacttatgcgaattattttaaattttcagtttttcagtttttatttattccaaaaatacaattgcaaagacttatgtgaattctaaagagatctataatttttcaaatagaagtctttatttatataaaattaaatgtttgaaaaatttaaaaatatataagggttagtttatttaatatttttattttttaattttgttattttaaatttcttgcatatattttcaattaatagtatattattatttgttagtatatgtatgcaatgtttgctattattgtaaattactaccgtaaatcagcggtagattgttccttatgagtccaataggttatatgtttaattccatgtggacgccaatcttgcatcattattttctaatgaaataacgtcgttttggagctttaaaaatgacgtcatttcgatttaacagaagattaactctgttaatctgaatttaacgacgtgcccaaaatggccaagtcaacgatatttaacaatttttattaagtaaaaaacaaacgaaactttgtgacttaaataatatttcgaaagttcttgcattttcgtcccaaatttgaaagttcacgatttgttctgacattttcccttttcaaataggatcaatttatcttaattaagtactcctgtattttgagctaagacgtaaaatcaattcttaaagtgaaaattttgtattgttaatcttagagttttctgcaaaataaccattcaagtaaatctcgtttgcaagtttaccctccaagtccgaaatatgcaagtcaatcccacaacctcaaaagtcacccgcaatacagccctctcgtgtaccgatgacgtggacctcaattactcttttgggttttgtgcaaaaaaaccctcaatttaattttcttttgcaagacaaacctccatgtcaaataaatacaggtcaaaccacaatctgaaaaatctcttgcaacatagccatttcgtgtatcgatgacgtgacagtcgataactcattactttaatgcatataatttataagtctatcgaatatattactttaatgcatataatttaatagagttattgatttaagttttaaataaaataaaattgaactgatagccaaacaattaaccgaaatatccagaaacttagtaaatatccaaaattagtacctataactataattctaaacttaaaatattaattatttttagaaccaaaacaatcaaatactttaaataatcaaaatatccaaatattgttagttatatttgtgaaaattaaatactcttttataaaatagaaccaaaattttaattttcttttctaatattttcctctttgtattttttttgttaagtttggttaaatttggttaaatttggttaattttagttaattttgaaagaaagaaaaacgaatctgaaaaaaatttggttagttacggttatcgattcaaaaatgagttatcgactgtcacgttatcaatacacggaagggctatgttgcaagatattttttagattgtggtttgacctgtatttattagatatgaaggtttgtcttgcaaaaaaaaaaaaaattgagagtttttttcataaaactcttatgtttttaaaaagagttattgagtgtcacatcatcgttatacgggagagttgtattgcgggtgacttttgagattgtgggattgacttgcataattcggacttttaagtttatcatccaacaattgtctctcttttagaagaatttacttttaacagtcttgaactgatggttagagcaaggaattcccacaactttgactctcccactttatgtgacctgcttgtctgaaatgttctcaccaatggatttcaatttgagctacaatacaactaatattgaagaagcataaagaaaactaggctctcataaatttcccaagtatgaacatttgaatgttggcaaattgcacttgtgtcagatgctcattaagaaatctacatcatttgcaaaaaaaaacacaggagaatgtacaactttgtctcacagaagaaacgtaaataaggtatggaagatagacttatgtcgaatcaatttcctcgaagtcgtcgaactcaagaagccttgatgattgccctgctgctttcccttcaccaccaaaaacacacaaagatttcacatttccataaaaaggacaaacaataagccgagccagcgcgaattagatcataccttcgcagcatccttaagaggtccccaacactcgatccgattgtacttaggtgtgcttgaatggaaataaacccatacataagcatccattagctcaggattctctctaaacataactgaatctccatgcaccacagctttaagtacctatctcaaacacaacaccaaagagttattagatagtcattttcacattcattaagaaccaaatagacaaaagatgaagaagactaaccaaaggcaattccttggagaaaatatgatacctaagctcagcagcaacatcctgcaataaactcataccactcacacaacaatgaatatgtaaacgcagctcatcattcaccttcttccactcagcaaccacatcatctttcttgtaccagccttctagttgatccagattgataacgtttgagattgttaacgttaagttagcagtgaagtcacaatgcgaaagaatataagtccgcggcgtaataattcctccgttactcttgttctccaataactctcctaagaactcaactttaagctttgaagaatcaaagtttgcttgtggaaccaaaagcctcaccgcctaataacaccatcaacattcacattatcaactaactccactacttaaacatgtaatcaaattttgatcttttttgcattttcaagacctcaaattcaaaattaaagctagacccaattcaattatggttataaacaacagaaatctacaacctttactaaaaaaatatcaatgaggattaaaacgaattaaccctaaaatttggcttacctcggagactagagtattgtaaagttcgatctttttgcattttcaagacctcaaattcaaaattaaagccagacccaattcaattatgatcataaactacacaaatctactaaaaatcaagatgaattagaaaatttgccctgaaacttggcttacctcggagactagagtattgtaggagacaccaccgtcactaatagcggagcttcgaggaacactaattcttctattcaagagattgttgcagaaacggtggtggtggtggtgacggtgactgaagatttctctattgggatgagacaaaacaggatggtggtaataaggaacgatgtaacaggccatggaggaacataacaacaaggttaatgcatgaacaataacaatgattcttcgtcattgttcatcttccaccattttttctttttttgtcttgagaaacagagaagagatgtggaagaatgtgttttagacgtagccacaaattcagtcttggtgacgagcttctttctccacacaaattcgattttgcaaattgattttggatttcgtgatattatttatttatatcgaaatattgtgattggtggatggagttgagagttgttccacgtcagcaagtccttttgtttttttcatatctatagataatgagctatggtggcttcaatattagagtccaagttaatataaaatgaattgtataattttattatacaagtttgcaaaggtaccaaataccaaactatatgatacatatcattggtgtataaccaagtttatttatatttacaaaaaaagttcattagggggatcatatatatgaaagttggctaatactctccatatgagtgacacatcatcacacaagaaaatgacaagtgtaattctacattaattaaattaaaaaactagcaaaactaattgagaaaaaaacaaaagtcttttgttgtgttaaattctccattaatctcactcttaaatgaattttctaaaaccattcaataaataaaaattataataatgtaccaagcacaactttcattctattctatttatttaattttaaaaaatttcatctaggtggtcgctaaataatcgcagaggagtctctacgatactcgttattcatgtgattcaatcgtaactcagtcgttatattttacgagtacaatatgactaatgttatgacagcgggtattagtcgtatcgtagtcgtcatttagcgattaaagttacgactattttgtttagcgactctggattaacgactaaggctattactcgtaatatagtcgtaacttctactttaacgactatattgctactaatgttgtagtttgaaaacccgtgttttcttgtagtagagcgggtgattatctagtatttcattaaaaatgaaaacaacttaggttacaatagaaaaattatagacctatacaatggttacatggcaaaaggtaaaaagcatttaagcataatactataataatttagagaatatatttatttggaattggagttttggactttctataataataaaaaataatataaacaagtattgtatatttttttagaaaaacttatttttttgttcttttctcaaggcttatagttgatcttacatacagtaattgctacttgattttattattttttctttaaaattcaatttaaatagatttatgtttacctaaaatattattataagaaatttggattctaatagtataatatcttgcatattatattattatgatagttgacatatatcatatatgtgaaaacttagaactgatattaaaggaaatctaaagtcaatattagtaatacagatttatatatatatatatatataataacaccaaaacaaagttaaaacaaccaaagaacgaaacatctaccaaaaagtcaaaaagtaaatgaaaaaactctcggtctttctatttgtttttagcctttgcatgcttcgtcatgtgtatggcgccgggatcaggatctcgaacgaactcaaattcaaaaaaaatctttggatgagatgttattccaaagatgatgtattaggtccaaatataataccaaaccgacaatattatgaaaatattttccatattaacttttggcattcaacacgttttatgtgtactttgagacaaggtcctaactatatacactatcagaactttacagtattcaagctttttagtttgagggatcaaggaggcctatgggattggagagcaagagaagatgggatctatttaaagaaagaagctggcgaggcattattaaacccagtttatatgcataaagtgcatgattggatatattaaaaatattaacaagctatataaaaatgaaaaagaagagttttcttatgatttaaaaacaacagaaaattatatatgtatgagaaaacaatcttctcaagttatatattgaaagttagaaatatatatatatattgataaaatagtatattgatctcaagtattatcatttatcaaagtaaaaaataaaaattatcaattggtagtgagacgtgggttaatgcttctatctatggaattagggacgtcaaaatggatcaagtttcatgggtcaacccaattcaactcaacccatgaaccctaatgagatgaaatttttcactcaaatgaattgatagttcaaatgagttattgggtcaaatggttagatggatcaaatgagttgggtttcaatgggttaatggtttacccatttaacccaccaattttggctaaattgaattaatccaacttaaatatctaaatcgatatcaatttgagtttaaccaaaacctctaaatcaattgaatataatcaatctttttacaaatggcttcaccaacccatcaatttattcattatcaacacaatatcatcatcatcattaccatctcataatatcatattaccatcaccatcatcaccataccataatcatcatactatcttcatcacacaaaaaatgacatgtgtcattatacattaattaaattaaaaaactagcaaaactaattgagaaaaaatcaaaagtcttttgttgtattaaattctccattaatctcactcttaaatgaattttctaaaaacattcaataaagaaaaaaatcataataatgtaccaagcactactttcattatattctacttattttatttaaattttttttatcaatagtcataatccataatggctaaaaatttacttgtgttgtagtttacatgtttgctacctaacctcatattaatttagtaattttagttggatattttattattattatgttttgtgaatttgatttatcatatgaccttctttctgtacaattttgtgcgttctgataactttataacattgatatacaattttttcacgtaatagtcatccaagacattagacataccaaaaaaacaataacatgagactctatatgactatatggtagggatgagaattaaagtgttgacttaaattactagcatatcatgatgtgattgtgtactagatgatgagagaatatatggaataaagaattgtttgttacaaataagttaggcaaatttcaaaacacataagtaatataactacatacattgtatcaatatatcatatattgttgtagtatgtaatcatgatagtgaaatattagaataataaatatataaatattcatattgtagtagaatagatatttcgagttatacatgaatctaatcataaaaaataataattatattaaatagataaatttatcaaaatgaacatcaaaatcaacaaaaacccatattcatatttttttttgacaattttaaaaacaaaagctcatgcgtagcatatattggggatgtatcaagccgttttgatgttaaagtcctggccaattttatgctctttcgtatctcatccaaaaaaaacttttgttgaaatttaaagtttattactataattatgccttatgccataattatgtctttaattatgtaacaagccgtttgatgttaaagtcctgaccttgtacgatctccggctatatatcttttgtctttcaattgatataagactcaaaatgaggcttatataaatgtcatagtgatactgatcgaacaagcttgtttacgctctcttgttggatcggatcaagggatcatgaaagtggaacgatggtaccacatagatgatgaaaagatttccgatacattaaggatattttgtcaaagggaaacctgcacacgaaaataaagttcaaaagcttttatcggcaataacagcttgagagaatgacaaaagaaaacgagatcatttttcatgatatgaaaaagtgtaaaaatgcaaagctgcaaagagatcttagaaatatgtccatcaaccgtgatttttaaaggtcaagattcagaagaaaaaaagctacatggaaatgaaacaattatatataaacaattctaaagctataaagacaaaccaaaaatggaaagaaacaattctaaaaatggaaagagtctttggtttcgtacaaatattaaaaaatctaaataatttagatgttctcagcctcaaaactattaggcatccaagttaaacctaccttattttgacatagcgtgaaccatgcataaattgacgtggtgacttcgtggattgattcattatttttgctcttggcaagtttttgagatttttagaattctctggtccagcccttgatccttggcgttccttcttcaaatagtacaatacatattgagttcctctcgttcatctcgcaaaccagttcaaactatagtgccggctccggcctaaaacccaacaaacaaagactttaggcgccaaaatattatatattaatttgacggaatcaaaacaataaaaccactttgatatattttttaatatttatggacaaatatttcttttggctttaagcagccaatattgttgggccatttttcctcgatcattttcttctccttgtttctttgtgtttcattataaaagactataatttaggtacaaataatttaacaggtgtttcattgtaaaagaaacaattgacttatgatttgttctattgtgatcaagttggtcttaagataagaattttaagtaaaaagtctaggctttgtatttgattgttaaagacaataaggtatttaacaataaggtattaatggattgcaatatattagcattattgacttagaattggtgtatgtttcaataataattagtgtcaacaatgtggttatatcaatgctttgtatttcattgtaagaaaaaactataatttaatcattattacttgtagaaaactctaattctagaatttcttttggtgtagagttggtcttacaataataatttaacacacaaaaaaaaaaattggactctacatatactttgtgtgtcgttaaagactttaaattggaccacgagaagaaagcaaaagtgattaatggaggggcctttgctaaccaagaacaagcacatcaaaatccatggcgattcttcatcaaatgatgagcataatgtcaacattacaatcactaacgattcttcatcaacaccacacggcgttaatattgttgaacggtgtattccatgcacaagagaaatggagtggttttgtttcatcgagtttgttttgaatattgtccaaattgttgcagcttttgtagttgtgactcgggcaaaagatgaacatccaggaacatcatttcttgtatggatcattggttacacttgtggatgtgttgccattcttcttattcagtttattaaccgtatttcgtcaaggtatacattaacgtatttcttgttcttctttttaaaacattagaaactcaaatcaatgatatttttattggtttgcagaagctacgaggagatcatggacgttttgaagaatatatgtgaatatttcttcgttggttgggttgtgttgtttctttggatgtatcatagtagttcttcatctctatatgataatactcaatatttctggtgagtatcaaacgaaaatttaaattcatatcccaaaaaataaaattcactctctaataatattcacaattatctttttattttcaggttatgtatggcttttcttgctttcacttgcattcgatatgtaccggctcgtttaatatgttcagcaatatgctttattttcgttgtgataatatggttttgcgccgatgtgttaggcacaaccccgagtatgtttgctaatgctgtattccttatagttttcattggaattcttaaagtcattgaggaggttattggatcctattgttgttgaattcaaagtaattgaaactcttgtaatgtttttttcatgaataaagttgagtttttgactaaaatatagtggagacagttttttgttttttttgttaatttaggataaattcttgaaccaatggaagggctgaggactaatccctcgggagaaagtatcccacaagagaaatttttgttcatttaaaaaaaatatatatagtataatttgattatatttagctaaactttaccattagattgaataatatttaaatttgtaaacaacaaaatttaatttggtttccatactcttgatgaccttctcttcacattttgttgatataggaagctttcttagtttgattaatcaaaatacaacagaatacttcttcttcttcttttttgtcaacagaatacaaattcaataatatatcttaacaaaagaaagaactattaagctgtttggttaactctctagactaaaaatcacgaatacaagatatggaacaaaatattaatcgagtatacaccataaatattttgtatggacaacgcttcctacaacctgggcaaaatggtcgagacatatgattgtttggtagaacacgcagctcttttccgtcattggagaaacacaatgcaccaggcttcatgtataggtcctttccaatcagacatctaatgtgtagggtaacacaacagtaatcatcacacatataaaaccggtctttcggatttactttctcctcgcagacttcacaccaatatgtcatggtacttgtctcctttccataagaaagagtgagaatatgcttatcatgcttatacctcaccttttgaggtaaagtagcacatccaaaacacaaagcaaattcacattcaatgcaattgaatgtttcatttgttaattcaaaccttgaatctttgcaaacggaacatgatctttgctctcctggtttagatgtcaggaataaaggatgaatatgacttccatggactaatggctcagaaatcgtggcgcactgcacatgtagcttaaaagaacatccttctttacgacactcataggagaaaccagctatgcacggccaaggacaagctgaacacttatcctcgtacttcctaacatcatcatttcctcccattagagagagcaaatgtggatgtattgggttatatgttttgcgagaaagatttgcacattcttcattggagaatataatcacattgcatacatgagaagaagttaccgaaatagatgggcatgatgcatgcttgacatagcttgttctcgtcgtagattctgtctctgttctcatcaagcctcaaatgatgattctgatgactaaaatggtgtattactcctttgcttattgtcacaaacggctcaacttcttcttcttcaatctcttctggcactccctcaagatctatgccatcccacacatttttttgtgtggcacatcttgaatgtgctgcatacgaacaaccgtccttgatacaagaaaaacccccataatcattgtcaatttttctccgacaaacaccacaagaccaatctccttcgtcaaaagaagtggtgaaagagatacgatggcgatggcgagatatccttatgacacgtggtaagccggtacatctttgatggaccacaaaatcacaagggggacacatatagataggggagctggaatcggccacggcacatacattgcaggttaagaaagcttgtctttgaaacagagcaagtgtatctgcatgccacttgggacggtctataaataagactggtggcttctctgcacaagctatgttcatatcataatcgcaacccgtgcaataatagaatatctttttgagatcttcatcacaacaaaagcattttctggtttgaattatcgacgacttctgtgagacaagctgaagagaatgctttggatgtagaaggtgttttacctcaactggtgtcttttcacattctatatggtcctcgccgttgcaatctttgcaaataaagtgggaagcctcctctcctttcgctaagtagagtctatgccggttttcgggttgacatttccccttttctttgttcttccgctcgatttttcccgttacatgaaattttccttgtacaagttgtactttccattgaggggacaaggacataagctgatctagcccccattccgactccggctccgaatcggtataatcaatgataaaaattatttgagcaatgagtgtatacagctctgaatctcgatccaaatagtagagaagagaaaacgtgtgtgtaaagagtgccactagctgcattggtggctcccactctggttctagatctatagagctaatgagacggatcatttcagtcatgcttgatatgaactgccactctggttctgaatttgatatagagttggcaaaagacattatttgcttaacgactgctaccactgaaatgaactccgactctggctccggctctgaataatccaaatcaagagagcgtacgagagtgattactttacttgtaagcgatatgaatgatttgaattttggcaactcttctggcccaccccgcaactccaactcttcatttgtagtaaacgcatagagtgagtacatttcagaaaggagtgatatcaactcctcctcctcctcctcctccgaatccaaatctgaatctgaatctgaatccgaatccatagagctgtggacaaacatcaactctgaatccacctccggctctggttttgactttgtgtctgtggagataaagagggagtatatttgatggatgattgatatgatctctggcctcggctggagcttgtatgtttcataaaaggttgacatgaactctgagtctggctttggctcataatcggaatctaccgagttgaggtgagacagtttttcaataatgagtgatatgagcttcctcagtggctcgggttgggaactcaaatccatggagttgaagagagagattgtttgagtaacgagcgacatgagcttcgactccggcttcggctgcgacttcaaatccattgagctgaccagagagattgtttgtatcatgcatgatatgttctccgagtccgtattgttgcgagacactaattgagaaatgaatgatatgagctttgactctgactctgaatccatagttgcctggatttttgattatttgaataacgagtgataagaaagattttgagaatgaaatgtaaaagcttacttttcgtgctctatatggtttatgttaatgcaagctataattctaatacatatatagcaaacagaaaataccaagacaagtgttaataacagaaaatcatgttgttcgaaactaagtcaacgctcaaattaacgattagatatataagcattgatattcttcagtataacaaattatctacgaataaattttaatcgaaaacaaatcattgaatgatgaacgtgaacattagtcttgttttattatatgtatagttgaaatataatattttacaagtctttcacatgcaaagtcaatggtcgatttaaagataaacaaagaatattacaatttacaaatttatattcgagtttgtagacaaattaatttagctcaaaattttattgatgagtggttaggttggcctatgcaagttccacgtttttgtttcacgcacaatagcaaaggaaaatagctgaattcgtcaaacgaaaattttgcatgtcgaacatgagatatgagttatctggtatagaaattacctaaaaaagtttaaaagaaccacttaactgtattcacttctttgttttttaaggtattcagttcaatgtaataaagacaaaatcaaaagttcaaaccaacttcaagaaacattgaggatgatgttatacaacttgttcatgtttcacattttgaaaacgtgattccgctatatttgaccatcacttatgaaagggatttgcttcttctgcaaaacttggataaagttgatgaaaaatagtcatcaagtttcacttttttgcgttttggaaaagtgatttcgctaatatgttactagtgtattaaaattaaactagaaaaagcaaagcgtgattaaactagttttttcagcgttttataattattttacaaaaacttatcatgtttagtttattccgctaacaattattcagttattttggtattatgctaatttctgacataacatatatattacaacagttttgtgactaatacgctacgaatattaatttaaacaaaaacgatcgtgatatttaactaatcatttttgtgattgtggtaatatttaactaatatttaactaagctggcgtgatttttaacatgaccacaataaatttagtgctccacttttgttttctatatcacccaccgaagcttgtggtcttttatttagatttccaagtcaattacaattcatgaaccaataaactcttaatactatatattctcatttcaagataattaaaatcgaaatcatgagatcatcttaattaaagattatggattgtccaagcaaaatttcaacgaaggaattagagatctcaaaagccaatattggaaacagaagaagttcggttttattttttctatatatgcaatctagattaaaaattggtgatatataatcttattatataaaatatgattttcaaaattggtaattcgcttgatcgttacatgtgttaaatttatcctttagacgttgacatgtgttacaatgtttttcttttttcttaaagaaattagaaaatttagaaatataaacatatttacatgtattaatttatatgtctatatctaataataagatggagtgtacataattaaattgtatctatattgcaaaattgaattggaagatagataaggtaaaacaacaatgaaaatttatgagagctttgagataaaggctaataagcgatttggcacatgtgaggtcacggctagtcgaataacctttcacgagcgagtcaaaatagatgatgtagtggtcactgtcaaaagacaaggtgacgttgaagaaggttccataaccgaggttctcaccggagatgattgataacaaatagataaacggtggatttagagatagaaagttaaagaagcttcggtaactaccacttcatggagagggtatcataatgatgttcttcttcaacttttcaaattcttgaatactaacgttaatgttgttggtttgtacttgctaggttcaagcatatttcaacgaaggaattagagatctcgtgagattatgagcttctactccttagagctggcgtgagacattattgagcaaatgactagtggtttgagagatttttaatatgactattcactattgtatgactataataaacatagtgctcaacatatatattctcaaacatttttctactttttcccaatataatccgccgtagcttatggaacttgtcttttaattacttagatttgtaaatcaattaaaatccataagccaactaatttttattagtacatatcattgttttacgagatcattattttaagagaattaaattctaaatcatgggatatcatctcaaactttacaggttgtccgagcgcaatgtcaacgaaggacttagttatttcggtcaatttatattcgagttacttaggtcaattctgaaaacattatcaagtcaatttataatcgagttatttaggtcatattattttttgttaagtcggcctatacaacttttatatacaaaacaaaatcgttgactaaaactaaaacttcacgtcacgtttacgttgtgattaacgatcatgaaatccaagttaataacagtttgcggtagatatccaagttagtatacagtttgcggtatattaaattcatctaccaaagaaaaaaatcaaagtaacgtcaagaatcagagtgacaaaaaaactacttgagacatgttcgtttgatcatctgacatttcaattcaggtggtccatctcaatgttccatccaaatgctctaatttaaatgatgttgtttcaatttttggatatttatttgatggatcttctaaatgaatttttgtttgtttgattaatttttataaatttttatcttcatctagatgagtttaataacaaaatgaccaaaatagtaatactttgatttaatcatttttttaatcttaatcttacctatattaatttaattattactctaaaatatatttacgtctgaatatttcaaaattattaatttaacatatataaactgattttacaattttgttataaacattactttgttgtttttccagaaaaacatgatttgaccgaacaaatacgatgagatctttcttcaacaatgcatatataaaaaacatataatatttgtaatcctacaaaattcagtgatgggcataaacatattataaaaataccaagataatgaataaccataataataggaaatttgatatagtggacgttcaaaattttgaaaaaataattttatatataaagttggctaactctctctatccttctcccatgtcatcggagagaatgtcacttataacatcagtttgatttattttaattcagaatttgaatcatacattaattcgtgcttatataaaaatttgacatgtttcaaagtattaattaaataatttcaaattaattagttacaaattatatcaaactcataaataaattaccttatttaaatttagttgaataagttgtataaaattttgcgtaaacataaaatcaatagaatttaatttaatttttgtttttattaaagtataaaaaataaataataagatattaagaatttaggtcatgttttcatatactaaagtatatagggagatttgtaaaactacccttttttactactcttttgcaaccataattttttatgttgttcatttttaaaaaatatactttcttttaaacataatgaccaaattatcctcatttaatgataacacgtaattggaaactaaaatttcccctcctagttttttggcaccaaaatttatttttcccaccaaaaataaatttccgtaacaaattttttctcagccaaaaaatacttttaaaaattcttgtaaattttttaaaaactctttaaaaaacctagtaaggttttttaaaagctttgatagttgtaaaaaactcttgtaaattattttaaagcctcttaaaatctttataaagtctttaaatacataagtaaatactttaaaatccttttttaaatctttggaaatcatttgaaaatcttttacaatagttttacaagatttacaagagtttttaagagttttaaaacgttttataaggatttttaaacctttgtaaatcctttttaaatctttttaaaactcttaaaaggtctttacaatcatttttaactctttgaaaattttttgtaagtttttaaaaataattataactcttttgaaccattttaaaactcttgtaaaccttaccaaaaggttttaaaaaagtttataagaatttttaaaggattttaaaacccttgtaaatcttttaaaactcctttaaaatcctttaaaaccctttaaaaccatttaaaaatctttcaaaaatcctcgtaaaccctttaataatttttgaaccattttaaaactcttctgaatctcttacaaaaggttttaaaaagatttaaatgagttttaaaacccaattttaaaaagatttacaagagtttttaaagggttttaaaacccttataaatatttaaaaaaccattgtaaatcctttaaaactcttgtaaaccaattaaaaatcttttaaaaacttttgtaaactctttcataattttttaaccattttaaaactcttgtgaacctttacaaaatattttcaaaagatttacaagagtttttaaaggatatacttgtaaattcgtttaaaatcttttaaaaacccttgtaattctcttaaaaccctttaaaaatcccttgtaaatctcttaaaacaataaactctttaaaaatctcttgtagatcttttaaaaccctttaaaagtcccttggaaatcttttaaaaccccttttaaaccctttaaaatcccttgtaaaactcttttttttacgaaattgttttggctggaaaaactttttcgaaattttggcaaaaaaaatattttagaatattttaggcaaaaaaattaatatttcattttcataacctataacaatttccaaataagggtaaaatggtcattaaaaatttaaagagggtataaatgaaaatgacaaataggaaagggtataattgaatagggatagtgcggaaagggcattcttagcaattattcaagtatatataggactagtcacaatgaatattgttgaaagaaaaatttagatattaaaccaacactaaaatttttgatttattgaaagataggaaaataaaatatttttgtttttaagtaattgtaaataatttttaaataatgtacttaaaataaataaataagcaaaaaaattagaatgaataatttactcgagagttagagaaatacaacaatatgataattagaaagaaaaaaataccaaaaagattatttatgaaattagttcaatctatgtaaattattataactaacaaattatggatgaataaaccagcatgttgcacgggtgttggcctagtatagtttaatttggttatttagttaaactttactattagatcgaataatcatcagacatctcatgtgtagggtaacacaacagtaatcatcacacatataaaaccggtcttttggatttactttctcctcgcagacttcacaccaatatgtcatggtacttgtctcctttccataagaaagagtgagaatatgcttatcatgcttatacctcaccttttgaggtaaagtagcacatccaaaacacaaagcaaattcacattcaatgcaattgaatgtttcatttgtgaattcaagccttgaatctttgcaaacggaacatgatctttgctcttctggtttagatgttaggaataaagaatgattatgactttcatggagtagtggctcggaaatcgtggcgcactgcacatgaagcttaaaagaacatccttctttacaactctcatagaagaaaccagctatgcacggccaaggacaagctgaacacttatccttgtacttcctaacatcatcatttcctcccattagagagagcaaatgtggatgtatcgggttatatgctttgagagaaagatttgcacattcttcattggagaatataatcacattgcatacatgagaagaagttaccgaaatagatgggcatgatgcatgcttgacatatcttattttcgtcgtaaactctgccttcgttctcatcaagcctcaaatgatgattctgatgactaaaatggtgtattactcctttgcttattgtcacaaacggctcaacttcttcttcttcaatctcttctggcactccctcaagatatatgccatcccacacatttttttgtgtggcacatcttgaatgtgctgcatatgaacaaccgtccttgatacaagaataacccccataatcgttgtcgattgttttccgacaaacaccacaagaccaatctccttcgtcgaaagaagtggtgaaagagatacgatgttgatggcgagatatccttatgacacgtggtaagctgatacattttagatgaaccacaaaatcacaagggggacacatatagataggggagctggaatcggccacagcacatacattgcaggttaagaaagcttgtcttggaaacagagcaagtgtatctgcatgccacttgggatggtctataaataagactggtggcttctctgcacaagctatattcatagcataatcgcaaaccgtgcaataataaaatatcaatttgagatcttcatcacaacaaaagcattttctggtttgagttatcgacgacttctgcaaaacaagctggagagaatgctttggatgaagaaggtgttttacctcaaccggtgtcttttcacattctacatggtcctcgccgttgcaatctttgcaaagaaagtgggaagcatcttctccgctttctaggtagagtctatgtttgtttttgggttgacatcttcccttttctttgctcgtccgctcgattttccccgttacatgaaattttccttgtacaagttttactttagtttgaggggacaaggaaataagctgttccagcccccattcggcctccggctccgaatccgtacgatcgatgacagatattattttaccaatgaggattatgagctctgaatcccgatccattgagtagagaagagaaagcgtgtgttgaaaaagtgccgctagcttcatcggtggctcctcttccagatctatagagctaatgagacggaacatttcagttgtgcttgatatgaaatctggttccgagtttgatatagagtgggcaaaagagattatttgcttaatgcatgatactactgaaatgaactccgactctggctccggctccgtctccaaatctagagaactaatgagagacattagttgtttggtaagtgatatgaatgatttaaattttggcaactcctccggcccaccccgcaactccaactccgcatttgtcttaatcgcaaagattgagtatatttgagaaaggagtgatatgaactttgactcttgctctggatccatctccggcttcggttttggctctggatctggcaagataaagagggagtatatttgatcgatggttgatataagctttggcatcggctcaaggttgaatgtttcatagaacatgtacatgaactctggatccggcttcggctcataatcggaacctacagaattaaggtgagatactttttgaatactgagtgatacaagcttccttagcggctccggctgggaatccaaattcatggagttgaagagggagattgtttctgtaatgagtgacatgagcttcgactgcggcttcggctgcgtattcaaatccaatgagctgaccatagagattatttgaatcatgtttgatatggcatctgagtctgtattgctgggagacagtaactgagaaatgagtgataagagcctcaactccgaatctgaatccatagagttgccgggattgatacgaaagattttgagaaagaatgttatagttaactttttgtgcgctctaaagggttatgtttctaaaggctataattttcgtacatatatagtaaacagaaatcaaaataccaagtaaaaagtgtgaagaataggaacccatgctgtacgaatactaagttaacgatcaaattaatgattagatatatttaaacattagttttaaaaaattacaagtagcattcgatattctacactagaaacaaattatctacgcatatattttacttaaaaacaaatcattgagtgatgaacacgaccccgcaacctatattaatttagctattaataaggggtttgtttggcctatgcaaaagtcaatgatcgatttagagataaacaaagaatattataatttacaaatttatattagagttgtagactaattaatttagctcaaaattttgtaaatggtggttgggttggcctattcaaatttcacgcacaatacaccaacagcataggaaaatagctgaattcgtcaaacaaaacttttgcatgtcgatcatgagatcttagttatctggtatagaaattacccataaaaggtttaaaagaaccacttaactgtattcacttctttatttttttaaggtattcagttcatctaataaagacaaaatcaaaaatgtatatccatgagtagatttcttaaggagctgtgagatgtagagccattaactagagttttttttttttccttcttttattttccattaaggatgaaaaacatacaaagccctcaggcccaaccaagggtacgcagacccaacattacaaggccgaagcccaaaggaggggcacgcaggcccccaacaagagaaaagaaaagaagaaaagcagaaaagaggaagcccagaggcccaaaagaagaggaaaacttaccatgataacaccgcacgaagaaggaccttagtgcacctgaaaaacactgaaccaggaggctaacagagaaggaccgggggacttctgatgctgaagacgagagagagggtcgaggagcgcccgaacagtcaactggatgtccttaatgacctgagcagatgaacggaacgttgcggagtggatcctcgcgttgtgctccttccaagtgaagtaaatcacagcttgaaagaggatcttgagaatgaaggatatgtttttatctggagaaggcgacctcatccaaagaagagaatccttgaaagaaaacggcggagagagaccagaagcagaaatgaagaatctccaaacctggctgctaaagtggcaatcaaaaaacaggtggtctctagtctcatcacaagagttgcagagaacgcaggaggagggaatgttgaggccccatcttctcagcctatcccgagtgtaaagacgattccaagcggcacccaataaatgaaggcatgcttcgggatatggttcttgaaccaaaccgctttatgccaatcgacactgttaccaattgggtggagggcaagccaagtatctgcagaggagaaaagagacttaggagacctgtgattcggtttccatagaaacctatcatcctcttctctgctatatttgccacaggaggaagaatccccttaatcaaactgatgatagggttcctgctgcgactcgcagagatccaccagtcattccctctcagagcatctctaaccgtagagtctctaggcaaaccagtaatctgaggaccggtaggaacagtcaagtcaattaaagggccatgagaggtccaattatcaagccagaagttcgctgtgacacctgatccaacctcacagacaataaagggacgagctaaggtccgcaacttacataatcttcgcaaaatccagctcccagagaaagagggattgagataccaaaagttcttattcctgatgaggttgactcttacccatgacacccaaagcgagcttgcagccgtgaaaagcatccagataagctttagagccagcaccttattccaagccactaaatcccgcaagccaaggccgccacaaactttggaggaacaaacaatttcccaggataacttcgctcctctggccgaattcggggctcctttccaaagaaaggcattatacatttgctccagtttgcgcaaacactgattgggtaagaggaagacggaggtccaaaaattaatagaagagaagatgacagacttgaggagctgcaatcttcccgcaaaagataggtgtctggaggtccaagaagtgaatctgctattcactttatcgatgagaggttggtagtcctgcctcctcatcttctgagccatgagtgggactccaaggtaccgaaccgctctctatttagcttcctacatgccaactttgcagccttcataagagctcccagagtaaacatgtttgagcccacaacaatgtcactagaccaagcctctttgacgcagttcaagaaggtgggatgggacaatgtaactgctgacttcgacagagcctggacttccacagatgaggtagcgatcttgggaggagaactggtcgatctctttttggaacgggagcgtcttctccttatcctggaggaagatgagacatcctccttgtgaagcaaattgatagaagtcccgtcatcagaaggagcgattggaagaaggaccgaggactgggagacatccttagagcccgagggaagatctctcttgaagggatacttcttcattagaggtttagggcaacgcgagagaaggtggccataacatccacaattcagacacttaggaggaggtcttggatactcaaccgaaatcttagcagagttcccatgaatgtctttcaccaccacagaatctggcagcggaatatcaagcttaatcacaactttaaccttagtggtgccaatgttgatcgggtccaatttggacttctccgtgtgtaggggctctccgataccacttgcgataacactgattccgtcaagagaatagagttgaggaggcacattcttaaggatcgcccaagtaggggcagactgaagctctttgaattcgcgaagtccctctgaagaccaatggtaaaccgtacaagaacaatttcctgcctgccagaacccgacgtccataacccattggcgggtgcttacagaagggatgaaaatcatagcagcggtctgcgaaatcactctaaccgtgatacctccataacgaccccaaataggatttaaatcattgaagatcttggcaggagagggagaaagaccatagaattgggccaccaaatggcccttccacatctccaccgacttcagaagaacacagggaggagcaatgaccaccggagtaccatcttccataaaagtaggagagttcatttgttttaggttacgaagagaagctttaaactttgaagcccaagggagatcaaccttaggctcgctatccgtcacttccacaaggctatgactaactggccgcccggattgaacgggtccaagcacctcaggggaacccactgaaccgccgatggagaaggagccagcaaccaaggatccctgaacgataggtggaggaataacaacctacggagaggaggtctcagacccgtggttagaaggagaaacaatatgaatcggggaggagctctcagaccctaacacggggggggggggcgcaaaaccagagagtcagactcagtattggagatctcaaccacacccactaaaggagccaaaaccgaagaaccaaccacaggggaggagctctcagacccttggttctcaagaggaagaataccaatcccaaggaaggagatctcagaccttgggacaacgaaaggcgacaagccaaccatcgaaccagaaattacggaggagggcaaatccacttcagggatgagagaatccggcgacaacacaagactaggaagaggaggagaggcagccgaaggaggaggggacaaaggcgcgacggaggaaatggagggactcaccgagagggagctaacaacagccgggaggctagaggcagcatccgaagggctaactagaacagaagcagccagaacacgcgcaaacttggaggagccaaggaacaacggaggccgggacttggccttcttcttcttcatgacggacggagagcacccgtcggccggcaaggggccagcgaacgccgacggaaccagatctagaactaatcgccttttgaattgccttatcgccttacgccgggcccaccatatcccaatcgaaattttgtttattgaatggttttcgccattaactagagttattaaagttttacagtctccttccataattactcgtctatatcttcgtatccatgttttttgtaatgctgccagtagtgccatggtctccgcctccagtggggtgcttatatgtttaagaatccgtgaaccccaatgttgtggagtcccgtcatggttctgataacccatcctcttgtagcttctaagttctgcacattaaaactagcatcaaagttacatttactagtcattagcggtggacttgtccaattcttgttggctgcgtgattggatcgaattggtgtaggccttcgacattgtatgcgtgtagcatttagccattcttttgtttcagtctcggcttttactattgttgttgatgaactttctctgaaattattgaacaccaagttgtttattgcttttcatattcttcaaagtagccaaaaaggtaggagtttcagaaaatttgatatcgtgtttttctgaatgaaacttagaatgatttagatgttttcctcaatgttattagaaaatgaataatttcgatggagttgagtattagctagtcaccgtgccatagttgcaaaaggacatgtaaagacatatgattgatggattcattatctcattagcaacatggacaagtgggatctatacacatacctctttagttaatctttctcttgtgactagagctctaccaagaattcaccagagaaactgttttagttttggcatgattggcaggttccagacttttttttttagttcaattgagcaacgaggtctgattattataggtgtggtatccgaaggatcatgagttatcctgatataaccttgtatttaccagtagtgttatagttccatgtaagtttatcaggtttccttattcttcagaggtaactacgccggagataatcatgatcacttgggtccacaaactgtgtaattttggaatcgtcccaagaatagctggagccattaaagtagagtaaattatcaagtgacatctctttgtatctctcatccgtgttcaagggccaaggatgatgagaatcaaccacattatccatccctattcgaatagaactaccatcaccaatcgtgtatcttgttcctttattaataaggcaatcttggaaagaagagaggaccatccaaaagactgttgttttcttgctctagcgtcaagtatcgagtcatctttaaagtatctagccttcataacacgagcaaataaagagtttggatgttgtatgatccgccaagcctattttgcaagaagagcatcattaaattttgcaagatcccaaaaaccaagtccgccttctttctttgaatattgaagttttttccttgctatctatggttctgctctctgatttgaagctttttcgaaccaaaagttcattagtaatgattcagtctccaaaacaatactttggggaagtttaaaataggacatcgcgtacaccggcatcgctagaacaaccgactttagcattatctcttttcctgctggcgagagaaattttgcattccaagaagaagttctttttctgacccggtcgatgatatagtcgaacatctccttttttttgcggccaaattgttcggggagtcctagatattttccacctcctccttggtttgggatgtttaaagcatttttcagacgggattttgtagaaccataatcacaggatccaaatgttatcatcgatttatgaacatttattttctggcccgaatagtattcatacacatcaaaaacatcttacattagcttggcagaaaacaataaattgtctgtaaattgtagatgggttatcggcggggcaccatttccaatatgaactccacgaatatcgccgcttgaagcttctactttgatgagatggctcacaccacataaaatgaacaaatatggtgacaaaggatctccttatcttatacctcgagttgttgtaatgtagccttgaggggacccgttgataaaaaccgaataatgaacggatttaacagcaaccataatccatcctatgcatttgttacaaaacccaaatagtcgcattgttgtttctaggaaatctcatccagctctatcgtattctttgctaacatctgttttcactgccatgtatgtttttgatactcgctttcggacttttagcgagtgcattatttcatgtgctatcatgacgttgtcattaatgattcgccccgggctaaaagcagcttgagagtctgatacggtcggatctaagtgagcttttaggtgattcactaaacatttgatatgactttataaaagacgttgcataaggcaatgggtctataatcagacaacgttgaaggatctgtcacttttggatcatacaaatattagtatgatttatgttggtcttcatagatgatgtttcaaagaagtttttttacttctattataacatcgttgccaactatgtcccaacattgtttgtagaatcttgctgttaatccgtctggacctggggctttgtcatctccaatttggcaaatagcttcatatatttcattgtagctaaatgcttttgtaagatctaaatttactgtattagagagatgatttaaagtatgcaaattcaattggggatacttgtataccatttgaaccgaagatgtttgtgaaaatatcttgagcatggtgactaatctcatcgtctccagtaaacatttgatcctgctcatccattattgagttaattctgtttcgggaatacctagtttttgcgcaagcatgaaagaagcccgtgttacgatcgccctccttcaaccactgattacgacacttttgtttccaatatttttcttcatcactgaatgctttggacaaagactcttgtatctgggaatttgatgttgctctactctcaccatactttccattgctgtatttaatcttgactgaaggttttttattgtcacgtccgaatttaaattggaacagtgtttgagtcttgccatggcccgtctacaacaccggatacgttctgtaatagctgtttcttgaaggttgttgttggtgccccaacctacttgaaccacacgtttaaaggtatgtatttcaaataggcggttatcaaatcgaaatagcttttgacgtgttggagttgaatcattgatgtgaactagcactggtttgtgatccgatcccgtgaaatccaaaactctgtttctgcattaggaaaagctgctgccgaagccgaattaataaagactctgtccaagcaacattatactatatgaatgtgtctttctcccacccaagtgtatttatctcctcttgatcttatgtcttcaaggtcgcgataagaaaccatgtttcggaaatctgtaaaagttcattcttaaagggccacggattttctcagcattggacaatacctcattaaaatcaccaattaacatctattcttcatttcgattgtctgaaattagctcaagtttttcccatagttgatgacgtttagtttgtacaggatgtccatacaccaagacaaatataatagaagctcttattattatatgttacatgagaatcaatgagtctttcattatgagaaatcaaggacaaagataaattgttcttccacataagagctaagccaccactccttccaatgggggctgagttattatattaggaaatcctaaattacacgctaatttacataatacatcaaactgattaagagtttcaactagaagtagaataacatacttatatatacgagttaaacggaaaagccgtaactgcgtcagcggcacaccaatgccctgacaattccatgaggctatcctcctattcgatcccttaggggtaccaggcccccatgcctccgtctattccattacgtatcgaacaggagcctgtcgactctgttttcctctcctttttgtagagtaggctcaaaaccgccatctcatctactgcttcaaccttttggtacatgtcttcaaactgaactctctttctctccatgaaaacaaactgattttgtgcattgtcagaggactccaagagtagatcattgtaatccggtgtccgggtcctaactctcgcgagtttggcatgtaggtaacgcgccctctcaactataagatttgtgtcttcaaagacacttgggacatatgaaggctccaagtctctcatggtatgaccttggtttgcaaacggtagcaaagctttgagtcctggaatgagggttgctggatcaaccgtctgaagggtgtatgtgtcactcatgtccttatctttgttgtctccttgatcatcgttatcatcctcgtcactcaagtctattgggtctgcatcatcaaaggtaaggagggtgcattccttagacatcatgtttcaaggaaccacatttggaacaatagtttctcagacgttcaaaatgatacttgatgacattgttttcatcagcagcaaattggaaattcctctggaagcaaagcggatcatctagattccaattaagccgcactcttagaaatccagcgtgattcacattctcatcaaagtctacaacaacaacatagcctaacctattttcaacgcatcttgccattgcattggtaaggaagagaagagagatacccattagttgtacccaaaacgggatgatcttcatctcggcttcactgatattcgggtaccaacgatgaattgagagcatcccgtcattgaacgactatggtccacgacggagaaccaagttcatcgcttgtttagtctgaaatttaagttggatcttgccttgtccaggattctgccaacacacgaatcagggaaacctaaactcttggcatctgaccaataagagcacgaagattctgtttgcgagggttcattgttgtcacaaccatagtgaagcggttaacaaacgcagcctgagaacaaaaatctcgagaaagagccatgagtttgtcatcgatccccaaattcaagtcttgaaaggattttcgtaatttgtcacttatgattcagaatgagagtgtttgggaagaggtggaaaaggggaaacggattcagtgatatatagtgtctacggcctgaatattagcacatggacacaatgcgacacccacagtcaaaagctgattgaacgctagctatgtgttgtactctcagacatatacaagagaagaagagagaagagagggattttgttgatgctttgatcgatgattgaaatgagatgaagaagctttgcttataaagccaaagccttcaacgtttttagtcagagagagaatcatgccaacgtgtgagaattcaatcttcattaaagtcttgagttgatgcacattgattttgttgttacaaaattcattcaattaacagagatatttgttgactacatcaaatcattaggcaaataatcattgagttataagcccattcccaaatcccaaatccagaccggtccggaacgacacgacaccatttggcccgacacaacatggttagacaaatgtgtgcggtttgggtttctctttttaattttcaaagtgttacatttgacccttagtcaaatttcaagctttccaaggtagtcactttagactttcattcaaacaaacttcgtttttgacatttgaatacaccatcacgtagtgctcacagcaacggttttatcgtgcctaagaagtggtcattctgatgatcttcacctgaaaatccactgtaacaatggtcaaaaccatttcgtcaaaaaacaagttccaacgtaaagttggatccatggcaatttgtatgggtagttaccctccgaaagggatgggatacgataactgccatagaaacggataagcagagagtaaccaccatcgaaagtctttgagagaatcggattccgatagtaggaaaaacactccggcgaagagaaatcaaacgatgtgagtagggcaaaaaataacccttagagagcgccgttagataacatatcaatattaaattagataacataacatataattctacaaaattaattatctagaaatagagcaagtattaaattacttgattgatttaatagatttttctttgtattttgtttatagttgaataaaatcaacattttgttttccaagtgactcatctacattttttaagtggcaattattattttcaagtgggagtatatttattaaataaattattttttcacaatattgtttacaacttttttgtttgacaattggttaatcggttaggaatctcggagttgaataatactatataaaagaaatattttcaataatctagtagtgctattttatgttggaaaaggtagtggtggacaagtaatgatgaagttgagatgttatagttcataatttagaaaatatatagtggaattcatcaagatattcattacggtctaaaaaatttcaaaatattgagtttcccttcaccaagaggaattgtaaaatagacaacacatctattagctaataagggttgtcaaactagttgctatttttttgattgtatgtactcgccaatatggttcagtaaacaattgtatcttgacaatttaaattcatataattatattatcgacgaactaaatatatagtggacaaataatgcaacatgagatgtcatagttcataatttagaaaatatatagtgtttggtttaactgaaattataccagattgactcataacttaataagaatgactcaaatgactctcaatcaaagtgtagaactagactaacaaatctcgtgtaataagacatattaacctttaatctaattttattaaaatagtgaaaaacaaatgacaatattttataaaaatctgcagacactaataaaagcatgtcgtaactaggggtgtcaaaatgggtcaaaattcatgggtcaactcaatttaactcaacccatgaaccctaatgagttaaattttttgactcaaatgagttgatgggtcaaatgagttattgggtcaattggtttgatgagtcaaatgagtcaaattgaattaaaccaagtaaaatctctaaaccaatgccaatttaagcttaaccaaaacatctaaaccaatttaataaaatcaatattttccaaatttcttaaatatacaagcgatgtaattgaaaaaagtaaactcgtaatttttccaccaaaaaacataaacccgtgattttcccgccaaaaacgtaaacccatgattttcccgccaaaagcgtaaacctgtaattttcccgccaaaaactcgtaacgttatgaatttttttggcgtgaaaattccgggtttacgcttttggcgggaaaattccgggttttggtttttggcggaaaaattacaggtttacgcttttggcgggaaaattacaggtttacgcttttggcgggaaaatcatgggtttacgtttttggcgagaaaatcacgggtttataactcatttgacccatcaactcatttgagtcaaaaaatttaactcattagggttcatgggttgagttgagttgagttgagccatgaattttgacccattttgacactcctagttataccacagatttgttacacaaccatttgaaatattaaagttttagaaaaatctggagagactgcatacaacaaatctgtcgtgaaaaactaatctatgtgatattataaatttgtcataactatatccaaaaatttctatcaaacaaaatctgtagttccaaaaaaaatctgtggtccaaaataaatatctcgcaataggagtctcatatttaacaaaatcgagcaaaaagacggagtagcagtatcgtaaataaaatatattttttcaaaatataaattgttttactaatgacaatcctgtattattgtttttcctacaaaagaagataaaagcattttagacattatcattacctatataatctatatatttagcatgtcattctagtaataaatacaaaatatggatgactacaatattatgtattgtacattttaataatcttacaattttgtcctacgtgaagtcatgacatgttcccaatcccagatgggatccaaagacttgctctaatcgagagtgcattttcatattaaactaacctttagaaacaatatctccaatctagttgaaataaaatagaagtcaatatatagtatagattgtattgaaatcaattgaacggctaactttataacaaagaataatataaaaaagaccaagcgttagctgtattcacaagtcttatattaaatggttcgctaaagctaatatatatgcaagggggaagaagagaggaagaatatcacacaaaagaaaaaccaaaataatcaaaatctccattttagcaactatgaattctgttggtgtatttcgtaaggaggaaattgatggaaaatcatttttggtatacacattaacacaaacagacaacccaacttcctccggtgaagcactagccatggattctggtggcgacgacctccctcttcaacctctttttttctgtcctgctgcacgtatcaattttcataagctcagactaaagatgcacaatcatgatgatgatgatgatgctgaagatgacgataacggagatgacaaagaagatggcgatgatgacaacaaaggtgatgatggtgatgatgacaacgaagatgacaacgaagatgatgacaacgatgatgatgatgatgatgatgatgatgatgatgatgatgatgatgatgatgatgatgatggtgatgatgacaacgaagatggcgattgcgatgacgatgacggtgacttgcttcttccattcgattccacccctcacttccccagcacaagaagtggtgatcaacaaggtgaatctttgcttgattgcaaccacccagacgtttgtaagctccctgtagtccctcttttttggtgcaacaataaagaacgttctactgttggattcgagtgcggtgcatgtaaaatgacaacgctctgcgaaagctattttgcatgtctccaatgccaaggaaagttccacaaagaatgtgttgagtctccacctgagatcaaacacccttcccacccctttcattctcttcgactttgcagttttcaaacgaggcttactagcggttgttgtagaaaaattacctttggcatgttttatcagtgtacaacctgcaatttgagtatgcatcccgtctgtgcgatgaggccagtacccttggttgtagaccatcctaaaagccatccccatcctctctcctttttccctacacaagcttctacagtttgccatatttgtgccaagattaagcatcttgatcccacatatatctgtatccaatgtgtcttcgtaatccataaaggttgtatgggtttcccacataccataagaatatctcgtcaccctcaccgtatctcttttacctcttcccttccatctagaacgctgtcttgtggagtctgtcatcaacaagttgacaacaattatggtgcatactcttgcaataattgtgacggttattttgttcattcaaaatgtgcaatacatccaaaagtgtgggatggaaaagaactcgaaggagtaccagaagaagatgatttgatagacgatggtgagccgttcgagaggatatctgatggaattatacaccatccttttcatagtcaccacttgcgacatgagatgagcataacttatgatgaaagtaagtattgtcaagggtgtgctcttccaatctatgaaggtcagttttattcatgcatggaatgtgacttcatcctccatgacagttgtgcaaatgctccacggatgaaacggtatcctttatatccacatccaataacacttaaatttgccaccgtgagaaataatagtttcacaagtcaatttcgttgtgctgtatgtgatcgtcatggtaatggtttcttctatgagcatcacggcgaagataaaatgttccggctagatttacggtgtgccttgattaccgaaccgttggtatatcaaggccacatgcatcccttattcctactgtgggacgacacagagagtctgataagttgtcaaatgtgcaaaaagaaaagctactattcacaactgttttgcctggaatgcgagtattctctatgtttgcgttgtgttaccttcccatataaagtaaggtataagcatgatagtcattttctcacaatttgcgatgtgaaggaggcaagtgatgaactagactggtgtgacatttgtgaaggcaaaatagaagaagagaaagaaaaggaatataattgggatgatagagaaagagagctacgattctataaatgcaatgattgtagcactgctcttcatgttgattgtttgcttggtgtagacatgtacatgaaacctattacagactacatttctgtcatcacgctcacatctaagggtacgaaacggaaagatctttggatttttcttaacaactctctcactcgaccaatttgcactacatgcttaagtcgttgtccattcccaatatttttcaaagggcacaccaaaatcttctgttctttgtattgtagtgaggactgatcatcaaactagttatctcttttctctgtcaatctagttatcccttttctttgtcaatttgaagtatttttgttttgggtttgttgtatttcttaattggtggatatgttaaaatacaagatatttgtggttgtgtcttctcatcgcatctttttgttaaaatttcgcattttttggtaaaattttagtaataattcaaatatttgtgtatatcataataatttaatacataaatactaggttcaaggattcggttttattcagtttttcggttctagcctcttaggatccataagagaaccaaaaaagtttcgggttcaggttcgcatacttagaaagagagccgaaaattaactgaactccattaatagatatccgttccgtttggttcccgttattttacacaaaataccaaaaaaaaacgaaaaaaccaaatatccaaaacatttttgacgaaatatctatgaacaaaaatattaaaatattgacaaaaaaaattgtaacgctacgaacgtacctgccagcggtccccacatcctctctctgcgtccagaaggttctaaagacttgtttacacgccctacaaatccccacatgatatttcctagtgttttgtcctcacttacacgattccaacaatcactttccataaggtcacacatcctgagacttttccacctcaatgacgcttaattgtggagttctctcaggacgtttgaccgaaaatataagtctctttggtgatattgatggcaaaatcaattcttttaaacctctctgcatggacaccctgatggaaccaaaaatgtttggtcaaccctatacaaaactacatataagcgcaaaacattttgttccaacttctcactacaagaaaacaggcaataaacgacttacggcgtagtcgcagattagtcgttaactctgaatctacgactaatccgcgactaattacagtagtcgttataccatagtcgctaagtagagctgtcgtcatttagtcattgatttacgactaatttacgacagcataccatacaatacatattagtcgttgagtagtcgtacttatgtggcgactatttggcgacaatttcacgattaataacactgtacaaagcgtgtgaaacatattgtcgtccaatagtcgttaaattcttccgacaatgatacgactatgttacgattaaatttaatgaaccctaggtgtctttaaagtaatcgcaaaatagtcgtaacattttttacgactacttgccgactattatacgagtaaatgtaagatactaatgatatgttatacttagtcatataatagtcgtataaatttatacgactaatagacgtctgtttgacgattaggttatgagtacttttgtttgtcgtaaaatagtcggtaatattggtgactcttttacgactactttacgtttaattggcgacgcttttacgactatttggcgacttctggttttgtccgaataagaatttggtcatcgattgttgggtttcttgtttgttgtttagtgttattgtttgttgttgtttgttactcgaaatgctattaattatgaaaagataaacatacattgaaaattaagttcaaatacacatacaagtatcttgttcttaaacaaactactttattcaaataaacataagttcaagtatagtgtttggttcttaaatctatggagcagtaggtggagtatttgggatcagtggatgtggaagagtgagtggccatgaagtccaagaattgcggatcggtttggcagagatacttctcgactaaggacaagtgttcgagcttgtccttttgctcagctgtgactcgggctgactcagcttctcgggctgtaatctcagcatcccgcttctttttatacgcagcctgctcttcaattttccgttgagcttcttgcagccgttcttctaaatcttgaaaggatgttgagtctccggggagttggcggttggcactgcctagagtatctttcagacatccaagtccataaggattgcctcttgcatccctatcagtggactgcaagaaaaagagaggaagacaattagtgactgaatttaaaacaatggacaagactctgaattagactacaacatcttacctcgagaaagatggctgtatactcatctactgtgagttccggaggtcgtgaagtgccatcagagacagcagaagctgcagcctccagttcagacagctttgatctcacattccgttcataagtttgagcaatcatcttcgccttccgatcaacataagtgccatccgacttagtgtgtgtctggatgaacacctcacctagatggactggtcttcccagtttctcttcctgcaaacacagatcaatatcacaagtcgaagacagcttgaactgaacaagacagacaataaaactctaacttatgatttgaacgactctaaaagacatgaaaggatgctgaaacacttaccaattcatcttggatttcttgataagactttggcctagagtagtggatgtgtggaccgagaccgttacggtcagagagccgagctttagaatagttctgactcctttttaggcttcttctgtgtcccagtaagcacacattgttccccacagagtttctccaatccatggaggctgctcccgagttctccttgaggtgctaaccatgtccttcaagcgcctcttgacgatctcattgaagtaatattggacagtccatgtgattaagggatcctagtggtgagttttctacaaaaaaaggaagaagttagtgaactgaacttgagcagacaataaaacaaagactgaacaaagcaaagagtcaggaagcttaccgcgaactctaaaaacagtctctctcttttagccaatggaacacatgaccaattatagtaaggagcattgaacttttgagtaaagatccttgtgatctttcgaaccagtttagaccctctgtcgcgagtaaacctccaagcacatgcaacaatgaaagaagtaaacatgttaaataatcaaaacacaacaacagctatgagaacagactatagaactgaggcagattcacaagtctactatgttacacaggcagaactgagggagattcacaacataacacacactatagaactgaacaagagcacacaacaatatagaacacaattaagaagagaatgagtgtgagttcaaaagtcaaaagcacacaacagaatagaacacaactaagttcaaaagtcaactatgttcaacaatagatcatgagttgcaacagaacacaattaagaatgcaagacatactatagaacataacaagagcatgagtagcaacagaacacaattaacaagagaacaaagtcaacttccacaatagagcatcaagagaacacgattaacaagagactcgattaacaagagaacacgattcacaagtatagaactgaacaaggacacacgagtattcacaagagtacacacaagtattcacaagtattcactaaagcacacacgagtattcacaagtattcacaagagcacacacgagtgttcaaatcgaagcaaagacaagtattcacaagagcacacacgagtattcacaagagcacacacgagtattcacaaggctactatgttacacaacaaattaaagattgagagacttaccactcggtttttggcctgggaattggagacaagacacaagtccactgctccctgtttggcactgacataatatcttgtagagccaccgccgagtcttcttgaagctccggcaacgtcctaggaacttccttttggaagttgttcccttgagacgaagggttgctgttagctggctcttccggcgactcaggatcttgctgagcaggctcttccggcggtggattgaagtggacctcttcagatcgaggcggagcaccatcaccctgaggtggagtggtggagttctggaagagttgtagaggcggtggatagtcgcgtacgtggggggctgacgttgaacggacaccagcttgagtcggctgcgtcgttggaacatgaaccgtcggcgccagagtgaagttgtactgcgccggcagatcccgaggtctaggcgtcgttgaaccgccgactctctgagtaacattaggcgtcgtcttcctctttcgggagcctcctcgaccggcgttcggcatggaagatcgacggagatcgagagattgagagatagagagatagagagagattgagagatcgagagatcgagagattgagagatcgagagatcgagacaagtgagagagatagagagatcgagagattgagagatcgagagatcgagagattgagagatagagtgatcgagacaagtgagagagatagagagatcgagagatggagaagatggaagaagatagaagaagtttgaagaagattgaagaagaagatgaacagatcgagagatcttagggtttgagaggaagaagacgaagaagagagttcgagatcgaagaaaattttggctaagtgttaggaatgagaaatgacacgatttagggttttcaacactgtattagtcgtatagtagtcgtattgttgtcactaaatcatttgggtttgggcctcaaatttcaaaagcccaataacttcgcctgtagtcgcaaaagagtagcaaatctgtcgtcgattttattaggtttgggcttcgagaattagaagcccaacaacttcgctgtagtcgcaaaatgatcgcaaatctgtcaccaaaatgatttgggtttgggcttcaattgttagaagcctaacaatttaaaacgttgtcatgtagtagtcgtataattgtcatatttttattggatttgggctttgatatggagaaacccaacaaattaagttatagtcgctaattaatggcataagcgtcactgcttttattaggtttgggcttcgatatttagaaacccaacaaagtaagatgtcgtcattgagtagtcgtattattgtcacatctttattggatttaggcttcgttatttgaaagcccaccaagttatagtttagtcgccaagtagtagtatcatagttttcttatacttttgaaattgaaataattttacatagcgattattcatgacaaaaataaatgttcaatgatatattatataaaacacaatttattcaaatgttttatcaaataattaaacatatacttcacacatttattactcttcatattctacttcatcttcgtccgaggacgataaattacatcggaattcatcttctggttcagcatccccgacatcgtaatcaaggattattgggtttaagctttctaccggattttctagtacaagattttcaattgtagtgagtaaaacagcatcatcattttctgtttgcaaaagagtcggatcattgttttcatattctccagaaatgttttctctcgggttgacttttaaaacattgagccaaatgttctttggtttcttcgtatatgagtacggaatataacaaacttgatctgcttgagatcctgtaaacacaagttatacatatatatcaaacaagagtattaataattaaaagagaaatataattgacctcttaaaaattacgtaccaagaataaatggctcgtatttattatacttcctcgtagatagaacgtcaacaacgccaccgtggcttcgccgagtgcctctctcaatctttgggtcataccacttacacttaaaaagtgtgatcctcaaattgacaatgccctcatactcgagttctatgatatcagttaaggtaccgtagaaatccgcttcatcagatgaatcagcgtaattttcacctttaacacataccccatagttacatgtctttcgtccagcgccgtgattttgcgtatgaaacatatatcctcttgtgaaatacattggccaagttttgaccttgttcaaaggtccttgcacaatttcttgaacccaagtaggaaatggagaagtagtgttccaatatgttacctacataatagataaataatattaatacatataaatatgattctcacttttcgaatgcaagaaattgatgtagacttacatattctttaacccatagatgatattcttcagctcttctcgcgtagagttctttttcgctcaagcatggatatttcgcagtaagacaatcctcgaacatactatatttacaaacaaagaaaaataaatcaaagtgatcttagtgaaaatttacaaacgaattaatagtgattaaaaatacctctcaaatggtttaaaatagtcacaatttcttaaaacatatgcatgtgcgctttggtagtctttctctgaaagccattctacatgcatttcaccacttggacgaccgacgtgcataaatatgttaggtactccatggacatgatatacaggaacttcaccttcatcgaatcttgttaacttgattcatgtaattgaatgaagatcgaagtatagtaaatagttaaataaataaatgtatttacattgattttgtttgtatatgatcggcaaagtagtgctctgaaaagtaagcaatctcgtcattgatatatgactcaacaattgagcctgcagcatatcttttgttctttacttttcctttcaactttttgaaaaacctctcaaatgggtacatccacctatattggacagggccacccaattcagcttcgcttgggagatggataagtaagtgttccataacatcaaaaaatgatggtggcaaaatcttttccaagttacagatgattaaaactatgttctctttgagaatttgaacgcgacttgtctgtaaagttctcgaacataggtcccggaaaaatgctccaattcctgaaatatatatatgtgcaagttaaataattagaaaaaaagttggcaaataaaatagtaagtattgtacctgataaggcaaggtggacattccggtcaaggagttcagcaaagataaatggaagtagtcgctccataaaaacatgacaaccatgactcttcatgcctgaaaactttccattctccaaatctacacactagccaaatcgctagaataaccatctggaaatctaacatcatgtttcacacgttgaaataaactctgtttggcttcgtctgttaatgaatacgctggaaatggagctttaccattactatcaatatgtaagcctggccgtgaacaaaaattctcaatatccattcttgacatgatattatcttttgatttacccttaacacgcaagagagtgttcatgatgttgtcaagaaaattcttctctgtatgcatcacatcaatattatgtcgaagattgaggtccttcctgtaagacaactcccacaagatgctttccttgtgtcaattatgttccttcccatagcctcgcatcttcttttcatgaccgttcccaccaacatctttcgttcttggtggatttacactagccaaccgctcgtaataaacttgctcctctgttaaagactccggtggatactcgctagaagcatctcttcctttcaaaaagtcttttctattcctacgggatggatgaccatgaggaagaaatctacggtgacaatcaaaccagcatgtcttccgtccattgggtagataaatagactttgtactttccatggaaactggacaagacaacttaccatgagtagtccatcctgataacatgctatacgccggaaagtccctaatcgtccagagtagtactgcttttagattaaaattctgacttaatgaaacatcgtacgcatcaactccagtagaccacaactcttttaactcctcaataagaggttggaggaacacatcaagactacctcgaggatgatttggtctagaattgagaatggtaagaaataagtactttgtattcatgcacataccagggggtaaattatatggagtcaagatcacaggccataacgaatgattacgagacatcccaaattgattgaacccatcagtacacaacccgagataaacgttacggggttcttcggcaaaccggggatgtaactcttggaaatatctccactccgctgcatctgaaggatgattcatttctccctcatttgtttggtgctcagcatgccatcgcattgtcgtagctgtcttatggctctgatacattctcttcaaccggtctccaataggtagataccacatacgactatatggtactttggttcttcgacggtcgtccttaggcttccatctttgtgcgccacaaaatcgacattgatcttctttttcgtcttctttccaaaatagcatacaattgttctgacaaacatcaatcgtatgatatggaagtcctaaattgcgcatcaacttctcggtctggtaatgtgaagtggtagcctggtttccttctggtaaaaaatctgtaaacatttcgcaaacggagtccaccaacttttcactcatattatactccgccttgttgtgcatgagtcgagatgctaaggataactgcgactgcccttcacgacatccatcgtacaatggattatttgcaccttctaacaagtcgtagaacttatttgaatagttacggaccggttcttccacattctgataactatcatcatgatgatagttatcttcataccccacgttaaaattaaatgcatcgttcaccatatccacatatggatcttctacaacattacccacttcttcatgattcgaactaaaatacgtcctatccgtgtaagtactcgttcctatatccatattcatttcttctccatgtttataccaaacataataatcaagcataaatccttgactaaacaaatgactactaactcttccacccgagatgatgtgtttttcattcttgcatacactacaaggacaatgaaatttacctcgactactctgtactataggctgactattagcgaaagtcatgaattgctcaactcctgcgacgtatttggctgacaaattccccgtcacttcatcaaatctcttgtacatccaatctcgataaaaaccgccactaccgccataattgtagttttccgccattatacaataaaataaactattattttcttcttttaaatcgttttgtttcttttgatgttgttgttgttttgatttgttggtgaaagaagagcgtcgtggagttttaatatgtagacgaatttttatgacttatttacgactacatgttgtagtcgctcacaaattaggtgtacctacttagcaatgcgaaacacgtttttcaccaactttatgcgaaacctttgcgactactttgcgacaacagactggttgtcgtcaaatagtcgccaaatatacgactaactaaagtagtcggaaagtttgtcgtcatttaccgactatttgacgacgaatttctctctacagaaatgtaatcgttaaatagtcgtccatttacgactattcgccgactaacttatttagtcgtaagtggacgactacttcacgactaattttcatgttgtcgtacgttagtcgtaacaacgtcgcctagttgtcgcaaaataaaacgactacacaagttgtcgcatttcgttgtcgttttttgtctagttttcttgtagatctaacaaaatcattcgatgctgcaacattttattatcaagtcaaatatgattagagatttcaaaaatgcttgtaagattgtatctaatgaacaaatcaagtgattcccttattattttaaagttatgaccatatggacagaggagtcaagtgggcctcgcttgacccatatagtaccatggcggagcgggtctggacactatattacatgcccataaagtagcggacctcgcgggccggtccaaacggattgcgggttttagcagatttgacccgcatgctacaaatattcaaattataataaataaataatttgttaagataaataattttacttaattataaaattacaatatataaactatgagataatatgaagaaatttaatttttagaattgtaatatttacaataatattaaaaattatattattttaaattcaaaataaaaattaagcccgcgggccagcctgcaaacccgttaggcttagctgggcggtcctggacatagttcctttgcccgcagtcctagcgggccggcctgttgcggtccatctaaaactaatacccattgcaggctgacccgtttgatgttaatctaaaaacatttgacgatgtagctcttcatcttgagttacaggatgacccccaagaggctgctaaagcatttcgacttgaaacatatgagagttaacttggggaacaaagctaactatcaatatgatcttaagcaaagcaaatatggttagcgtggcaagcactaagataagacggataagaccaaaatgaaatactgtaacgttatatcactttgttcgtaaatgcactaaagcaaagaagatattatccctaaactctagctacttgcaagtatgcttttgttccaattgtataacgcttgcagaatcccatactttgtggattgaaatagagaacatgtgtggagtaccgtcggttttcaaaaacttcaaaataattgtatgtgggtaacaactccaagattgttgtattggatataagcatttgtctgcaacacaagtgtggtgagcggacccttatcatataggatgctcctgaaattcatcgggattttaagagaaattcaatacttttgttgctgcttgtggatcttttcacttcttcatcccttttatatagggatttacctagagctgtatatatctaaagttaaaaggcaaaatttattatctccaaaaaacaaattagtacgggaaaacaatcatttacagttcagtatagatgcatagattattttcaaaatcaatgtctcaatttttatataactaaataaggtctatcgtccgcataaatagacgagtgtaagaagtaaatataattttgtattaataatatttgtataaataataatatatgtttttcttaacaattaatatagtaattttgttttaaaccaaatttcaatcttacacattctgtttttctttacaaactttaactatttatttcaacatgctggtcccaaatactagctcacatttcaacccctttccaggaccgtgtggagggctttctagtcaggtatatattccaagctacgatctacaccatttggcgagaacgtaacggtagaagacacgatgtttcacccaacactccggctacattaattggatggatagataagcagctacggaatcaaatcacaacaatcagacagtcggtatgacaaggcgttccaagcttggcgccgagctcgaccctgaacgtttcaaagaagatttttctccccacttcaaaattttgttctatacactttcaataacctgatgcactagttgtaacaaaatacactttttcttttgaatataatttaacattagattcaaaaaaaaataataataataaacaacatttaattctacatactctattgtatcgataatatttgaattctaaatagtatctcacacacactttttatatttaatttagtacttttatttaaaacagttttttatcttacattctatttaaaatacaatttaactatctatttaatcataataaactggattttgattctacacactttattttaatgaataaatgctaaaagaaaaaatcatatcaaaataatattgaaatctatatcacaccatatcaaatatatattttcattaagattgaaatagttaacaaacaacaaatcattattaacaaaaaatccacaaactaaccaaaacaaaactttaccaagagaatgacgttgaagcaatggtggtgttttgaaaagttttttaattttttaaatctttttaaaaatttgaaagattgtttaagaattaatagcttaaaattagaattagtaggtatttttattttttttatttataatttcttaaaattatctttgtcttaaaattaataatgaaaaaaagaaattttgttctacacatgtcaaaatcagaaatcaataaaattgattcatggcacaatcttatgagatattaactttgaaaattatactttatataataagatgttattcacaaaaatgtaaatacaagcacatatagacggttcagtaaaacaaatcaaattttctttcatgtttatgtttatgcttcatgtcacgcttccattttcaaaccattattcttttcacattcacattacatattcaataattatataagttatatatatatatatatatgcacacttctaacacaaaaagtaatatacataaataagtatcttctttatatctttacaagagatttaagagattttactttaaaaaaaaaaaaaaagagtttcatagataagagatttactttcagaaaaaagaagtagaaaacatctggaaacaactttgatgagaagatgaagaagaagaattaatttgcttggtaataatgctacaatcatcaagcttaaacacactaacatcttcccggtcgttgaagtaaatagcattctccaaacatccatagtactcggaggctaagaccaaaaaacaattgtccgtcgccacaatgagtgccttgtctcccaaggaactgacctcaacccattctaccaaattcttgtccatcttataaaccttaaaacaaacggttctctcggtaagaactcgctttacgcaaaatttcttatagaatcgatgaacaacgcatagttctccacaatactccacgagtctcttttctttgcaattatcaatttcgtagaagtccactggagttgaaggtccgtattgatatatgctgagttcagataaactaatccaccaaattgctcctgttaagtctaatgcatagatttttcctttgtgaagtataatatccaaaaaacctttagcttcttcattgttgattcttgtccaatgtctagtttcttctccactcttgcaacaccaaatttcgtttttgaagtcaactacgaaaaagacattgtctaggaaaacaactctatccgaatccgcgaatactgaagatgcagaattcaatcaatcagctgatggcgatcagaacgtttatggatttcaggaagctacatcgaatcccatcagacgcttgagttgctgacatggatgcaagagcagacgtgacaagcgggagcggatgatgtggagggacaagaatgaaagttagtttggcgtggtgtcaaagacaagattcatcgagaagatatagaagatattgtctcgaagaataaggaaacgaataggcttggaaacaaggaagattccatatcgagagattctcggagatcctaagcttagggttctggagaataggtataagtattctagaacaaagggggagccgctttgagcactctaggatattttcgatacattgtgtaaaaacttcaaagcattgaaagagctagaaggtgagtgtgtaattctctttgtcttcaggggttagttataaaaaacagagaagagaattagggcttagttattcttagtcgaggttgatcttttgggtagattagatcaagtaagaaccgagataatacttgtaaaagagttttattattaataagaataagtgtttaagcaactctctgtgttgtgttgatctctataccctcttaaataccgtatgacctacgataacatctctaccctaataatgatttgtaacctctgtcaactattcaacgttgtaagattgacgaatctctgaaacactcgaccttcaaaaggtctagggttttgtcggaaggggttatggttttgccagaaagaggagacaagagattatttttactagattcagagacttgtctgtttttaatcagccatcctttgttacgacatggagaagggagagttacacggaagaaagtggagggagagacaacagtctttttcttcttgaaagtaggaaggttacgttcaaagtggttatggagacgcttcttggtcgcaaccgtggaacgccagggtttacagatgctacggaaacggaggagattgatgttggaagataaattattggctaacaaatctatgagatcttcatgtaaatcagaccacccaactttacccatctcaatcgttatctatgtgttgttgttactacttgtacagaagaaacctaagagtttgatacagcaaaaccacaccacaacacaatcaatcatcaacaacttccgattacttcttattattatgtaaataataaatgaaacccaatgttcataaaacaagggatttctgggttcacgttgcaagaatcaacattccttgcataggatgaatccctgattgtttacagagagagagctaagggataaaacttcaacgataacatgaaaatgacgatgacacatgatatttattagcttcagctctacgcccacttgcttttaatcacagccgtccaatgatcttcttatcacagccgtccacgtggcctttacttaatatcctgtatcagagttttttaccccaaaaaaaaaaagaaacctaagagttttaacgaaactgatttaggagataaatgtatttttaggtctccaatatcagtttaggaatatctttgcggaggataaaccctaatatttgacgcaactaattaaaaattgaaatacggtggaatttaattccttttttaaaaatcgtaagatatttctagtttttttatatattttgtttaatgtaacttgttccccaagatattttagaacacccttttatttttattgttttggtttccagttttttatagagtttttaaaatatatattttattgtttagttcttttcaggtaatcctttttgccattttttgcaacttaggaatttaacttcgtagagtgatagaacttccaccgctgaactgaagatataaaatatattagattagaattttaaatggaaaaatttaaaactaaaaaagaaaaaagattcaaaaatcatgatcatatctacttaacatttttgaaatacaaaataaggaattttccgggttgattttttttttgggtttgacccggtttttaacccggattttcggtcaatttgatgaatttaattgatatttggcccactttcttcaaactttcccactactacaaaacaatgacagcaagaatctcggcaaaatcaattagttaatcaatgcacaaattaaatactttcaattaccggaatcaatgcaagaatatttactaaatcaagctgttaccgaattcaattcatttgctatattcatttttattcgattctggtattctttttctaagactttcctataaaaatggaaccgattgaattattaatcaatttggtttcctaaaaaaaatgaacaatataaattcagtatttaaacaaccttcaatatatggaaactactaaacacaaaactgtttcgaaaacgatattatccttaactgttaactgtgaataccgatttcaatattatcgaagatattcgattattgcttatcatgattacgtatattctctatctccaaaaccctataaacctatcacaccactataaataatgaaccattttcattccatctctacacgcttcataccaatactcactaaagctatagattccgaatagaaagtttctaactcttagaaactcttagagaagagatcattaaaacagagaaacttataattttttacattaaaagttgaaaattatttaaattaattttcttttctcctaacacatctaacataacaaatatgagatattaaatattcgttgaggtgaatcaatgataaatcagtagataaacttccgtcaattataacatatatttttcatacaaaatttctaatcttgaggcggtaattgacatttgttgattttttgggcgtaaattaacaaatatagtttatatatagtagaaaacaaaatgttaaattggcaactgataaatgtttatgatcagcggacaagagtcgattagcctagtccaaatcctcaaataaatcacgtatgactagtacaattacacaattcttgaaaactaaaatatttgacatattttgagctagaaatgaaaagagtaaccaaaatatattttttgtcgtagttagtcttttgttactatcccaaaacttgcttcaaaatatctacatctcctctttgttttccgatgtatatactatataccatcatccactattttcaatatattttcattgaagtaataaaattctaatattaatatctttttggttattttagtttatttatcaaacatgaattggaaaaaaaaaactaaaaaaacggtttataactctagttttatcatcgtagcttttatggtatcaagactaatatgatcgtcataatatgtatatgtaaaacagtttatgaatgatgtgatcaatagttgtgcaaggattgtacaattgttcttactcatgcatattagttgtcacttagaatacataattttatatgtatatatatcaaatctttaaatagatagactcaactgcttctcataatattcttacaacacaaaaccattattagagaggatctccgagtaccgctgtccaccgccaccaacacctagtcctcttcattcttgatttggagacattcattgtaggcaccgctttgattggcgtttactccataaccccatggttggggaaactatagccaccttgagttccttgataaggactgtaaccaccagaattcccattagtcgcttgatttccttgatagtaaccaccggagtttttataactgttttgattcacttgataaccaccggagtttacattaccaattccttgataaccgccagaaccaggagaatttctttaccgccggagtcggcaggatttccttgataaccgacggactggcaggattccttgatagccaccgatgtttccatgattggggctatcataaccggctagatctccttgataaccgtcggagtaacccgctttattgggttttattcttcattataattattagcccaccacacaaacatatttaacaatgtcttaagttccaacaatctattttactatcataacataaacttgattaacacttactacacagcaagcaataattaatttcttttaaacatagatatattaacaaagtcttatgaaacagaaaaaatatcaaaaacatatgttttttatcttcacaatatcacaacttgaagcaaaaaaatgctaagttacgttaccgtacaaatatacataacaaaatagacattacattcatcatctagattgtaaaaacaaaatatgttaaattacttaacccgcggtgtaccgcgggtcatatcctagtgtttcatcatttttggaacatcctttagtggtcgttggatgcgcaaaggaagagaatccaaaaaatgttgttagttttgagtgatgaaaaatgtttgtgtatcaaatcatttggataaaattaaacacacaatgatagaagatgttggtgttgtcttgagcagctctatataggaagcagatacttcaaggcatttaacacatgtccctaaaactgtaagatatctagacctaagcagtgtagtatagtgagtagtccagattgcatcacagatctccatcggctggaaactcttaacatcgaaaattgtagaaaatttgtgtcactgccaagtctacccctttcactcatgtccataacgaaaaacaaaaattgtcgatcacttagagaatttttgttgctttttccatgatccaaatataaactcatatcccaaaactgtttgaaattagaagaaaaatacggaggctaatcatacaacgatggtttatgagtatgtatgcttcacaaccagtcaaagaatgaaagcggtctcaaaacatgatagatatgtgctcaaatgagcttatcattagctagatatgaaatgagattgaaaatgaaatagctcattagagctttattaagatgtaaattaaataaaggaaaggagaggaaagagccagtggatttatatgaagcccatgtaactaaggttttagcaagtagactgatggacttctcatgttgggcttcatataattcactacctctttccttttctttactttatttgcaccttaataaagctctaatgggctattacatttttaatttcattcatttcatatattttctatctagctttgattcaatcataaaatatataaaaaaaagagttgcctcttcacaactctctatgttgctttacattgatgttccaaatacaaaattatatgaatctctactaggtaaaactcttgttacatgggctaatggacttctcatcttggacttcatatgaatccaaaaataaaaagtccacaaagagttcactcacaaagctataggaagctccataaccatccctctggtccgcgtgatgaggggactcagtgtttgtcctcaagatttaaggcttgccttcttctttctcctaccaagaactattgtttttttctgtaactagtcgtctaagaaactaaggaggtgcggtcattattgaacttgaatatgagtcatggacaatggctcctcggtttctaacggaatactcgtttataaatcatggtgacctgtttgattaaaaaaacaaaagccatgaactggatgtgacaacaagtgagattacatttgaaactttgctataaacatgattggattatggatatgtggtgtatggatcttcaatgaggaagctgagagttctttatcttactctactagttagtcgaatattaatagctcaatggtaaaatatctcaagtaaagtgcaaagatcgcgggttcgagtggtaattaagaggaaaccatattaaatgttttggtatttggtctgagggttttaggtccaaacccttttagtaattaacatatataccaatttttgttttatttttgaatgacaaatatgtaaaaattgttttttactattataaaaagttatgtgaataagttccattacaaaatggtaaaaacgacggtcacataagatgttttattagttgataatcgaagggcgccaggaaatatgaatcgagaaagctgaagtcaagttgatttcttgtcggagttagagacgagccacgaagagaagttatggagagtggtgttatcgactcgatagccggactgggtaaatttctgaagctgagcccaagtaaagtcagggtactttctagaagcttcttcaccttccacaagttcaggaggaggtacgatgattttatcttctctaggacaagagaagaatactaatgaccttctcactttctccttgtttaccactgccctgtggtaacaactcctgtagtttccatttgacaatgccttccaaaatcaaatccaaaatattaagaaaaaaaactataaattaatcatttcacattatttgatatatattgtatattataaaactgtgtatttaatttatgttcaacaaccccaaaaaatataaaaacagtagatgtcgtgtaatatcccattttgtcaaaacaatggcgtttgcataaaaaaagttaaagcataatttttcggaaagttgtattgtatctaataaattttgtcattgttgagaaaatttggtagccttattcattaaaaggtaacgtaccatgaaggtgtctccaacgttgacgacaagagcaccaggacgagggcgaacggtctgccaactacctgcggcaaagacctctaagcccacaacatcgtcttgaagcaaaacggttatagccgttgggtcattatgggggccaacaccaagggctttctctggctgcttgcacggcggataatagttgcatctgaagatgccacttccatcttcgaagaatctccggtagtatgtcctgtcttttaaacccatacttatacccaatagctccatcaaatccataaccagtccattcattgcatcacaaaattcttgaaacacttgactgaaaaaaacaagagtttcaagcaacaaaacagttaacattttaaaatgtaaacatcatcaagtaggattttttttacagatttagtaacgggaattcgggtttcgtcaaagtgcccaactaatcccggggcgagcaaacctttggcaaatagttttaaataaagtcaccaccgctaaatcacctgacgaaaactcaagtgatcaagcggtctaagggcaaagtttacatgtgaaatgaaacatgagcgcgtaaaaattttaaacccttgaccctaaactctacatcattatgccaccacacactagattcaaatagggtttatcataacgttactataactacaatatatgcatgcaatagatttacccgatctcttgacgatggttgcctagccttgaggttagaaagtcttcaacaacatggggtggcccctttttgaaggccaaagtcaaagtctcattccacggaagattggaggaaaatctttggctatgacctgcggtatagccagagatattccccgggatcctataagcccttagcttctcatccttggatagcccaaagaacaaactcgatatctcaagcgccttttcagccaagcccgacttgaagccatgattgaccactagaaaagtaccgtgagccatgcacgcttttttcactgccttagctgcaagttgcgtctcggcctcattgccattcaagaacccactcaagtcgatgattgggagatcgaggtcgccttctgaaggggcaacgtctttctccggccagaagaattcagccggaacatttggttggctctggagtagggagaagttgacgtcggaggaattc

SEQ ID NO: 1187 - DNA, 115421 bp, Arabidopsis thaliana
aagctttaatgacgttgacatagtccattgacataatgacgttgaaaaagactccatcgcctcaagtctcgtcggcacaagacacgctacacaataagatagcatggtgattaggagaatcaaacgatttctcggcttaaaacccggaaaccaaagacggaaacaggtgataagagttcttaccatgacggaggagggtgagataaatgttctctccataaaggaggagggtgagataaatgttctctccacaaaggaggaaggcggagccaaggttttctttgggaagcttggacgccggggaccctcaaggtcatgtaatattggagctctaatacacggattggatatacatcggaagtaatcgcatcctttccgtgaagatggaagccaaatacaagactaaaaaactttgggatgagattgttggagtgagattgtatgacttgcttccgagtgtaaacggtgaagatgatatccagtagaaacaacattggctgggaattccatgattgacgaaattgataggtcaaactcgagaacaatagggtcttccattgaaacggttcttctgagataacccgagatcaatttctcaaaagaatttggatacattgaaagcgataccataaaagggatgtcaaaatatctaaccggtatcgactttggtggagaccaaatccaattagatgggagaagcatcgtgacgtaatcaacaatactcggctggccaaaagaaatagagagacagacctaggccaaggtgagtaacttgttgggccataaacctcatagatgggccttgagaagaagcatgttgggccaattatcaaccagcaaaagaatgggctcagcccataaagggaaaccattgaaacaattaggtttgtgccgctatttgtcgtcaccttcatcacaggagaggtcgacagtttcaagctccacaacagtatcaagttttcctgtggctcaaagatgaggcgtcggaggtacaatgtaagcacatgtggaggtgcaagccttgcaatcgacgatgtccggtgagcagaatctttggaggaagccaataaagacgtagatctatagactccaagagatgcggtgaggcaagtctcagtttttcaaggtgtagtgccgctgggttatgagcagagattaggtcaaaaggtaattttcgggaagacgcctcctttctccgtcatagatcttagagctttagaaaagttaaataaaagtggaaaaaactcataaacgtttgagaggggaaagtaaaagaagccaagacaagagatccgagaggagttgaagatgcaacaaaaaggaaaggaagagaacaagtctcgacgccggcaagcaatggctccgccagtgttagaaagcattgttgaaagaggtttttcgatacttgagcctgagagcgttttctagtaattttgttggaaagtcattaaatattgaatttcctatgagaagatatatgttctctctctctatctcatgttccttaaccaaagccaaaaaaaagttcttgctatcaaaggtaatggagcttatacttttgttgctgactctactcttggttctggttttgcacatgaaccacctaccctgcctaaagaataatgtatgatattttttcttgttttttttaatgttaggtcatttgatattgatttatttttcttttgtagtgcaggtcttaaaaatagtcggagagaagttaatgaagactagttggaacttcactgtgaatcccagtgatgtttcaaagagtggagtatggagaaatcttacaactccagaaggatctgaagatatcgtatatgcagctgcaacagaactatatgccatgtaaaacttatatttgtgtgatatttcatgtttaatttgtatatattgctttaactatagtttatagataaaactaaataggaaattaaaactttaagttgtatttattttagtaatattgtttgttttgtttaatgtttaagattgtataattgtattttgattgttaattctaggatttcacccataatatattaaattgtattaatatcgacataaacctgttctatcatataaccctatctcgtaaaatttaatattatttttttatttttttataaaggtcaacaatataatatttgaaaattcatataagtttaatatcaactcaaacttcataattatattttttaccaaaaaaaaaacatttactaataatattttgattgttacatttaggatatcacccgtaatataacttcatgtattaatatatttactagattttaatccacggtactaaatctttttaaaaaagtaaaaaatttacttgtttagaagatttaaaatatatatgatttaattttctgtattttctaaatgtacaactataatatctaaatattatttagtatataattactatgtttaatttttactgtttaaaaatataggaaaaataacattacagtttattaagttaaaatctagattgtaactaaataattcaaattttaattatatttgttttattaatattatttattttgtttagtatttaagataatataattgtattttgatttttatatctaggatttcacatatggtataccgtctcgtattactatcgacccaaacccgtcatatcatctaatcccgtttagtgaaactaaacatatttaatggatttcacccgtggtatagcgtcttgtattttatcgacccaaacccgtcttaccatctaacccccttcaatgaaattaaacactattttgttatttttgttttaataatactttaattgaaaagatatataatttaaatcaatttatttttttacttcaaatggttatttaattgtataaaagttcagatattataaatattataaacccgtcctaccatctaatctcgttcagtgaaattaaacattatttttttgttttttgtttaaataatagttttattaaaaaaattgtaattcaaaccaatttaaaagtttttttcaaatgattatttaatttttatagatttcacatattataaatattctaatcgtttattccgttaaatattcgaaatgtttaattaactacaatattttatcttttaatcaagtatatattaataatgtcctaaggaggggtattggataattgaattcaaaagaattaaaatgaatagaaaaataaaagattttaatgtatttgaaaaattctatccaaatcacaccataataggtgggatttgtttcttcacgtttttgtctttcatttcttttaaattctaatcaaatcacattgccattaaaacaatcttaatgttgaataacagtaaaatttaaaagaattctaaaatcaacaaattaaataacagtagaatttaatagcattctaaaaccaatcaattgaataacactagatttaaatagaattctaaattctttcatattcaattaaaatcataccttcaataacccccctaagatttctccttttttaagtaattagaattgatgaagatatattagataagggaatgttactaattaagaatattaattaattgaaaataattaatgtcaataacattttttataaataaattccaacttgaggatttatttcataaaatggctgcaaaaatgtatatgtaaatatctagcggttagacggaccggcccgcgggtatgttgaagtgtagtcggcgaatcattatacacttctctctatgtatcaccactgaagaaccttccttcattcttgaaactaataatacggctcacctattggctcctcttttttatagaggaacaaagtcagtgcttgggtttaacaaaccctaaagtcttgtcacgtgtggttaaatgaacctgtgacattctgcatcattttgaggtattgctacacttttaaaagcttaaccaaactcaaatctgcaacttcttaaacctgctacaaacagatgccttttcctttcctttcaagattaaatcatcaaccaacagtctccaccttgattctagcttgaatgacctgatgtgagttatttttaattcttgtttgaacacatttaatctcagctctatgtattgttgaatgttccacgatggttacaagtgggactaacctcttgaacttgtgtatgacggaagaataactttagacacccaccatggtttgaagcaacttgtgtacgcacacacatattacatgttgatgtttgcctttgtttcaagcatttttttagtaaatctgaagaatagttcgggtttgatcaactcttgaatttaaacagaaaacaagaatactaaaaaatacctgaaactgaaacataaaactaaaactgaattattgaaaaaaaaacttgaaactcgaacataatcacaaactcaagtactaaagataaatttaaaggatggtagtgacatggtgttgtgaacgtatggtttatacgttttgattccacatcaaaaccaaaacatattcttacaacctatactccacaaatcaacccaacaccataaaagttgttagttaagtctgcttgtctcaatgttagactagttttgaaacattatatagtcacttaattgttaaaatttacctttttaatttttaccggtaataagaaaaaattattactaaatcgatgtaaaacattttattatgtagaataacgtaatttgatagaatcaaatttcgatggaaaatatcatttttaaatatactttttaatgacaatcatattaagaatttaaaagaaaacaaaaatatctcaaattcccgatatcaaaattatattatcttcttcttttttgtttagaccatttttcaggtccgtctctaactcatggcagtgtatgacaaatgcaatgagtccattacaaaattcagaaaaattcttaaaggaaaaaggcttattttctaaaaaaaatattaaaaggttttaatcgttttttggattttgccaaaaacgcataaatatattgagatggagctgccatttcttcaataacagtgtcaaacatataacgacattcattttctagaactttagttttaaatattcagacaccacttacaaaaaaagaatatattaattaaataagaaaaagtaaacattgaacatccccatttagtcggtacgattaactcggctaaatattaaatgggcttaactagttgggcttattttaacactaaattggcccattaaaacttcccaaaatgatattggttcgagatattcgatgacgtgggcaccaataaataaacacacaggtctgctttcataccttcacgctctctcactgatcattcacaatctctctctttttacaccggcgataattttccgatcccgattataagatggcgaaggaaccagttcgtgttcttgttaccggagctgcaggtaatttcagattttaccgatcttgtttcttctatctctcgttatcgattcgtatcgccagatctttatatagcaccaatttttcataatcagaaaatttaatcgatccttgaaccatattttggattcctatactgtgatctgaagagacaaatgtattcgatcaaaatttcgctttagaaaagtagagttttggtttttcttttacttttgagtgaatcatgctataatgtgagatctaattgtttaattttttttttaaatcattgtttcataatagaatcattgttttatttttaaaaggaattttggttaaatatatttaatatattaattaattagattttaaaatgttaacttatgagtggttactctgtattagttgtgtaaaattctataaattttggtttaatattacataattataattacttatcttccttttttataagtttaatattacataattataattatttagtttcttatttttataagtttaaatttaatatttgttatttttcttttaacaagaaaatagaaaataattactctttatgttcctttttgtttgattttctaggaaaaaaattgttttaaaaagattgattttttttaagtttttaatacaatatttattaggtttttaataaaaaataattgaatattatacttttaaaattatagaaaattataaaatacagaaaataatacacttaaaattaactttaatatatttactttaaaatttatgttttttctaaacaataaaggaacaaaaagtactattttcaaaaatattaattaaataaatattaattatcgatgtggcaggataataaatcggattggataaccggccaaacatgtttcacatctcatgggtcgaatctccggtcccctccggtttaaaaatgatgggctaataacaaaagtcaaagactcaaaaaagttgttagttaagtctgcgtcgaatcacttgcaaacaatcaatagcttcatttcaatcttcggtgaacaatcaatctcgaagaagacgaacataaaattttcaatttctctgtaatcttcgcttcttgcgaaaccaattctctatgtcaggtctgtctcgttctcctccttcttcatctttcgatttctgtgcatgttcgtgttatttttccaataaagttttgatttttcgacatacccagattgtgattatgtgttagattatgctttcgggttttcaaagttatgggtagttcttgaattatgttgaagctttaggtaagggttttaaaaagctgaacttttatgtgaattgtaccaaacccttgtttaaagtttgtatttttgcaggtaatcaagaaccaatcttggtgaaagaagagagtgtggttggtataccaacaccactcttgaagcttaaaagttggcaatggtgggttcttgtatccgttaacatctttttccttattggtggtcaagctgcttcggttcttcttggtaggttttactatgatgaaggtggaaacagtaaatggatggcaactcttgttcaaacggctgcttttcctatactctatatcccgcttttgctacttccgtcttcggctagtgtagagtcttcggagagttcgtgttcactcaagtacattgttttgatctatgttttgctcggtgtgatcattgctggagataatatgttatactctgttggacttttgtacctctctgcatcgacgtattcgctcatttgcgctactcagttagctttcaacgcggtgttctcttatttcatcaatgctcagaagttcactgctttgattctcaactccgttgttctcttgtcgttctccgctgctttgatagctctcaatgatgatgcggatactccttctggtgtctccaggtctaagtatattgttgggtttgtgtgtacacttgctgcgtctgctctctattctctgttgctatctcttatgcagttctcgttcgagaagattctgaagagggagacgttttctgtggttcttgaaatgcaaatctacacttctttagtggcgacttgtgtttcggttatagggctttttgctagcggggaatggagaacgctgcatggggaaatggaaggttatcataaagggcaagcctcttatgtactgaccttggtctggacagcagttacttggcaagtgtgttctgttggagtcgtgggtttgatatttctggtgacgtcgctcttctcaaacgtcattagtacgctctctctagctgtgactccactagcagctttggttgtgttccgtgataaaatgagtggtgttaagattatggcaatgctgatcgctatttggggtttcgcttcttatgtttaccagaatcatattgatgacttgaaagtaagacaagcacgacaacaagctcaagccgggcgggtagaaccgccctgttgattctgcgatgattcaggcagaaacattaatttagaaggctatacgttctgtttagataagcaacaataattgtcactcgtaggacaagctactggtcttgccatattgtttctgaaatcaaatgtgtcgtacgaatgtatgatcaagtctaatatactggtaggtaaatggaacttcgtgaatagaccttagaattgatgaaaccaatactataactcatatggtcctatctctctatcattctgcttggttgtgttacgttatttttaaaacataaaacacatcacctctttgctttgattggctctctgatttgctatactctggcttagcttttaataatgccatggaaattggcaacttgtagagagaactcatttgctattaaactgataccgaagtgtagagatatgcatatgcttaaccaaacgcattgtttagacatgagaatggccaagaagatttccttatcgatcatcttgtttgttctaaaaaaaataccggagtttttagtgaatctgattggtcttttctaagtactaatcgacttcatccttatcaaatgtgattggtttcatcatttgagctaattatatctgattcttgtacataattttagtattcgtctctgttctctattctctattctctattcatgtattgatgttctttccttctggttttgcttctttctaatctttcaggaacagctctaaaacaaccaagaagaagattgaagatcttgtagagaagaagaagaagaagatgtagcaggacatgagaagaagaaaagcatgtgtagtttgggtaattaggtttgggcctcttaacatgtacagcccataagcaagatatcgtaaatatataattaggtttggaagtttaattgtcaaaaaaaagaaatgtcaaatataataatttaaaatttatttgattgtaaaaatgtatttgatcagtaagttaaaaattaatatggttagattaagaattaaaatataattagatgaaacatgagcatttcagtaaaaaaaaaattatcagaatcatttaaatagatcatctaactaaacaaacaaacaaagttttaaaataaaaacagatagataaatcatttagatgaaccaccaaaaattgaaacgaacattattcaaataaattagtcagatgaatcatttggatagacatcccaaatgagcaaacgaacaagtctttattttaacttgggaaatgtctttacgttaagtttgactttgtaacttacatcaataaaatgattttgtacctttagagtaattgataaaaaaaatttcttgaaatttacacttaatttgtttttagtaaatgttataagttacattggaaacactaaagaaaaaaacaactcttataaaaaccaaaacaaaatatttatatggaacaagaatttataaaaacatattttagcttaacaaataatttccaaatagtgaaaacaagaactctgtgtttccaaacaagattttaaacttggtcaaaattgaaaacgtatttgtttatatgggacaagaatttggagactacggaggaatcgatgtagtgggataaaaagattcaactttaatttttcttacaagacatataagacaagttaggttaacataagacaacaaagagactacatagagtttattaaactacaataaacacagaattaacacaaattatctaataagattagaattgtgattaggccaagagccagaaattcttctgccatcgtgtattgatcaagtacccaccaacacctttgcattgttttctcacaccaatcgttaaacaatctgcaccgttgatgcaacgattcacgagctcctctgatctgctaggtccacataagctagaaaacgacaacaaaaaatggtaagtaataattattgaaacgagagaatcatgatggggaaagaaatctgacggttgagatgacgcaccaagagatgagtggtgcagatttcttctgacccaacacaagaacagagacttcaagtttctttacttggcttaacactgttgctagctttggtccttgaatcaccaatgcctccacatccacctttttagaaatagaaattgacatattataattgtcttctcacaagttatctttttgaagatgtcacatatcttgatgcaaaaaatatattataaaattcttcaaagtaatataaaaaatcacatggaattttgcaagtaattaattataactaaaaagtggtgagttgttacattaaaaaaaaatatctcggcagtttacttagaaaatagaaaacctacaaataactctacctgattacatgttactatgttagttgtttttgaacaactttcaattttaaaatgctaagtaaagtaaatcttaaatgggtaagaacagttttcaagtaacaaaacatgtatgttaccaaactaaatatactctagatctaactaatagcgagttttaaaacattagatctaaactaagagaaaagctgcattttaattggaaaaagcttactttacagaatgaataatgatgaaagtattttctcacaatcaaaaataatttcttttgagaaaaaaaaaacaaagtaaggagctatcagtcactatgggctatggccatcacatagacatgagattctctcacgcatgcactactccaatactcaagtagttcaacacaactttacattaaccaaaaacaacaacaaaattaaaacataaatatgagattattacttctctaactaatagttttcataatccataagatatgcattaaagcttaattagaaccttttagataaaataatagtaatagtaagcttaatttttatttttttgttggagtattagtaattttaataagtacctcgggtttacaagctttgcaaagagaaccaagagattgagccaaagaaggagtagcttcatcatcaggagacacaacatgaagaagagtcactaaatctcctttgttagtcaaatgagtcaaagcccacatcatagcatgcttagacctcgaactttcatcaactacaaccatcactctcttacttctcgccgccgtgtctccaccggagtaaactccataaagaccctccattgatgagtaaccaccaccacttgtgtcgtcgttgaaggctgttgagctatctccggaagtccaccttttagaagccgatctccaaccttcttttcggcttagttgcctaaggattgagtttcttgaaaattgcatctttggagggtatatagtgatgggagctcgaagctttttatgtagtgaatgaaagagagagagaagaagtagtagtaggtagtaggagactatagtagagagagagagaaagtgaagaggctttggtgtaaaactcgaaaatgtgaaaatggtaagagaagaaaaagagagatttaattggtagtagctaataaagagtgagcgacagggcattaagggtgaatcatgtgcccacaataaagtgtgttatttaattgctaaactttaagcaaccaacatttttttgtttttaataaaaattttgtttggtttagtttagtttttggaattggaatttgcaattctaaaacgtccattttatgtaaaccgaaataaaaatcttagttagaacttagaagattttggattcgtttggtttatttgggctaaaagtacaactagtaagagacctagagaataggcttttcttcaaaatagttttaaaagtttgtcattttttatttaccatttcaacaatgtcactctttttacagtcgccaaaacacaataatggagcacaactattatgaaatatatagtcaatgcaaatggtgggacttcatatttagtcgattttgattttgtaatgaatgatgtttttacgacgataacggttaggttttgatcttggctttcttaatttttttgcatgtatgaatacgactaatatggagctgaaattggaagcaattacacatgaagacttttacaagtttccctatttttcttaagggtacgtctcgatgagtcatattcacaatttcactaagactttcaatacgttacatagagttgatatcaattctatcttctgaccttagagatacaagattacaaagaaaaaaaggcaaggaacaagaagtattgttcaaataagaatattttgcttcgactatgtttggatgcttataactattttagcaaattttagattcggcgattttaagggtttatgatcactttcttttctagaaaagcaagattcggtctaaatcttatcatttaactcaaaccaatctaatcaatacatattggctttgaatggatgttgtagttagtgcggattaatccgtcagcggtctagtccatactaattttggggcggagaacaaaccaatgcggacttagtttaaagacaatccgcagttagttcgcagttagtttgcattggttttgttttatttttttggatccgtaccattacgactatagtttgtaaatggtaaataaaaagcaatccggtgtatagacggttttgtccgcttgaaccgctataaccattcaaagccattatcaacaatggagtactttggaacctacgattagcggctgcggctctaccctaaactcacccgaaactttgatatggtgatacattactccttaattcattttagaaagtacatttatataaaaaaatcatcttacgtattcaagaatcgaaaaggcatgttgcgttctatagaagggaggtcggtggtcgccaaaataacttgtcctttttgcttggttggcagcctcactcatggacttcttttgtgtcctagttacatttttattttctagggtgcactttagatctcttcaaaacgttagtatatcgtaatattttactattccattaccctaattcttttttttattggaaaagtaactcataatattagatcacaccaaatagctagaaaataaacaatcatggtgctggtgaagcatatcgtcattcaaatcaatcatggtgatctaatttccatgctgacttatgatagttttattaattttgcttaccttagctcttgcttcatctttcatagttttctctatgatctagtaacattttagaaatttatgcatccggttgcccaaatagaaagaaatatatatatatatgcaccctaaccatatagtttcaaatttttatatgcttaattaaatcatcaaattattatatttaatttagcctccaaaattttcaaagagaacctcccaaccatattagtttttagataaagaatggtcatatctcttgtttttgagttttgaaagtggaatagagaaaatatctacattgtgaaatctcattaattattttcttctatgtcttaatatgtttacattgattgatttggccatttggggttgaaacgaaccacactagtatcacacgaacttgtatccgatttttccactcgttatatgttgttgaccggtaggtttggatgttgccacaatgccactcaaaaagtgaaccaacacgagctttagttttgttttatttataaagaacacgggtttgttcatgcaaagttgaattatataaattggaaatttgttaacatatcaaatcatacatcaatgacaatacatcaatacacgtaagtcatattatatagggtggtccagaaaatgagaagaaaggatcttatctctaaccccattaaacgtatatcggttactttatacgtacgtaaatttatgggtttcatatatgtgtcagattacctcattcacattttgctttcatatctcgtgtcctcttctcccctttcatcgtccaacacttgtatttttcctttggacttttttgcttttttgttttgtcctcatatatctagtgtttcaacaagctaatcacacacaaataagatcgaagggctcaacattagtacatttcataaccttaatttagtgcaccaaccaagagcctccatgtatgtataaatatgagtagctaataagtttcgtttgataaaatcatgattttaacaagccatgcaaatacaaacttattttattgtaaccaattcatgaagagagttgcatattttatgactaaaataggacaacattaaaggtactcgaataatgtaatatttcaaacatgttgaccaattagatggtcaaataataaatccaattcaaacacgcagacttctatgatattaagtactaacccatgtgttttcttctaaattacttcataacaataataaaatgtttgttgatcagtctcttcattaaatattcaacaagagtaatatgtaatactgtataatagtaatgtgacctatgtgacacgttaagggtaaaatattggaagtgaaaagaataggaaaataattatcaattacagatttggatacaggtgggagggtaaatagatttttttgtgtataaattacagaattgtttgcttctgcatcttccttcattcacttgtcagattcaaaaccagtaaagaatcatttatcctgacaccacttcttaccacacaaaattccaatataatttcacaataacattataaaaacgcaaaaggcaaaaaaaaaaaaaacattataacaattcttatgaaaacaaactctatttataattgcatttaaatgtataatcacaacacaaaaatgcatgtagtttactaagaaaataagactccttaatgtatctaaagtattttaatatggtatttagtttttattctcccaaccgatgttattgaatttttagactgaaaatataactatgcgagttataattattttttatttttttttgagttatatttttagatgttggaattgtcagaaccttttacatatgtataaattaatgtccagcaaaacaatattaacttaacattcattttgaagtcagattattagtgttatatatgatttgtatcgacatagaaattagaaagcatgaaacatatatatgagagtaattagctcaattgaaggagactacattatctacactaacttatattaaatttcaaaccacagtttacttgaagaaaaatattttgctatggcgaatgcaacatgttaacttaagaacattttgtgtctaagagagtttaccattaaaagtagtagaacttgcaattttaggttttttttttgttgagcttgtacctaattactaaataaatataaattgaaatgttttggtcttttggagtatgtggggaatttcttttttttttttcgttttttttaccaacaaagaacctctattattgacatggacgaaaataaatgaagtactctagtaacgtacagaggctgtaaatttggtttttcgtcaacgtcaataattatttgtgctgctgtacgtttctacgtattaattatatctaattatcggtgatgtaacttgcaaggtcctcgtgaattgagccatataacgtaaactcttccctttttttattttcctttcatgaaagtatattagaaaaacataggaagattacaacatcaactacaaatatttaaagggtgtgaatggttacggcggttggggcggacacaaccgtcaatggatcaaaccgctttttatttatcattcatcaattataatccgtagtggtccggaaaaaaaaattgaagaaaactgcagcggaccatttgcggaccgttttttcatacaaataaacttagtccgcaacggtttattgtccgcccaaaaaatgagagggactaaaccgcagacaaattagaccgctttgtccgctgcctccattcataaagttttagaaagttagcggacgaacaatatacaaatgtcttttttttttgcaattaaattttacatttgattagaactttcaagattataagaaccggtgaaaaataaagaaattctcgaaaccaaaacccaagagaaggaacgcaaagtgggcaggagaaaaaccaaatttggataatataatatctcttaaaactaagaaaatcagaaatttaaactgagataaaacaagagtgataaaagcctagaaatgaaaaatatatctaacgggtatgaaaatattaacagtgatatattttatgatcgtattcgtttctagaaattggatatctatccttttttttaaaatccctaagcgttaatcggttgatcggtataggtttagcgattaatcaaaaaaccgtattaaaatcggaaattaatcggaactagttttagagttattttaatattttaaaaatatattaatttaatattgttttcaaaattataataaatacataaaactatatttttaaggtaaaatttatgattttaattaaaattttaaataaaaaaattagaaactctcaaactaaatgactaaatagtaaaaagaaaaattgttttatacttgcgatctaaagtagttaggatatacaaaattaggcaaaaattaatcagaaagaaataagattaaacgaaaaataataaaataactaattttttaaaatattagtcattagagacagatggaatgagcgtaacgattaagtggagattaatcgcggtaggctggaatttgtagaatagagatacttatgatcctactatattatttgggaagtacattttaaatgtaaccttaatttttgtaagtaattacatagatataccattagaaataaaattttaaagagtaaattaatttatctctttaaggattaaaaagtcaaatactaaattattaaaaaacgaaagacattattaatttccaaaaataataaccaatcaacatataagatttgatatctaaattttaattaatttaatttaattagaaaaacgaaataattattaatttccaaaaaactaaccaattaaaatcaacaaattatatttgatatctaaattatcatattaattttttattaattattatagttcacttctcatctttatatgattttatttttggggaaaaataatatcatcattataaaaaaataattagagttatttcgcatatgccacaatttgaattttcaaaatcgaatataaactgttcaatacatgaaaaaatattataacgggtgaaaaatagatttaagaaaaatttctactgagtaacgggtcataatttgaaatatttatattcaatttcatacatattacattgaaaatttataatcttatatactacaataattaataacatattagatgtgattcaatttttaatacaagctttttaatacaagctggaaaatcgtagaattgacgggtttagatcgatattaatacaagatagaatactacaggtaaaactcttaaattaacaatcaaactacaagtgaataatcttaaacactaaacaatatagataatatcaacaaaacagatacaactcatagtttactatacatttaaaataaaataaaataatatcatatatttttaaatcatctttacaataaaagtttttagtttaactaaaatataagcttacctgcggtatactgcaggttaatatctagattatagggcttattggatctaaagacgggtcatcaaagatttcctaaactgaagcaaaatatactgaatattcaaatatctatctgttaccaaattataaacaaataagtcaatttaatattttatatacgaaatcaattaaatcttaatcacattaaaattagcacaaaaaaaaagtattcaacaattaaaaaattatcaaatctctgtgttatataagttttgatactatattcgaataatgtaatataccttttcaatttgtattctttaactaatttaagctaactaatatatttgctaatcttatacctatcaaaaccgactatcgtttcttatctctatagtatttttgcaagacttttttggtggatttggataaaagtgcattcgggtcatatggtacattcccctattaaataaatatggtgcactcatatgttattagctaaaatgtttagaatataattcagaggcatatcattaataaaattaatattaataaaataaataactttttagcaagacgaatttggaaggacgggtttttgaatcaacattaataaaaaagtaaaatataattaatccactgtttcaatacgggttaaatctttaatttattattttttaagaccactaatattaaacatatcaaatcatcctaatttagaaaagattatataaaactaaaaatgttatgtggtatgtataatgttagtatatataaaattaaagaataaaatataaatgtattagagaatgatacaatttgcaaaacttttatatataaaaaataattcttaaattttaaaaattactactaaaaaaaaaaatcacgggacgggtaaaacaattacagaacgggttttattttggaattgggttatatggtggatgtatttgaatcaatatttataaaattttaaaattttattaatatgttgttttaataaggattaaaacttcagtttttttaacaattgtctcatcgattcgtggtatagcgttacttaataataattataaactataaaataaaaatattttaataaaataaaatttgcaagctttaatatatattacttttaaaaaataaatcgtcctgcgatataccgcggattaaaatctagtatacctaaagctggaaggctacaccaaaattcaatacatttctaacgggtatgaaaatcatatgcaacaaatagttcctttgtaacacatttaattatataatattttgaccactaaaacacagtacatttatattaatatgttttataattgatgatattaagatgagacatataatcattataaaaaaaaccctcacatatcagatccttcaacaacaaaaaacactaacatatcgtttatagaaattgcaaacctatgatataattaatttaatatgatcgtattcgtactcaaaaagtttttattatatttttatgtcacaacatggatcataattaagattttattctagtattatatcatcttttatatatatatatatatatatatatatatataaagaatatagaaaacgtcacggattatatagatgtacatatacgagatacctaatactaaaaattagttttggcggaaagtgtgagaatagaaacgaattaagtgtaatggtgttacactcttattatgtgtcagccttttcttcaacccgtgatgcttcctcggaatctaactcatcattgtcactcatttcttatttatctttttttctatattttcttatgcattttttaaatataatttatatgtaatcttttattattttttttaaaaactacataaattgaacacacccctctttttttttaatttaaacacttttttttgttgctcaatttaacattttcagtaggatgttttttgtttgtatctattatgtttttacacacaaaaagcagtgtggatggaaatttacatctaaatttatgtatatatataaatcaaaatattcttacaaaatttattaataaaaacaccaaaattatcttatgaacaacttgtaatatttttggctagattataaattttgcattgatgtagcggaacaaacaaaaaattgcaaaattgatttttctacattagagtaataattagaattttgattattgatatttgaaaaaattggttgatacgaatccacttttcagtcctctctcatgcaagtgtttctggcaaataaccagaattttttgtttgtttgttagtacttcgtttttatccagatacatagtgattgattgatgttttggtaagtgcttgtattttttctaaacacttgaacccaagttgtgttgttatagctctactcgatatagttcttgtctttgacatcaaatgcaaattggaagatttcgctattatgtctattagtgagtcacaacctcaattcaaaactaaatattgaactaatggtgctcggttacactggttaactcttaattactcggttacactggttaactcttaattactcggtttaactaaatcgtttacaatgacacagtctaataccaaagatgagaatcactcaccatggctctttcgctgtaccctaaacggctaaacctcaataatagcaattagcacgtgatagggctttttgtgtatactacataacgccgggtcacaaccttaataaagctatgtttcctggctagattgaccaaagtttatggtctccttcgcatataatagatggtttatgttcaaaaactagccacaatgatacctattaggagacttcacatatacaaaccaagctatcaagtagtttgattctaatccccagacacttgttttcaggtctgttgtcggtctttgataagtagagtaactgcaaacattgttcgatattcacaaattgtctgcgtttataaacgagaatcaaagaacaaatgtcgaatttgaaatcaatatgaaatacaacattgatcaaaccctatttacactatttacacacgcaatgctattaatttaaaaacagagtctcgcacagaaagacaaacccaaagatagttgaagatcatcattcccactttcatcgcattagatagacctcttataactttcaaagagccctaagaacaaccttgctggtcgcatgaacacccttagcagctatcttcagcacaccacgagcttggtataacctgaaagcaacgccaaagatgctattaaacttgttctaaatatttgtgtttcaacatcttagcaaaaaatcaaacataccctccaaatgcaagtccccaagtggacagtgtgtagaacattttcccagcatgccatatatccactaccttccctaccttgctcagagcagtaacttcttgcaccaaaactgtaaaattaagcaggtcgataagccacgtaaagaaactagaaattaccagtaagattgttggcaaaaagctaatagtaaccccgaatataccgctaattcttcccactgtttttattagtaacaactaaattggtatactagggattaccaatcaaaccctatacattcgggaactgtaagacacatagctaatagttaccctgaatataacagtcgagaagcaacataaacaaactagagattactagtaactgtaagattggtgacacaacacagtaatagtattctagcaggaaaagagcgctaagtgctagagaatagtaaccccgtatataccgctaacttcccacttatgtgattgatgttataatcgggttaccaatcaatgtctatatatgtcatcgagctgaatagtaacttacgtttctgaagctcttcaggtttgagattctgtaatttgaaaccagtagctaaagtgaacataagatttgaagtaatgaaaagccaaaattgaatactcaaagtaactaaagatacgaatacgaaaccttagctttgggatttgacataatacatttagccaaaaagtgagcaacagcatcaatcacatgttcttcattcacaacaatgtaatgttcgttatcgatcgcgctttgttcctcgacattactaggaaccatatcatcagtaactaaaacccaccaacttggctcttgatgatccatctctataagaacttcaacagtcttcacatcatcttctacacaaatcaacccatcaacacaaatttcttctaaatccctccaaatcgaatttcaaaatcatcataaacaaacctgttggttccttgaatggaaattgattctgagttccattagataaagcttgtcttagattctctaatctagccaagaaatctcttgaagtaaccatcgttacaagcctagcatagagctgaattttgcaatttcaaccaaatttgttaacaaatccctaaaaatttcgattgaaattgaatttgttgatatatgcttacgtcgctagggcaatcatgagagaacgcagcagattcagcgagagtctcaaagagtttaagattcgattcaagcaaagtcctgagacgacgattctcttgacgaagagcttctaattcacgatctcgtggatcagaaattggattcgttgactcgtgattttcgtcttggtggtggtggtggtgatggtaagtttccaccgcggtccatgctacgtcggctacttccagcaccgtcttcgtcacttcgatcgcgtggtgactcgtcatggttttgatcttcttcttcttcttcaccgtctccttctcgaaaatctggataatgataaattctaaaggaaactacttgtcgtttgcgtgtttagaaacgacaagcaagctttatatattaatcattaaaatataattttttgttttattaccaaatacgtccttctctactaacgtatttcagaattctaccattttatagactgcttaccgttttggttttacttttagaaacatcttggcgttttcctttctcgctgaggttttacattaacgagaatattatttattttcactcacactttcagagtgagaaatatctggtgactcggcggttacggcgatggagacggcggagatgaatcataattccggtaagagtaatttgaagaacgttgatgcaacggagatcgagttcaagattctggcggctttgcgatcacgcgtaacctacctcagaaatgaagcagagtagaaatctttgtctctcaacctctttctctaaaccctaacatcgtaaattctctgtgtgatattgtgtacgtttgattgttttaaaggcattggtgatatacatttctgatttggattagggttttgatttcagtgatgtatctgtataaagcatttcgtcagaagatttatgaatagtggaatgatttgtagttttgatttcacagctgcttcaccttggtgagtgtgaggaggatgttagaggaagatattggattggagaaatgtgatttggatgtgtataagagctttgttaaagagcatttggttaaggtatctttgtgttttcatggttgaagcaagataataattcttctggtatgtttcctttttgaaagcaccgttgtttcctttttgatgtcagtgtttagaagaagctgggaataatgatacttcggagaattctcaagaaactgagagggaagacgatgagattccaactaaagaagtagcagaacaatctgaagagcacgagccaatgaacgatgctggtgaagagaacacatcgaaaagggaagctaaagatgtgaagggcaagggaaataaagaaaccctgcagagggatataaagagagcccttcggaagagagcttcatatattaaggctaattcagagtaagttaataaatgaagttctgaagtttcctctttcatgacttgagaaataaacttttctgtttagtaatggcttgctttatttttcaggacaattacaatggcttcacttcgtcgacttctagaggaagatcttaaattagagaaggagtctcttgatctatttaagaagttcattaacaaagaattggatgaagtgagtactttaagttggttatgtaatctcttgagtataagtgagattcaagtttttttgatacttttattggctaattaggtactacaacttcctgatgctcctaaatgttcgactgagtctattgtgaaaaatgtgaagaaaaaggtcaagagcacaccatctaagatggtaagcagtgaatacaattctgattcagatactgaggggaatgtggacaacgaggaggtagctgtaaagaagacaatggcccgaaaagttaaattatcaaaaccagagatgatgggaaaacggaaaagtgaaaatggtaaacaagtatctggaagaaagaaagcaaaacatacagaaatagattcagagaatgacagtgattcaggggatagtgaaaaatctttgaaggtataacatcttggttgtgatttttatctcaatttccattaaaactaatgtgtttctgcttttatgttatacaacagcagactaaggagactgcaactgatgtgtatggaaagcgtgttgagcatctcaaatcagtcatcaaatcttgtgggatgaggtttctaccaaacttggtatatctttaagaagttctgtatttgttcatattccatgcattttattgttttattattttttcgtggcagtgttcctccaaacatttacaagaaagccaaacaggctcctcaagagaaacgtgaggctatgctaatagaagaacttgagcagatacttgccaaagaagggctgtcttcagatccttcagcgctaggtagtgtttcgctcagaattgatttcttttgcgtggagagaaacttatatcttccatctttagagttcagtagtttttttctgaatgattcttaattcaacttctgaatatgttaacccgaataagcatgctgatgtttgttttctatctggtaaatgtgtgatgaacatactatgaacaaactatctggctttactctgacagagatcaaagaagtaaaaaagaggaagaatatatcaagagagcttgagggtattgatacaaacaacattgtatggaactcaaggagaagatcctccacaagtttcgcgcctcctccaaaaccgaaagtaacagcggaaagcgagagcgagagtgatgaaccggaagattctgagaatgaagaggaaagtaatgaaaaagctgagagaggaagccaaagcgaagaagtagaagaagaatcaaacagcggtgagaatctatatctcacatctaaatgaccaacgggtcaaattttgaaactgatgatccttgactttctttgcagaagaggatgatggtggagaagaaagcgattgaattaacgattatctctgactcagtgattggtggagaagaaagcgaatgatttaaccattttgttcttttagcctttcaagattaggatgaatattaagcaggtaatatgtcaaacttttaactatagtgataactaagtgggaatcccagactctggttacaacttgaggaatcttatgccgaatcactgaatgtttttgatacccactcaatgatgtgatcaaatatgataaagaagagagttgattgatagtgataacagattcaattgggggatgcaaaatgcatctcttaaaaattgggttttgttcttttcggataaatcgaaaagaagctgtgaatctagacattgttggcggtggcggcggtggcatcaatgtctaactcttcggattctgaaagaatgtgcctaacttggtttgcaagatctgtgacatgtttatctttaaaccctgattggtatcaaagaacagaaaacaaggtttggtactttgtaatctgaaagactgaaaccaaagattactgagtaattggtaaaagttagtttaccgagttgagcaagagcctcttcgaggttgaagagatagtctctgtttggccctgaaggtcctttcgctttaactatctgtctgcgtaaacacaagcaaaacgcaagaaacgacttgtcaaatgcaatctttgaagaagctaaaaaaacaaagccacctacttggcaatatcttcaagaggagctggtcctaagtagttgttgttgctcttcttgtcaggtgaagctatgtacctgaacaaataaagaagatatatatcgacattgttactcgtttacatatataccgacgtgatgtaatcgtatgcgtttcttacaccattactcctgccacagccggttccgaagcattagagtcctgctacaaacaaagtaaccattgtcacacacacccaaagaagaaaaagaaacagagaacaaaatagactcacagtgaagaaatcaagatactctttctgatcatattgcttctccctcacttccaaatgctgacaacacaaacaaacaacataaatgtctttttggtcatgattgcaacaaaagagagtaatcacttaccaataaagcatctcttttatcttcctctttagttatcttgtaagcaactccacactatgtgctctccatttgcaaacaacataaacaaattaaaccaaagaagttgaatagagtacttatcatcaattggatcataaagatacttacacaaacttcttcatgagcagcttctaatgtcactgttcttcccggaaaatccggagttcctctatgatcagtactacctaaattccgtttccaacgttactatacaacttaagatcataatcaagattatgtgataaagatggagaaagatagagagagaccttgatggaagacacggcgatagcctttaatgaaaccagggaggctttcgtcgaaaggaaaacccgttttccatattaaagatccgtacccgaatacccacatcgccatttttaccggtgatgtagagaaagtgagagatccgattggagaagaaagaaagaaggataaatgaaccaattaccacatgtttctcacgtgtcattactttaacgagttatagaacaaatccctctattttgtttagcatctaaattttgaccctaaacttttgagattataaatttgaccatggtgagagaaagtgagatccatcattaggatacgacaaagacaagtgacccaattaatatatgtttcttgttttaacaagttacaaaacaaatataaaacccttttattttgtgtaatatccaaatttagaccctaagattcttggattaattgtattttgactatttgttgtttgttttcgtaggcgtaattttaagagatacgttacacaattagtacatgtttcttattttagcaagttatacacaacaaaaactaacctctttattatgtataacatccaaatttcgaccatagtttcttggagttataagagttacccttttttttgttaagtaggctcaaattttaccaaatgatgcattcatcattcgttttggaaatttcaaatacaagaaagtagaagcagaaaatcattacataaggtaaaaagatactaaaagttaagcgtagatcgattagaaaatgtaaaagaaaaaacacaaaaacaacaagaaagataatcaaaacttccacctccaatgcatggagatgagatctttgtttaagtatctttcttctcttttgggacttggatcaggtactggtaaccacaccgttagtcggtgctcccgagacatcgtgaccgttcgtttgtttgactacgttagtaatcggaagctcttgggacttggctacgattttctcatccaaaggattcacttcgtctttacttttaccccataccacactgtatagtccaagcactatgaaaaccgccccgattatgctgaaatttacaatattataccattcaaaacgttagtaatgtatcacttaatttaatcttgaattatgaagatttggttaatgtgacttttactaccttccgagatggattttctcagccaaaaccaatgcaccgaggaaggcagtgatgatcatacacataggactaaacgacgtcgtaaaaaccggtccacgttgcttaatcacaatgctttgtatgtaataagctattcccgaacaaaccactccctaaaaatatacaacataataagtttcagtgaacacattaattagtgttagtgtttattaacttgattagtatagatgattaacttacagagtaaaccgcggcgagtgtccctgaatccatgccgattttccatgcactcgggtcacgaaccattattagcgaagcaatagcgtttaggatcgtccctatcccacatatcaacgttactagtgatagctcagctggatagacttttaatgtgtatgactgcaaaaaatggttttctaatttatcaatataatttttctcaaaatgtaaaaaatttatgattgattaattacctgtaaaatgaagaaagcagcccatgtagagatactgcccataatggctatggttccaaggacccaatgttggccggtgggtgtgctgctcgaaccaccgtggaaagaattatgtgcggccttcacaatctcaatggccggacctttgtacaaagtcatgatcattgctcctccaaccgttattaccgttcctaccacttttgcaacactgtggacctttctaaagttcaccgtctcaagcctaaataatatgagaagttgtgttagaacaactactaaattggttggttcactaatagtaatgttttggccaactaatcattttaaataactacgtataaacatttgaaaataatataaattactcggggattaaatggcaattcatgtctagaaagtcttaaataatctggttaataatttactaatgtctagcaatattatgattaagtaagtcattagaagaaaatgtttttgagtgaaagtaagtacctgaaaatgagggcgagaatgaaggtgacggcgggaagtgcattggtaaaggcagaagtgtacgatgctgatgtgtttttcaatcctatgtagtacaaattctggtccatgaggggcctgaaatcattcacaaataaatacaaattattattgttgtttttttaattacatagccttttcacatcatctttttgtttgtgcaataataagtagatgctttttccaaagatcaaaaggtaaacgtgtacgtaggataacatgtaggccaaacattcacattaaagatgtttgttgtgggtgctgatctcattcccaatcaataatcaatactatattaccaatttcattcatttgtttctacattttcacggtaaattttttaatcaaaataaatactatgtgataatagataattatatattttacttgtaaatcaatttttcaaacaagaaaaaaaaatctattttgtatgttcaactctagacgaattttggtatatgtttatcgtaatagtagaattgtttaaacgttaaacaatctctgactataactctaattatgactgacgaatacctaaaccaaaatcatattttatatgagtttagtttttttttgggtacgatatgtgagtatgtattccatctccataagtaacgtacccgaattagcatgataaagtaacgtacccgaacacatgaatttgccatcacaactataaaaagtaacttttgatttttacaccgtatttattattaattagttataagatttcttcatgtacgaaaacaatgttttctatatacaaagccttactatatccaaatttttttgtttgataaatattacgaaaacctttaaaagttgtatgaaccgaactttctaattgtaaagcagaaaagatggttttctaatgaaagagacttactctaatattccaagagcaagaagcctccagaatattgctagtgtcatcttgggcctaattttcctgcaaacatacaattattaaaataagtattctcatatctatgcatgcatgtacatagatgtggataatatgtgtttgtagttgtacctctcgaacatgagagcaaagggagccatgacaaccgtggctacgacatgacggtatgtagcaagaacccaatggtccatgccatgtttgaacgagaccatggtgatgatgtacatgcctgcatacccaaattgcagtgaaattatcgccaatatcggcttaattttctccatgcttccacctttcatctttattacttaatcaagaatataacactactatatctaagtttatgtgtgtaatatataactctaccactctcttctctttatattgatgagagttgtttggtgagtgatgagataagctctatttgtttgaggcaggcaaaacctaatgggagatgactcctttttatagtcgagcaaaagttagaataaaaaaaatacactcattattttgttaactcaataatacgtctacgtatcttttggaatattttaatgaactagtgtttacactttagagatatgaataagttaacagaaaaatatgtcttacatagttatttacttttacatatgcatgtcagcatatcatttatataagaattcattttggaatttgttattagctttttcttttccctttagacgatttcaaagtagagaaatataatcaaaattgcaaatcttgtatacatacatggtgtgattcttttatttcaatgcgtaacacgtgttcgcattatattaaagttgatatatcacatagttttgtatgatatcaagtagtaggtggtaaggtgattgtgtgtgcatacacatttgtaactttttacaatatagtacaagaatatatttgtaactctctccacattaatatataattaatttctgatcttttttttcagaaacaagttacttctcattttctcagttctttacggagtcaggatgttttctaacataagcgtgtaatttaaatcataccaaataaaaataactaatgctataagcaaaactcgaagaatggttgcatattttgcagatcatcgagtttttataaattacatgaatatttggtttactatcacatgcacatcatcatgggtcgattgtggtggaaaccagacttgtctatgactttggcggaagatcgggaaacaatattttgtagttaaagagctggttctaagatttatggggctttgaaggccaaatgaatatatgtatatatatatggttcaagggccaaataatttctacataataactcgttaaaatttggaatttttggaaaatacttttttttgtagaatcatggatggccgtaaatttatcacaactttaaatatgacattatatatcattgaatgatagataggtcagagcaaaatttgtgactagttagcaacacaatgactacaaatctatttgtggttagttagctaccgactgactacaaatttactttggatgtgttttactttcattcgtggacatgcaactttttccgccggccacgaaaatttatggaatcactcgtggttaaaatgaaaagaaaatgacctaattggaaaagaaaacaagaaagtatttcgtattcgtattatcgtatacgtatttttttcaggtttatagacatgacattaacattacgtataaacacacacaaaagtatgatgcctaagtcaggtgccaagaaattagaagtttgctaggtactagtattaattttcctaatcctaacggtctcgtatatttcctttcaagttaataaataggtacaacaatcataaatatctctacacaaaggtaagccgcgtaagtcaaaccctaaagcaattaggattttgatatgtgtactataattagttgtcttaatccgactagattaaatatcacatctttagacgcaaaatgcgtattaatgcatgtccaattcgtaacgttcaatagtttttttagaataaaatagataaaaggagattcccctattcattgaagacaaaattataccaaccctttataatcttatactattatgatttgtttgttaaatacaagtacacgaccatacatctacctcgtgtgaattagaatccctaatgttttgctagaactaaatgatatagatgaataatgttgcctacatacaaaaaaagaggtttagacgttaaagtagttaatcattgattaatgtgtctccaattcaacttagatttatcatatgtatagtcatgcatgtttaagaattagatagactcttcttctataaatgaatggttacgaaatagaataaaaatttaaattaaagagggagaagaaagagagagaggggaagtgtttaactcaagtggatctcttgctaaacaataatacaatgccatttaattttcaattttaaatttgttttccaaattttatttgaatttatggaaatgtgttttgttgttattttgcccttttaaatatgtttaatattgaagtggggttttgacacattgaccaccaaatgctttatagtcttagtgcttctccgtgacgcaattaatttccttttcattctcacattcactttggtttgttattccaacttttattttcctaaaatctctttttaaccatttaaagaaagtatttgaattgacataaataaccaataatcaaaaattatccttttatattcgggagaaaacgtgtatatgtgatccaaaatgtctttagaaggctagctaactgcaaaaaaaaagaaattaattttgttagatatattcatagttagatattattgatttggcaactataattttttttcttttaggttaagcaaaagacaaaatggaagagttcgttcggtggtggtgcgaggagtggattccatactgtctaaatgataaaggggtttaatcattgttcccttggatgattttttaatttatttctttgagtcactttgatcttttgggtttagttttagtcacttaaattattcataagatattagatacgaatacgacgacaaaaattcattagatttgcatatatgctcccttataatttcataatttgtgtaaataattcagtaaaacatttgtgtttcatttatttattttagtcactttgatcttttggttttagttttagtcacataatcaactattcatagatgtattacttttttgcttactagatatgattcggacgaacaacatttgttagattttcagatatgctcccttctaatttcataatttatttaaacaatttggtagaaacatttgtgttactaccgttgctgcaatatcatcaaattttaaatctgaataaaattgttgttgaaatttttttatagagaaaattctttaataaatttagagatttgatattataatcaattctacaagaaaaatgctgatacaattatatatatatatatatatatatatatatatagaaatattaaaaaaatcactaagtaacattatacgtgatgcacattatatgggcttgaattcgtagtgatatatacgacgattctgctaactacatgtacgatcatataagaaactgttgaacgtttatgtaatcaggtttgtatatatcaatgttgattattgaggaaaaaaaaagaagaaccaagattgataagaaagttatgttaactctatgtcggcaccagaggcttctcttggggactttgggtgatatgtgattctctgagagaggaaaagacaacgcgactcctacgttgtcgtttaaaagattcagtggagttatcgtcactacgaactatatcggtcgttcaaggcttattttcaaaagaacattttagtcttttgcataatttacggttttattttggttaagtaaaaaaccaatgaaagtcgatagaaagtttctttgaaaaatgtaattttaaccgaaaatactggttaaatatagaattcagtgtttgtgtgtgtattcgcaagtgactaaaaagattgaagtaaaataaacaggatctatatcaagcaaaaattcaacaataaaaaaaggatattgcatgtgaacaaaaaacgaaaagaaaagattatggataattaaaagggttatttataaacgtaaaaccttttttcttttataaatgtggcatatatatacactgagggaacatgatctggtgataaagatattcagcttcgatatgtctagttttagatacatgtgacctaaggatacgatacgatggttgctatatgtaagatgtgatatttcacaaattttttgtcagcaattattcttattcatattcttatagaagatttgattgtttttttttttctgttttgttccctcaatgtcaactaaaattctttctgaataaagaaacaaatatacggattaacaaaatgcgattagagtggaagttttgttgttcgttccttaattccacactatacatttgctttttaaggagtgaatggggttagacaacgtacgaatacatataatatagaatgacatgtataacatcatatttgacacacgtagatagttcatatagctactgaactaacatggtctattataggtaaaatgagtaaagacattatcaattttacgtttgtaattttaattaaagattcataatcatttcatatcttgatatgtaggagtgtgggactcttaagtcttaacttcatcaaatcctaacaataccaatactgaattttatagttatatagtatctaacacactcttgtatttgctcaaagaatgttccaactatttagataaattgaaaacaaaatatttagctttattcccttagaaagtttttagtagaaggaaacgtaaaatttttaaaaagaggggcaatggagaattatgtagaaggagaagctgagtgggggaaataagagaagttagagaaggtggtgctctcgaattaggattccaacagaggtaagtgggatgcccaaatttgggaaccatcttgtttcttactttctttgtctacttttcataaaaattattattctcggtttatcttgttttaattacgtcagtgaaactttattgtttctcttagttgatttctattagtctttattcacatgatgtttggcttatcaatatacgcgtgtgaagaatgaggaaattttcgttttcgtcaagaattggtatccatttctaatgacctttagcttggacatattaatgtgatcaaatctttgttactactaatttaatggataaaaatgtatggattcaagatttgttttgatgattgcttaacgctaataacaaaatcgaggtcaaaatcatcgtaaaaatagaacgaatttaaattagagaaagattttttttttttttgcgaaccaaactttagttttacatgaaaatgttcaactaaaaattttaaattataaatgatgtgttcttaaatattgtagctaagagtatttacttaaataagatatattaaaacgtaaaacagagaataaaaaattatataatatttggccctcgtttttttttaaccacacccatcttcgaattagagatacaacatacgcctcaattgtttcatgattttttttttttgtttttttgcaccatttacatgtgaatgctttgtttgacatagaaactatttttaacctttccaaaaatatattaaagtgcaaacgcacacacaccaaaagcaaacatttacgtttagcatttacatttttgataagcaaaataatcttggttaagatgttaagagttgtatatgttcatttaagatagaaatatgtactagatctaagtgaaaacgaaagtgcaaaaactaaaaaccgaggttaataactcatgttttttttttgtctaagaaaatgaacaatttagctagtaaagtaagatacttgtttagtatcatttgtttggtgttgtgaatatgaacaagaaaatgaacaatttagctagtaaagtaagataattatagatcttaagttgaataaacaattgtgagacaaggatatgatttggtcaaaataaatatacaaaatgagaaagtgaatggtgacgcaagtttcaattatgggagagagtggatagatgcctacttgcatgagtgtaatctttcagggctcaacacaaatatttgaaagtgagagtggagttccatgtgtttgttcccatcttcttctctttctttgttactcttgaggcttcatcatactcaccaacattagccaaacatcttcacttttctttcttcatttctttaaatatggggtccgaggaaaaaaaagatttcttgaattgttatcatgtatcttgaaaaatcatgacattatcttcactaagttagtaattcatttacataaattattgaatgtgaaaaacttttatatcgtttttgatatatactcccttcagttttcttttattttctaggaaaatttgtttcaaaaggttgatttttagattttcaatgcaatatttattagttattattgatgaattataaactttaataaaaataattgaaaatcattagtttaaagttataagaaattataaaatacaaaaaataaaacatttaaaatcaactttaatatgattaccttaatatatgtgtttttcctaaacaatcgaacaaaaatgaacagagggagtatatatatatacacataacacatgcaataataattttttcttcttcctgttttcttacacatgtttttagtttgttattttattaaattaactgaaccataagaagacaatttcaagacaaaattaaagaagaagaagttatagatagcaattttacccaaaaaaaaaaaaaaaagagttatagattagcaaacaaaatttggttgggcctgactttaatacacaaaagcccaaactcttaaacccaactgttgttctgttcttcaccttcttcccatctagggttattacgtaacttctctgttctctctcactctctctgttcttcatcacaccgagaattcgaaaattccgatgaacaagaaacttctcaaccctcttgaagatccaccaaccgcttcttcaagcgaagacgtcgacgaagagatttcatcaggagaagatgaaaaagaacatatctccaattcttcttcttctgaagaagaaaacgaactcaaagatctctccactcaaaccctaaattctccttccaccgaggctccaactctcgattctggatctgagacaaattccgactcagataagccaatcgtcttaaccagtcagaagaagaaagaaggtactgattcatcagggacgaagcgagctagtgaaggaactagctcaaaggacatcaaaagagctaagaaagtttcaggagatgacgataacaaaaaatttcagagtttatggactaaagaagatgagatctctctgttacaaggtatgattgatttcaaagctgagacaggtacaagtgctcatgatgatatgaatgggttttttgatattgctaagagatacataagctttgatgttagtaagatccaattcggtgacaagattagaggtttaaagaagaagtattttggtgtaaggaagaagaaaggtttagacttggatcatgataagaaatgtttgggattggctaagtctatttggggacttgatggtaaggaagtggtggttcttggaggagattcggagacgtcgaattggtttgagaagtcgtttttggttcgggttgttgcgaggcttggtgtggatgagtgtattgtgaagtggaaatggagtaaggtgtctaaggagactaagaagaggattgaagagaagatgaagatggtggaggctaaggaacttgagttgttgtcgcagaagatagatgttttgaaggaggtggcttctgtgattgctgaaactatctaagaagaaggacttggattgtttaggtttaatggagatgtaatgcctcttttgttatttatcgtaggatatatgtttctcatctatgtttctggttcttattagtcttctttttttgtttcttgtgtgagaattagctaaggaacttaagaactttggactttgtaagccttttggtcgatggttgtaatgaacttaagactttgtaagctatggctccgactggtaaaaggtgttttcaaggttgaattgcagtcgaagttataatttgatgtaaatattatgtggtataaactgcagtttgatattgccctattcttttcgttatcgttgcgtcagcggtccgcggccgaaaattataacttatttgcatgtaatgtatatggaaactaacataatcgttcttgtgaaaagagccgcaacgtctataatgtatatgttagacttttgtccggtgacattttatctttttgacaacgtaagactggccctcgttctgacactgcccatttctctttacggtggtggtcggcttgcgtctagatttcggtggcttctatagcaatggtgggctagctaagatctagagtttcaccgcttatcttcggtgtctcttttatttttggccggattgtttttcggtttagatttatgctttttccctcgatttctttatattcgatgtgattggactcttttgcgtttcaatttttacatttagaattgtaattccttaaccctcttttgtttaaaagctctagcggtttccggtagttttgaaggttccttaggtcgctttctacatcgacgatgaccggcgtcgacatttgattcatctacccacgtgtctcaacattggttaatagcctcacacgtgtctcttagtctctgcattggattttttcagcttatttcctcaaagagtaatagttttctggattgggatttctttactttgggcctaagtttatcagatggacttgatggtatcttttaggcaatattggatgattatattgtttagaaatagttcaatattgtgaagttaatgtgtcaagccctgttggacctcctagcgcaagatatgaggtgagccattcatcccttataacacttcaggcaatctacctagctaaaaaattggcttttggtgaagagaggttgaaaattacttccgccaattttttttttccggccaaataaattcccgccaaaacttgtatttaaaattttttgtaatttttgaaaaaactcttaaaagtccttgtatagttttttcaaagcattttaaaagctttgtaaagttgttaaaaacacttgtaaatcattttaaaatctattaaaatcattataaagtctttcaatacacatgtaaatactttcaaaccccttttaaatctttcaaaaaatccttgtaaatattttttaaaagggaaaaaacctaaaaaaaactcaactaatttttatttgaatatttaatatctaattatttttgattaaaaaaatacacgaaataataaaactgtgcaatttaatacccaaataattaaatgctttttttttgttttttaattaaaaataacaatatttaattttttaaattttaaattacataattttattatttcgtgtatttttcttttaaccaaaataattggatattaaaaattcaaataaaaattagttttttccgttagactgtaattaaaaaaatattcattcctcaaacatgttacttcatgttttaattcattttaaatacatttatattacaaattaaaactttcagaaaaaaatttgaactttggtgtcacagaaaaaaaaacctttcaacttccttccatggcgatatctcctcttctctggactcttatcatcttctccataatcttctcactccaatcctcctcctccgaagaagacacaccaatcacacgattccaacaatacttaagattcaacacagctcatccaaaccctaactacaccgcaccaatctccttcctcattaaccaagctcaatcaatcggtctcactaccaaaacaatcgaattcatctctggcaaaccaattcttctcatcacatggctaggctcaaaccctaacctcccatcaattctcttcaactctcatctcgattcagtccccgccgaatcagagaaatggacatatccaccgttctcagctcacaaaaccatcgacggccacatctacgctcgaggagcgcaagacgacaagtgtatcggagttcaatatctagaatcaatcagaaacttgaaatcgagaggcttctcacctctccgtacgattcatatctcttacgttcctgaagaagagatcggtggattcgacgggatgatgaaattcgcggcgtcatcggagtttaaggatttgaatttgggatttgctatggatgaaggacaagctaatcctggcgatgaatttagggttttttacgctgatcgagttccatggcattttgttattaaagctgaggggattccaggtcatggcgctaagctttatgataattcagctatggagaatttgatgaagagtgttgagttgatttctaggtttagagagtcacagtttgattttgttaaagctggtaaagctgcgtattcggaggttatctctgtgaatccagtttatcttaaagctggaactcctactactactgtgagtttgatgagtttttgttttggtgtggagttgttgttcaagagaataagagtgtttgttttttcttttgcaggggtttgtgatgaatatgcagccttcagaagcagaagctgggtatgatttaaggttgcctccaatggcagatcctgatgttatgaagaaaagaattgctgaagaatgggctccttctattaggaacatgacctactcggtaagtagatgtcgttgtttctgtgtgtattgctatctgaaatgttaatatcagctaaagtccatactctatagtctatagcgttatacagaactgtttttgtagttttgttttgtgaagaagcatggctaaatagagtgaaagagcgcattgaccatatacttagatcagagatcgtatcaaagttcttaacttttgctttcgtcattagtaaaatgtatgtttgagattcctttcagctacttttattaagtctcaatagttccacattagattccgtttctgttttgattataatgttcattatagttcttgttattctactgccattaatctgtctattagggttatagagaagctgttcgagcctggttttgtgaaatatgaccttagatagttggatgaatgaagaagcatggtttgatagactgaaaatcccttgatataacaccattgctagtgatcacctgttgcaagagttttcgttttagtcacatccagatgtttttttttcttgcaacagatacaagagaaaggaaagttaagagatcatttagggcgacctataatgactccagtaaatgattctaatccttggtggtctatcttcaagcaagctgttgaagcaatgggaggaaaactcgcaaagcctgaaattttggcttcaactacagattcacgctttattcgcactttgggaattccaacttttgggttctctccaatgaccaatacgcctattttattgcatgaccataacgaggtattcacatgatgatattatctattgccatctttgagtctatatatttaatcacagtactgatataaacacttaattgtggcctcagttcctaaaggatactgtattcatgaaaggaatagaagtatatgaatcggttatcagcgctctaagttcctttgagggagaatctgctcaagtgatttgaagcatgtatatatgcaaacaattgtgacacactgcttatggtcaaggctcacattgctatgaccaagaaaagtagtagctgtttcatctgtaagttatttttatcaacacttactcttgctttaacacccttaagtggttggtaataatcctttgtatatatatcagacatttgatttgcctgcataattctctaactctgaagagaaaatgtcattggtgcttggagcatgatttcacaaagtgttgatctttttagctctcaatgttctaattttcaggagttgttgtaacatatcacttgcatagcatcagagattatttcatatcacttgatttagttattgactttacggctctgaaaataaacaaaccattcgtgtgggtcttctctccccgagtctcgacccttccggtctttgttttcgcagttgtgcaacttatggttccggtttagtttcaactttctttcagctattttgctttgaagatggttttaagacaacttgagcttcatttttcctggcatgcgttgtggtttattcagatctacttcatcttctatttacttgtgttggactaaaaattattggtgattctgttcatgatggtatcttgagctggagataaattcttcctttggcggcaattttgttgtggacctttctctcgtcgtggactttagtttcttcttgtaagcccaaatgttagaagagtttgtgctgtttttctcgggaaaacggggaaaaagtgtatttctaccatttgtgaaaagagaatctctaaaatcacatagtacttgatcatctagtttgaaacttaatgtctcaaagtcaaataaaccttaatgtgtcatatgaactaccattatagatctatgttctctattagtatgtgagtctcattctcgttcgatagtcggcatgctatcctaggagattaaaaaaaaaacttatttaccgatcctataaattatcatgagatctttttatgtgttttatcctctgtttcattgtactggaaatcagtttccaatagatcaccaataattcaagcatgataaactctagagtttagtcggtaagtgttacgaaaacgataagtacaccaggcttggcccaaataggtagagaaagaggcagcggtctagaggcctagtcacattttttcctaaaaaatcttatgtttcaaagcccattttaataaaaatatttagactatagcccagtcttttaatatttagatccgcttttaaaaaatattagcaaaggtccaacatttttttgtgtataaatttgctcaaaaatatgaaaattttagtttaaatatatagtaagaccatcttcaatggttaaggttcttaaccttgcatcttaacaattattaaaattaaaattttggaacatgacacataattgtatttatcactcataaaaaactttaagctaagaagtgaattttagtttttaatctgttttgaattatttttcagaatttaattctaagatattagcctaagatacacctaagatataccattggaggtgctctaaggatccaaaaaagaaagattaccctaaaactctaattattgttgagtcgaggctacttagtgacataggtaaacaaatcaatttccttaagcgcttttcatgtacaactacagtataacctctataaattaatactcgataaattaataatctctataaattaataaattcttccggttccgagttgggaccagtgtaaaaagtaacacaaatcgataaattaataagataataattttttttaaagtcttatgtaaatatatggtcccatcaatattataaattaataattgcataaatatatcaattatatatatacattatatgtaagaaatttctttgaaacatatttctaatattgttttgcttaaatttgtatttattcttatttgaaatttaattctaatatgttactgtatcaaaaacttttactgttgttttctatacatgatattatttttaacttgtaattgattctacaaagatattttctagaaaaaagaatcttatagaaatgttttaaaagttactaaattaggaaagtctctctataaaatttattaatttatcgataaattaaaacctctctaaattaataaaattttacaatcccaacattattaatttatagaggttttactgtatatttctaaaaatcaaggtatatattaccatcacccttaccaatcaagcacaatgtccttgttgcgtatcagggccgtcattttcgatggtgggaggtcacatgactccacactcatctaggttcaactttgataccatttatagcgcctcgagtaccattatctaggccttcatatccactctcaacctaaggaccctaacatcaagtgatagctagtgcacacctatcatttctataactcatggaccccaaaagcaatattttttgtacctcgtcctaaaaaatatttagagctaaattaagcgtgtttgaactaaaatcattgttttcaatgcattgaaaaaaggattcaaagatgaacgcacgacgagatatcccaacaaattacagatgtggaaatgggctatttaaacattaggacaaagcttttgccaagatcggacatcatttgaagacgtcaatgatgtccatatgttgttctaagataggcttcttgaccatatgttgattcacaaacgcactcaaatagatttagacgattgactctatatctaactaggcaatattaatctcctgcagtgaactttgatgtagctcctacaatttggagccaaggtgggaaaaacgaaccaggcttgaatcaattttacagtatcaaagaaaaaatatgtaaattttggagtattgtctcctactgaattcactcaacaaccacaactaaaatcttgaaatctctattgtcataaatcttttctgcttctaggaaatttctcaatctaatgaaatcaaaaacaaaggatttgattctgttctgtcacaatccacacatgtgcatttgcctctacaccatccaacacactcttcaatcctaatgagaaacttctccgtacgttcctcttaagtttccaccacacgaatttatttccactctggcttaactcgttaccattaaatgtttctttctaatttatttcttgtaaccacaaaactttgttaaatatttcttgtaagaaaaatattgattgattgataagaaaggtacggaaggtcatatattgagtacggtgccaggtaagattgtccaaactacgaataggatatttttagtgcaaaagtacatgcattatgcatgaatcttcatttatgattctatttgtctatttcctcaggtagggttcgctcactattcttcgttaggtagctagcttaattgctttagcttctcggattttacccgatccgatcactcaagctttatgacacaatgtaactcatcttcttcttgttcttacacagttacacgtatagcttcagactgtcgagctctagacactaaaacaatcaacaaagaatgtgattgggtgaatatggtgacattgtggtgaaaagaaaatatttattggtaaataaaaataaatgtaaaatagtgaattagttaaatggtatgaaatggagatatctttcggtgaatgagaatgttatagttgtttttagaaaatagcaaagtcatattggtaaaatattgagagaaaatgtaaaatgttttttttccgtaaatgactttgaaaagtataatttatttgataagcttggatatacaaatattttaacccgctaaataatatagatatatccaaaaacatagataacatgattatatgacaaaaacataaatatgttttataaattagatgtctacataacgaaaataatgtagtagaggaaatgtgttctacaagttgtagatataagagccaaaacatataaaaacttcattttgataaattagatgtgcacatagaatactaatgttaaagaattcgtcacgtaagatttagttataactattatttttcttaaaagaaagtaaaatagtcaaaatttgaatcattctctttagatggaattaatttgattatttattcaaataccacgtttgtaattacagtcattgagtgcaaatattaatataaaaatggtagaacattgttggttttgttttatcataaacttttgtaaaatgttgcctgcattttccaacgaacaattctgttgattcgtttcttgatatgaataaaaaaccttcattattgttatattatagtaccccaaaagagaaaaaagaaatagagtcgtctggctagaacgtgaacacgaatagattagtttagtagtactcttacgcgtcttaatttaattctagtgccgactaaatataaccgcagattagtttagttaataaacagtgcaagactattatgaggtttgacgattttactttagtttatttagttagtagtacaatattatttaatattacaatgcagtttgacaaaagaatctgaatttaattaatttagtaaaagcctttttacagagagaattttacgtgtgacaaggagacacaaagagctagttaacgcggttttaaaagtcccattaagacagaagagcaccagctcttgtgcattaccttggtaaacatgacttcagctactttaacgtttaagattctgaattatgtttaggccttttaaccaaaaaaaaaaacttgtaatttttgtattatatatatatatatatatatatctataatcatgcatgtgatttcattttgcatctcatttatcaaaataattcgatagttaaattattcttatgattaactttgtcttttgtttgtaccttaaaaaatcacatgctcttagctcctagaagttgcctctaaaaatagaatccaatgtttcctcttataatgttttataactttctgtcgtatcttgatattaatattctcatatgagtactgatttttgttatttacatttttattcaagattctgaggctcaagaagtagtaacttttagttgtaaacaatagtgtacttttgtggaactaaagaattagcttggagccttggaggtcaaatcaataaatatgcatttttgaaaataaaaaatagggattctcttattagtgatctgtgattgggtgtagcatatgggattgtgattaaggaaaatcttttttataaataaattaaaaacacctgtctcttacattatttaaaagaaaagtattaatctctttgtgtgtgccccatgctactttctttgactatgttcatagtatttttttttcttttgagttctttatgtttctctttccatttttgttctctataaatagaaacacaccattcttctcctccaacttcctcccttaattagtatcaaaaatggtgaaaacacttcaaaagacaccaaagagaatgtcatctccatcatcatcatcttcatcatcctcatcaacatcatcatcatccataaggatgaagaagtacaagggagtgagaatgagaagttggggttcatgggtttcagagatcagagctcctaatcaaaagacaaggatctggcttggttcttactcaactgctgaagccgcggctagagcctacgacgcagcactcctatgtcttaaaggatcctcagctaataatctcaacttcccagagatctcaacttctctctaccatattatcaacaatggtgataacaacaatgacatgtcccctaagtctatacaaagagtagcagctgcagctgctgctgccaacacagatccttcctcatcatcagtctctacttcatctccattgctttcctctccatctgaagatctctatgatgttgtctccatgtcacagtatgaccaacaagtctccttgtctgaatcatcatcatggtacaactgctttgatggtgatgatcagttcatgttcattaatggagtctccgcgccgtatttgacaacatcactttctgatgatttctttgaggaaggagatatcagattatggaacttctgctgattctactttcattataccttattctttgtttcaatatatatacttgagttatgtaacttatacaatgtgttatacatttttttcttcccttttctatcaattctcacaatgtatggaacatttggggatctttgtaccaatatctaaattatttttgaaattagatatttttcatgttaagagttcactaaatctagtagtagtggttaagtatggaaatagatttatagcttttgaacaaagaacttcgaatgataacaagttaaaaggtaaaaacgaaaaagtacagaatcatattgttgttgattaaattctgaaacctaaaagttaagagttagtgttgaaaacaatcatttcagattttatagtatgaatgcaaaatttggcgttactgactttaacactaacactgtttgatgtaaatgtgtacatgatacaaaataagtggtggtaagatgactatgcgatataagtactgtatatatgatttttctttattaaggatataaaagtattagctaatgagttaaacagaaagcagatttttcatgtgaaaagttttgcaaagtcaaagagtaagaagcaagtttcatgaggcttgtcatagaaggcgatgattaatcctacttaattattgttgaatagagtaagtgtataaatattatttatttagaagaaagataaggaaaaagagagaagagacaagagatgcagaatggttttgtgtggtgactggttagaattggtaaaaccaaagagaaagagttaacgtacgtggaaaactgtgtacgtttgtgcttagatatcgtaaaaaaattgacatccattttactccaacattggtctgaagaaaaatctaacagtagatttgagcagaaagccacatgagttgttttggtttcttgttatgtgtgtgttctttgtgagatggggtcccatgattcactctcttacccttgctcctcagaaactccatctctatttttttaggtatgatttgtttttctttagataagttcccccccccccccctcaaatatacattaataccattggtgatacaaaaccatacaagtttgttataggtaaaagaaggtataagcaatatcggaatagttaaaggcggtgaaaattaactttgaaaataaagactaagaatgatgcttttggtaaaacttttgtgattggtaattacttttaagactccgattggtgataaacaaaagaaacgataggaatatgaatgaaaaataacaaaaagaaacaagaaaaaaagaaaaatggtcataagtaggaaccaagaggaacataggaattgaacaaaatgattatggtaaatggtaaccagaaaggtgaattaatatttaacataataattactaaaaaattatttattgaattttgtttattaatttcttttaaaattaaagttttgtataaatttaaaataaattatattataaatttctcttcaaaacatttatttattttatagtaaaaaattcactttaaaacatttatttatactaatttaaaataaattcataacattcattaaattgaaagtttgataaaaaacaatttatatatcaatatatactaaatatatggaaaattttatatatataattataaatattatcataaaagctattttaaatttatttaataaataaaaacgaattttattttttttgtttctcttggttcctctacaattttggagtggaacaattttgttctaccattctttttttttaggaatgataagaaaaaatgtaggacccatatgtctgaaaatgaaacaaatataccttgcaaatgataaaaaaaaaactgaggaacaaagatgaacacgactttcgtactcatttttttcctcaaaaatggttaataatcggagcctaagacatttatttttgtaatccacttgtagggccatttatgggaaaatcttacaactaaacatgtttgatacaaaataatcaaaggattgtctattattctgctgaatttgttgttttcaatacacatgtgagtcatgcaaaatcaagtggtaaagagtaactgtcagtcaaaccaaaccttcgagatctccatatgaacgtttgtattgccagaataaaacgtttttaaggtattttgtttaattataaacgtgattatgttgacaaaaaaacgatgacaaagtcactctaccaattcaatttttttttttgtctcacgttaaataagatattaaaatgaaagatgacagttttctgtgtttgattattgaacgttcaaaaacagtgaaatgagtaggatcaaaatgataatgaacaatgttgattgctgaataatgtgttcgagtatctttatttttcctttttttagggaggttttggggaaaacctgtaattctctagacccaaaaacaaaatatataatattagttttgtccctatcgtcattcgaaccggtgaccttaagttttgtctagcatctttactaattgagctaatgagacttggttaattatctttctaattttatttttatttttgttttttgcaaaatctttgacccattaacaaaagaaattgatagatactagtatactcaactaatgccataaaaaaaaaatcattgcaatttgtatatatacaaacaagttgtaaattgaccatgcctatatgttttctttgccgtcatttgattgtcttcgagcagataaatatcactgaaaaaaacttactaaaaatactgtaattagaaatttgggtctgagtttctgacatgggcttgtggttatagttggtcccatgaaaagtgccttacattcatttttctttcacctttcacatgacatattctccggatcgagacgagttttttcttttcaggggatatcttaatgatctcccaaaacacataacatggcattatttttctcaatgatttatgtttaaaagttttagagaacattcatagaacaatatttataattttgattcggaaaaggaaaaccaaacactttttggtgttatgtagctaaatacaaaagacaaagaaacttggtgttgctaaatcactaggcagtatttgaaatagatccaacattggtcgtgaaatcatgatctcaattatatgtttatgttgtctcattataacgaatattaaatcgtgtaatgttaattgatttgtcatttgtcaattatactaagattgcgatttcacgatggctagacaatccattatacgcctattttagttattgtaagtattttatggttccaatatgcgaaccgggggttgttaattgtttaacatactcggactaatgaactctataaattcttttttcctatactaattactttagcggtttagcctagtaaatacatacacgaacttttcaaaatgaccataagctaaatgctactagtctatctcattatcgacttagcaggagaaagcaatcttaattttcctctcttcctgtttgtttctcataattagggtttcgttttgcggacactttacctctaaaatggcttatagcatctccaaccctactctattttagagtcaaaatgcaaaattcttctccaaccctactctataattgactcaaaaatagagatttctacagattgactctatatatagaacaactctatcctcaactctatttttgagttcaatttttttatttatactttagtccctcaaatttaaactttttttatttaatgcatataatcattttacaaacaacaattacaacacatagttttataaacttaacaaacaaacaaatactaattttaatagttttataaacttaacaagaagcaaacaagtactaaatttaaaataaacaacataaaaaactaaaacaaatattctaatggtgttaaccgtgttatttataataaatattctaatggtgttaattaaaataaaatttgtaatgttttattatttttatatgatgtaatgatttttaataaataataagtgtttaatttaaataatttcatattttatacgaattttgcaaatctataatatatggggtcaaattttaaattatataattaaaaagtattagtatataaaatagaaatagaatatttctaagaatattcttttttagagtagaaaatagagatatacattggagaaaaactcatctctaaaattgagttactctattttagaacaagatatagagctatacattggagatggtcttaatacatagtcaaaattgattacttatttgatgaaaaaatatggatttcttattttattttctcataccagtgattgttttgttgtattggggctgaaaagtgttctttcagcacatcagagaaaaaagttaagaatagtgtgttaagcagtaaccatactctttaaagccgtagattaattattcaagaaattaaaacaactaattaaacaaaaatcctagcaaaatctatttgaatgaaccatatccaaatccacaaagtcagtcccccaaatgttgaaacacgtaaattaaacacacaacaacaaaaatataattaattaaacataactaatgatttttataatttacacaaaaatcaatcaatatttttttaactattttatattcatttctaactacttttatatttatatgttattagaaaatattaatatatatatattttttatcaaccacacatatattaaaatataactctatgatcggctgcccaatttagaggagaagagtttacaaaaataacatcagacaacaataaacgagaaaaacaggttaaacaatatgctttagaattacataaacggtaaaaataagaaatcgaaccaagcgtcgttagctcaattggtaaagaccctagacgaaccttagaggtcgccgattcgagtgacgtttgggacgaaactaatattacatgctgtggtttcgggtctgagagattacgggattcggtccagaacctcctaatatttataaaaaaaaaaatttttaaaataagaaattaaagctcggaacattcaaactcgtctaataggttggagaaagctggtcaatcatcaggcgaatacgccaccgagactaaactctacacaatcagtttcaaatatctacaatcaatccttcttgtaaagatatttttcgtagcccaaatttatgatgacttttttttatttgtggtgcaccatttatgacaacttaaaacagtttaattttaaattaaaaatttgtattttcttatgacctgtggttatatgttgggccttttaggcatttgcaagttaagtatggtcgtggattgaaaagcccaatgtgtaatcctctagtttactaagaaggtttaatgtttttcaatccagtactgcaaaatctgcaaaacctaaactttcgtcttctcaacaaaatctgcagttccttgctcctttctcagtccaaattctctgatttttgattttttcgattcaatgggtttcaccaaagatcagttgcttgatcgacttcaggtttccattttcacctttaaactcaattacatcattttcatttcgcattgcttttgttggaatttgtcagataagattagataaatcattagcagagaacggaaaatgttacttcgttttatgcttgattctatttgaagaagttatgtgtattaatggatttggatgtgtatctatggattccaagttatgtgtatagtcgtcttgaactcagaagtttttcaatgtctacttttagattctaacccttaggtcaagaattttggtgttacacgttttgttagtgtcaatgttaaaaaaatgtggcaatgtgaattgatgattaaggatttgtatctatctttcaggaacttgagattgattattccaagtatgaacatccgcctgtactaaccgtcgaagaacaggtgaatataccttaaaatgttttagatttttaaaacttaagtgtatgatgtttaaagatggatttataaggctttgttttgtgtatttaaatcttcaggccaagtatgttagcagtagtaagggtgcactgagtaagaatctcttcttgaaggtagtctttcaaagcggtacaccattaaaggcattatcaagttagagtattagttgattgttaatggtgcatatgcctctattttgtttttgcaggacaagaaacatcggtattatattgtttcagcgatggtggatacgaaagttgacatgaaaggtaacatatgttttctccttttttcgtttgtggatattggcatagaagaagtctctgggctttgtgaagtttgaatgtttttttttttggatgttaatgtgtgttccctgtgacttctaatttaaacagttttatctcagagacttggtcttggaaaaggagggattagaatggctccagaagaagcacttggtgagcttttgcaggtatttttcatagtcttttcctctgctactgtgttttgttatatatatctggaaagagttttattaaatgattgtgctgtaacatgggaaccatggtagcgatagtttttttgacaattgataagaaaagtttctccaaaccaaattgctttaaatgatctatttatgcatggtgatatgtttgttttgcttatcgcagtttacaacaaatccacacgaatatattgaacttattgtcattcatgtttacaatttttgacactcgtgctactctcttttttcgttaaaggtatccctcggatgtgttaccccgtttgcagttgtaaatgaatcagcaaggtattgtttgccttacggtattggttcatatggtgttttcccttccaagttcctaattatttccattgactgacattctttattaaaactttccatgttaaagagacgtgtctctcttgttagaccaaaaattcaagaaccaaacgcgttgcatcttccacccattgtctaacgatgtctcagtctgtaagttctttcattacagacttttcttttatggttcaaaatagttcataacatcagattttagcttatatctaatttggttggttcctatcatttccagctctgaacacattgggtctggacaagtttctgaagtcgattgggagagatcccgtatacgttgaccttgaggcaaatactctaaacctttaacttgagaactcatgttccacagttcctttcctcagggttaaccttttgaaccttttgctgtttcaggctaacccggtagttggtaaagaccaggctccagatctagctgtttgtgttccgtctaattcagttattgttcccgagattcctaatcaaacatcttctacacaaattcctcttccaaaaagtgtgtcagcagaggtcaagcctgtggcttcaggtatgcctgatttatcagtttcttaaccatgcgctccaagtcttgttaaaccgtgaaggattggtttatataactcggttttcttcaacggtgcagccaaaacgagcaagccagcttgtaaggtgaagagcgtcgctgaaaattcagctccatcagcttacaagaacccggagaaatttgtgcaggagattttggacaaaacttcggctctattattgtccgaggtagtaaactcaatcccgaaactaaagtcgatttcgtaacatttatagatcaactctgaaccggttttatatacaggctaagggagagtgcgtggaggctttggcagaaacactaagaaaacgacttacctcagagttgacccacctctctgtgagtacatttcgatatacatggttcgcatcgggtaagactaagccgtttgtactaatcttggttctatgtaaattgattgcagattatgtacaagaactcagcgtacgcagaaggtttttatgctggtacacgccaccagccgaagcgattgtaagaggtttggtttacatgttgaaccggagatatttgggagagaaacattaccggttcagcaatatattttccttcgttggacagcaaattttagataagactgaaaatgattacatttacatgaaagctcgaaccatttattcacttattgttgctttgtttgttcaatcaaagataaaccttttctatatccgaaaactgaatttgaaattcgaacaaaacgtaagaaaaacattcatctaaaacttacgattttctggaataaaagaaatattcggatatttcatatactaaaataaaaggttttgtgtaaaaaactctaactcattcatttttgcaattttaccctctatctccaacaaatgcaaattaatcatacatagtctaaaataataggaaatatgacttttatatgtatattgcaaacgtttttatactcacctatattaggttttagaaaatttgaaaatatagttgaacttggttttagattttttgaaggaatgttacacatagaggcactttcggagaaacttaattcactttatacactttaaaaactagaggcactttgccttgcttttggagtgaaataagacatatttacccccactaattggtaagagatattactacaaaccggtttgtggtttcgtttggttttggtctaaaatatacggttaaaatggtcggtttagaaaaaacagtttccacgttatgacgatcgtcggatttcatttaattaaacggccgtgattaatcattgtaacttcccttgcttttcgactaaattcaaactgacacacgagatccattgaaacacataagattctgggtttcgatcatcgaactttggccaactgtcgtttccaaggaggtacgattgtagaaaactgatatcatgatattaaaacgcaatttcgtgctttctatttgttacgggaatcagaatataaccaatttttattttatcgtttatatgtacagggatcgatggacgactatatcatggttatatgtggagagtggttttgttcttcgactggagagtggaaattggagatatgtaaccaacttttctcaagggttgtcccaattcatgagaggataacattggatgcgttgaacgaagcaattctgcaggagtttggcgtcaagggtttaaatcctctgttaagttactctgtaccgaataagaacatgtttgcaacaaaggataagactccaccggttctggttacaagcgagattggacttcaatactatctaaagacccttagagaaaacaggggtctaaacttgtttgtgaagtttgaagataaggttgatacagcaaatttgagttgtgaaacgccaggaagtagttcaaaacggaaagttgacagtttgtatgatacaacaagtggttcgagaaatgctgacacaggttctggggatatatcttctggtgtttcaaaatctcctaatgttctggtgacccctgtagatgacgaattcatggatgcattacacgatgcagaagaaaaaatagcaagaagtggtgggctgaaatctaacgaagaagtaattgttgatgatgaagatgacatattcgtggatgacttatttgtggacaacaaaacagaggaaacagaagacgggatagatatttctgatgatactatgccctgtggcggatatgataaagagttctggggtaattttctgtcggatgattatggtggctcaaatgctgaagagttgatgtctaagggtggagtagatgcaaggtacaagggaaaaaataataaagacgggagttttgagggtttaaatgataaggtaggcaccagtgaggataaagttgttcagtgcacaggtagtggtgtctttgaccacgctgtgtttgtgagtggtggaggttcaggtgtaaacgcagagaaggttaaaaaggaatgggctgcgaaaactaaggttggttgtaaagctgggagctctcacggattgagaggtgatgcaaggaagttggaggaaattgatgatgaggagtttgataccccaccattgtttgaagacatcgagtatgaggtagagaacataccggatttggatatagaggatgatggcaaagggatatacaagggaaaagtgtatgcaagcaaagaagattgccaaatcggtttggctatatatgcgatcaagaacatgtttcatttcaagcaaacaagaacaaagtggaattattttgttcttagttgttcagatgagaaatgtgattggagaattttggcgacactcatgaaaggtactggctactatgaaattaagaaagcaagtctggatcacacatgttcgttagatactagaggacagttcatgcagaaggcaacatctaaagttattgcatccgtctttaaggctaagtacagtgatcctacgtccggtcctgtcccgatggatctacaacaactagttctagaagatttgagagtctcagtgtcatacagcaagtgttggagagctagggaatcagctttaactagtgttgccgggagtgacgaagaatcatactgctatctggcagaatatttgcatctactgaagctaactaatcctggaacaataacacatatagaaaccgaaagagatgttgaagatgagagcaaagagaggtttttgtatatgtttttagcttttggtgcctcgatagcaggatttaggcatctgagaaggatattggttgttgatggaacacatttgaaaggaaagtacaaaggggttttactaacatcgagtggtcaggatgcaaacttccaagtctatccacttggatttgctgttgtggacagtgagaatgacgagtcttggacttggttctttacgaagttggagcgtatcattgcagacagcaaaactctgactatattatcagatagacactcgtcaatccttgttgctgttaagagagtttttccgcaagcaaatcatggggcttgtattattcacctttgtaggaatatccagactaagtacaagaacaaagctttgacgcagttagtaaaaaatgcaggatatgcgtttaccggtacaaagtttaaagagttttatggtcagattgaaaccacgaaccagaattgcggtaagtatctacatgatatagggatggctaattggacaaggcattatttcaggggacaacgtttcaatctgatgactagcaatatagcggagaccttaaacaaggcattaaacaaaggtcgatcgtcacatattgtggagttgataagatttatcaggtctatgttaactagatggtttaatgcgcgtcggaagaagtctctcaaacataaaggtcccgttcctccggaagttgacaagcaaataacaaaaaccatgttaacaactaatgggagcaaggttgggaggatcaccaactggagctacgagataaatggaatgttaggtggaagaaatgttgttgatcttgagaagaagcaatgtacttgcaagaggtatgataaactcaagatcccttgcagtcatgctttggtggctgcgaatagttttaaaatttcctacaaggctttagttgatgactgcttcaagcctcacgcatgggtttcgagttacccgggagcagtattccctgaagctattggaagagacgaaaaaatactagaagagcttgaacaccgatcgatgttgccaccatatacaaggagaccatcagggaggccaaaggtagccagaattccatcaacaggagaatacaaggtacggatttttttttgctaaagtagtactttctatttgattgttaaaacctaatgcataatgtggtttgtacatggtaaatgtagaaacctaagacaggaaggacggagcagaaccggtgctcgaggtgcaaaggcactggtcataacaggacaagttgtacaaatccaatttgaacaagttcttacggtggatgactttgagattgcaatttaggatattaattgtttttcttttgtaatgtaattcgtaggtgtaaaacatataaatatttattgagtattggatgctaattaagtttttcatttatactgcttatgttacaccagggacacgcaagaatgtctgagaaaagggacaagtacatgaaaatcaaatatttcttttttctatacaagtatagttgaccatcagatcatatccaatcgtttgatttaaatagatctatttgtaagattagttcgatttacatgtttaaatattgtaagataccccaatcagttatatgttgaaaaattggtaattgtgagcaaattattttcagatcatgtcagattttaaaaatggatttagaacctatcaggcatgtaaacaaacatcttttcccattatatatttttttaaaacttatgcaaatgccaaatttctgctaaaaaacattgtaatgtacaaagtgcatgtaaggttagaagtttgttgattctgaataaaaaatgtggacatttattgaatcggataatatagaatagaggatatcgactaatacatgtaatttcatattatatagcttattttttaatattaaaaaactttaaaaaatttggtaatgaaatggatgtctctgaatatttacatgtagataggaaataaatatttatatgtctatccacacaccccagaccaatcagatataaccaatctttagtatttttggaattagtattgtcggaaaaaattgctatgcatgctccaaaaacgaaagagtccctataagtcaatgataaacgagaaagatgttcactagtttaaacgttaaatacaagagagaaatacaacttcataataagattacattaataaactagataaaagagggaaacataagagatagttatattctgaaagtgggtaactgatgtttttaaataaactaggaaagcaaaaggatgtctctgaagaggaagaagtagacgcaatgtgaacatctctcaccattatatttgttgtaaaattcatggatgagccaacagtctggataatcctcataatgaaagagctcagcgtaagatccgaatcgttttggttccaaatcagaaatgtggtcaattagtgtcttggccatgatatctacatctgtaaaacacttgttctctcgtttgaaagtattaaactcgtctaatacttcattacctgcgcagcggtttagagcaatgtaaagaagtttggctataggaatgacatctttacaatcattcaataatgaaatggcgcctttcaggtcgagagaacagaaccctagcctcaagctctggagatacatagcgtaagggtttcgttttgcaagacatttggagtagaatgagaagtgaacagagtcgggcgaagacatgttgatgaagtcagggcttttatctaaacgaactcgggatagtgtctcgacagagaaagctgcagatttcccttcatgaccagatttaatccagtttttcagagcctcaattccttcttctgaaacgtggctaacaattagtgcgagaattggttccggaatgtataatcttgcaatcttcctctgttgacaacgaagacgaaaggttatagaagttacatatactttgtggaatgaatgtaaactatatttttcttaaaaatgaaaaatttaacctgtgtgtcgctagattgtgtgatagagtgtagacatttggatgatgtactcattttgtctatttgttgcgaataacgaaagagtaaaatgtgatggagagagaagttttagtactgatcaaaacggtttagaaatgagtaataaaaacagagtaattaatttgaagtttctctgaataggtcacaaacgtgagggatgaagcttagaggggagtacgggttcagttatatattaactctaaatataaaagataccacttgaattccattaaagcaatttcatatacaaaaatgtaagtcatagttctgaaacaactcaaatcatttgtataataattgtgacaccttatagttgaagactcgaacaatatataaataaagttggcgaaatatgcaaaataaattaaaacataaaataaagaataaaaacttagtttcaaatatgttttctgcaatcgagaagaacgataagatgaacataaataaaattggtacttctgatagtattacttatgaaatgtgtgcaatttcctgggacaggtaatagtaaatacatgtgttacaccactgtccctcgtactcattcaggttctgatggtcagaccaacactcaccataatcctcgaactcccaggattttttgtatgtcccttggcgacgtgggccaacctcgttgatatggaacattaatctatctgcaaataagtcgacttcactaaatttgtagtaccttcacttgtactgaatataaaattcccacggaattgatccagcgcaactatagagcatgatgtaaagtagaccagcatgtgggaaaacgtcctttatgccatccaatatagcaattgactcctggagctcaaacgtatgaaatgccagaactaaactatgaagatatagggcgtacggatttttggcgttgaggcatttggtgtaaaacatgtgaaaactagacgattcttcagccatatgaataaaaaaaggagacttatctattcgaacagaataaagtgtttcacttgaaaaaacagcggcttttccatctggacctgattaaatccaagcctttaacatatctacaccgtcctcagaaactaagctgactattttagctgctacatgatcaggcatgtggaaatcagggaacggaggaggctgaaagaaaatgcgtaccaacgttaacaccaaatttttgaggctatatactagttcaaaacaaaaattctcattttttggatcaatttcagcctcaattcgattgaaatttgttttgagtaaacattacctgtaggttaaaatgaaccaaaggttgacgaagaggctgcacggcaaattgatttcccctaacaggggcaagggcgcttgggggtcgccagtaatgtctagtaggggacattggtcgagggtggatacattttcctttctcgcagacgatttttggcattttggattatcaaattagtataatactgaaagtgaacaaataatgatctaaggaatttgaagaatcactgataattaaagagggccgaactaggctgaagggaaacagatttgagatcgtgatgaaatgggaaccctaattctctggataaatgaatagggagtggtttggtggagcgatggtttactgaatataattagtggatcctacaaatattccaaaaaattatacgtgatagtaaagtagatatgtccatattctcacgtccatgaatatatatacgcatggtttacaatatattatatagacgtgctacagtgatttgttacagccaatttagctgaatcttatttatggggatttaggtatttttttttttttttctaaagtttttcgtaaatatgagaagagattaggttttacattcatagaccgatgtcattaaagaccaaaaacaattgttaaaatgaaaagacttcacttatatagaaatgtagataaaatgtaaacaagaattaacataacaacaaaacagcagaaacagatgtttaaacagtttgagaaagttattatggtttgacgttttacaaacagttgtaatcatgtatgtgggtaattctacagttttaaaacagttcaacaatgttccataggtgaacttaattcagacacttgattaataatcttctgcttaatctaagtttttgttgcaataaataaaatggacaaaatttgaataagtcaaaaactttttattaatatataataacatttataaaaatattaaaacattgttggaggtaaacataagatgtgaaaaaaaagaaaagaagatgagataacaattgtaagcaataaacactttgatagttctaagcatcttccattagtcgacaaccatcttgatttcttcaatttcctcaacatcaggttcgggatacatggttgatattggcgcatggctaacaatcttaaaccagttacaacctggataatatctaaccaccttccaccaagcaagtgcaataacaacattgttcttgcaaaatgctcgaaatcttttctccaaatccactgcaatttgtccattcgcctcgcattccaatgtatctttgctgaaaatcagtaagtatatgagattatacactaaccttactacaaaaatgtataaacatgatatgtttggaaaaaaactgaaaatggatgttgaagaaaagtactttttatccatgatcatgaacggcagtttaaatccagccgtatctttcccgttacttgcggtattagtgagaatcccaacattcacaagtgcaccaataacatctataaaaaatatgtcggagatatgtgtttaaaaaaataaattttttgaaaaaagtgaatggaatttatgaatatgccattacttaccaaccaaggtatgtttgccaacaacatcatccacaatgtagtcaaatggagtgaacttgttgagtaaaccggttgctaaaggtgtggaagaagtgataattgtgtgatccatgaatagaatgcgaaactcatgaggagttgttcttattggttcgcagttaggtcgaacgagaaacgtacttatctttttccattgattctcttggatcctgtcaaagtagaaggcagagaaatgaggtccgatggttgcttctatttgggtgccctgttacaaacaacaatttatgggtgagggatacatgggttaataaaaattccgcaaattgcaaaataaattgaagaaaattgtttacccattcatcggccaagacaagacgtagttcgaaagcgttcgtgttgagaaattttttgtaaattctcaaaacaatgacacagatggtccagccagtaaccatcggagacaactcgtaaagattgtgatgttgaaccatcgtgaacaggagaattaaagagtaacgaaaactgagaaatatggtaagctttagttttgtttttcgtttgtgatgtggttgtcttgatgaaatcgtgagtagaagttgaatttatagaaactgaaacgatgtaaactgtaataacgacgtgatgattcgtcgaaggaattaaacgttgtaacttttaattaaaaaacgttggttctattaaagtttaataaagtaaaatagaatttgaaatacggtatggggatttaatgtgtcttgtaataagcagaaatacggcttgacctcggaaattcatcttgaagcaggttgcggatatcatcaatttatatgtgttcataatctttttctgtccaaaataacttatccaccgataaccgtccttttggatgtaatatacattcttgatctgagttatatgacccagaagagttagcatttgagattattttctgggggatttaacttattaaaacttgctcagcacattcatgtcaaccaataaaattagttggatgaatgaatgaatttacttaggattaaacttgaaaagataaaagataaatcaagtatagcaatgtacttgacaagataacaatggaaataacattatgaacatattgatttctatgcttcatactctccgtaatgctccgcccatacggtagctctatggcattctgctgcaaaattctcatatgctattggtttgtaaaatagagcattcaaagcatgtggatttttggcttcaagacattttgtgaagaaatgataatagatggagtgcgtcatggaccaccacatgtaataacgagatttgtcaaggcggacacaacttagagtttcctttgaatacacagccgatttaaatagtggtccagctttcacaaagggtttcaaagcatccacgccttcttcagcaacgtagctaacaattttagcaagtactggtgccggtatgtgaatttcaggcataatagcaacctgcgttaaaaaaaaaaaattggaaacaattggttttttgtttatgttggatgtaaaacgtataagaatttagcttatgatacgctgccctacctttttgacacctgaaacagatgatggttcactcatgtcgaccttcgttaactcctttttatttctatgttttgaagttgaaactgattgaatgggtatgaaagaaacttaaacgaatcgtgggaggttttcttaactagagattactatggttatatttatttttatatttttccggtttattaaatgttgtagttgggaaggtgggaatattcccgtaataacgaagtttatcaatgttatggagggaaataaatttagattgttctttcaagctaatagagatataactaccacatgatatacatacccacattttttattttttttttagttacctaaattaggaatatttacttttacagggtcgctccaaatgaaaacttatctccgtaaaacttgcgtaatggttaagatagggaatattctgcatttgaaatttcagtttgtggtgcgaaattaaaggaagtagaagaataggagaatataaaccataatcttttttaaataagtatccacgatttctccccagtttataaattatttcttatttgatttcttgcgagcatatcaattatgagaagacagagacgcaggagtgaaccatccgccggctgtagtgtaaaaatggttttacaaacattacaaaaatcataaactctcctactttatacttttatttatattgtcttattaagttattattttttggccaggaaaccaccattcaagaatttcacattccccctccattgcttgctaaaattgttaactacctggctgaggatggcgtggatgcattgaaaaatttgattaaagcaggtccggtatttaaggaggctgtgtattcagagaaaaccctacgttgtgtccgacttgacagatctcggaatttcatgtggtggtcaatgccacactcgatctattatcatttcttcaataaatgtcttcaagcaaacaatccccatgctttgactgctgtattgtacaaaggaatagcatatgagaatttcgttgaagaatgctacatggcacctttatgggtggagccttatggagaggacggaggataggtacaaatcgatggagcttactgggctcagccccgagtgcgagcaatgaatgcaaggtgctgtcgatgcaaaagtgcagcacacaaaacttgtccaaatatgtgaagttcgattttaatgttgtctttttttttgaaccattaagaacctttgttttcatgtattagctcctttcttttttctggttatagttttccaattatgctacattaccatttaagatttggacctttctaataagtaagtaacaaacctttatttataattagtatataataataatccacatatcgtgtaccttatgaatatacgaatatggatggaacacaataatataccgcatatcacattaaatacatggataacatataaaatagagattgttcgttttgggagtaatgaaaaaaaagggtagacataattcatacaacaacaattccttgttttttgaaccattaaaaacctttgtttttcatgtattagctcctttattttttctggttttagttttccaattatgctacattaccatttaagatttggacctttctagtaagtaacaaacatttattttataattagtatagaataataatccacatatcgtataccttatggatataaaaatatggatggaacacaataatataccgcatatcacattaaatccatccatgtataacatataaaatagagattgttccttttgggagtaatgaaaaaaaaggatagacataattcatacaacaacaattagattatgtttactattcaacaaaccaaaatagaacacacacgttcagaaaatagcttacggagtgataatattcaaaaggaaaatttagatggttaatattacaaaaagcagagatggttaagatggttaatattacaaaaagcagagaaagtgatcacttgttactaaagtcagatgcatagagtgggcagacaaactcctcataaatgtccatggcatatttacgactaaaagagtctacgtgtttatctgttattttcgccatgttctctgggggattatcacttgccagaatctcaagaaacttcattgtcaccgggccacagtcaccatatcgcaaattcttatataagccatctaatcgcttccaataaaaaggctgaagaccatgattctaagaacattcaggcttacagtacctttggatgaggtatggcaagattgtaacaacaggttcaatgaaacgtcaaacctcgtcttcctcgtaaagatctgtatttggatcgagaatttcaacggaccagactcccagatttattgcaagtcctacccagtgttttgaatcccatatcatgggcaagtaaatggtatcaatgtctgcgaaccattcagtgttgggccctacgatgaactgtttcattggttcagaccacttgacgcgtgacttcattttggcagctttgaagctttttaattttccttgtagatggtttgcgaaccatggttgaacaaaagccgctcgctggtttgtaagtgtggtcgcaagcttttgagaaagcaaggacaccaacacctccatatgctaggtaaacaaacaataagaattagactttctcactaaagattataaaggtaatatttgttaaaaaattgttgattttataccagagttgaaacccagtttgtaggcttggaaagtgatagaaggaatttgtttgaaattaagtatccatacgaaatgagatgttcactgcgaggaaaaaaaaaagcataagcttataacaagatcataactgtattggggataaataaaatgaatgtataaccatacgtattcgttgcagcgtagagggtattgcgaaagagtgcaaactcagatttactcattgaaggcagaagttcatatgagccccttttttattttgataacaactctgctacaagaaaaacttcagcttcagacagagttggtttccctctttctcgcgctggagatgaatctgaaacatcaacataaccttcttcctgtacattataatgtaatattagagcaaagaagaaaaccatcatctagtttgaaagtaggaacattagtttatagtattaaagatgttgtgtttatcttgtttagagcatacctggttttcatccagatcatgtgcaccaatgtctcgagaatcattgatttgatcctgatagaatatgtcaaaaaggataagtaagtatttgtatgaaaaaattattgaaactgatatgtaaaaaacataaatttttgcagagatggacataattataatattacatatatttgaaaaaacctcagttggagtgggagaagattctgattgtttgtcaggtttggaatttgtatcataaattggatgggaatatattaccatagcctgcaattatgagattggttttggaaatatattagactatctttcgcaaatataaaatgaggagacctattataagtgatatatcctgcaaattatttagtaaccaaataatcatgtcaactgtttaccttcatggggtcaccatcgaagttgacttctggtggcgactgtgacaatacctgagatactgcagccgactccaaagtgacctaaatgtagaagtatcaataagatggtgagaaaaacataagaaaatattatagcgtatccacaaactcctgtccaatttaaagagaacaagagagcctaattaagtatagacataaggttgaccttcttatttgcgaactttgcaaaccctaacaacgaatgagatgctgcagccgcctccatggtgtcctgaatgttgtagtaaccaaaaaatatggtgagtaaaatattagtaaatgttatctgcaaattaactagcatccacaaggttctgtccaatataaataattaacttactgcagcaaaatttatttcaaacataaggttgacatcctttttaaagaccataattagttcacacataatcttgacttctttaagaacataattagttcactaatagttcagacataatcttaaagaaatactttcgcctgctgttcttcaaagctctgatctattggcagatctatatcagaatgtgatgcagtctccctgtccaatgagtcctgaaagtaattgtagaatgaaattgttgtgttaaatatacagagatgaaaatagaatatgtattttcgatggttaaagaaaggctttggctttgatttgttgtgtctatgcaatattctctttataaaagtacctgcattttgccatcaacatctgtttcattggcatttgtttgcatttcttcggagttgtgttcttttggtagatctaaaccagaatgtgtggcaggaactctatccgatgcgtcctgcaagtaattgtagaatggatttggtttaaaaaaaacataaccattggtcttcgcggtaggtccaacaaatactatattatcttacatcaataatgtgatcttggttgatagggagtagtttttcgacgctagggactgaccttggatcaacctgttttgaaattacaatagtcaatgtctcttatatataagtcattatgggtgtccaagagaacatgtccacccaggataaatattaaagacagcataaaacaaaatgtagttttgatggttacagaaaggctttgatttgttgtgtttgtatttatagaagataaaagtaccttcatttggctatcagcatcttcctcattggcattcgattcctgttctgcagagttgtgttcttttgacagatctaaaccagaaggtattgcaggaactctctccgatgcgtcctgcaagtaattgttgaatggatttgataaaaaaaacaaatataaacattggtctgcgcagtatgttcaacaaaatactatattatcttacatcaataatatgattttggttgatagggagtagtttttcgacgctagggactgaccttggatcaacctgttttgaaattacaatagtcaatgtctcttatatataagtcattatgggtgtccaagagaacctgtccacccaggataaatattaaagacagcataaaacaaaatgtagttttgatggttaaagaaaggctttgatttgttgtgtttgtatttataaaagataaaagtaccttcatttggctaccagcatcttcctcattggcattcgattcctgttctgtagagttgtgttcttttgacagatctaaaccagaaggtattgcaggaactctctccgatgcgtcctgcaagtaattgttgaatggatttggtaaaaaaaacaaatataaacattggtctgcgcagtaggttcaacaaaatactatgttatcttacatcactaatatgatcttggttgagaggaagtagtttttcaacgctttggtttgaacttgcatcaacctgattggaaattacaatagtcaatgtctcttatatatagagagaatagagaatattatgggtgagcaagaaaacctgtcaacccagaataaacattaaagacagcagaaaagaaaattttgttttgatggttaaagaaaggctttgatatgttgtgtttgtagttataaaagtacctgcatttggctatcaacatcttcctcattggcattttgatctttgacatcagtgtcataaacaggattgccttcatttgcatcatccttattagagtgctctgattatagtggagtaacaaatacatccatggggtcatcactaatctcctgcaataagatgcgttgtagtcgttaattcaaccaattttgtaaatagttgaagttaacaattacactaaccgtgtttatcaatggggtactatcactggagtcttgacttttatctaaatgatcatctgggacttgctgtgcaacttcaggctgtccaattacatgctcagacagcgtgtgtgactgagatgaagtctatgagaaaattaaaagatttattaaaacagcctgaagttgaagtctatgataatgttcaaatatttaaaacagtttgaaatcttgaatacctgaggggtttgagattggatagggacctccattgtcttcttgcgctttggtctagatgaacatgcaacaaaactggaggagagttttgtggaccgcttgaatcttacagctttttttgctttttcaagcttcattacacggttcgatagctcttcaaccttagtttgtagttcactgatgagcctagacttctcatcatcagagagattgagttccggtttactacgagttgaataccttcgcttggatttgggagccacagactttacacctaatttcttcttacggtccacaatgtgctttttatgaacaccagaattcttcttctttgggactgagattggaggcaatgtggcatcacctcctggccaatcggttttttggaattgatgagatgaccatatcaaattatacatgtgtgcaactttcttatctttcacctcatcgtcccactctgcccaactttggtcagcattaaggtctccaactataagcggatccactggcagctgttcaaaaatagaaggatagtaatagtatataagactggatttatagaaagagaatattatagacacaatatagataattgaggtgaaaaagaataccttaaggttgctttccaaagcatgaatctgaggatgcgatataacttgttttggatgagttaatcgtttccaaagtaggattgtcttagaggttgagtcatctaacaccaaatctaacagtccaggtatgtttcggaatgctatgagctgcaaggctagggggaaacctttcaaacggaatgttttctgctgaagttgactcaccaaactctttatagggtcagttgtcagctgtcttttaccagtggacttaccgagatttcgtttgtcgggtctcattcctactacagtcttcagaaaagactctctaccccaaggaaatgaaaggaatttatccaaatctgccaacatctctacatatttaaatgtaggcctaccgatttggttcgatgctatgagtacaccatctacaataagtagaaacgcgagcttaagtctgtggtcagatgacaatgtcttgcgtttgttggttagcatgtcagaaacatcccctaaggtaacagtcttgtctggaccaattaactcgtcccagtaactcttcatgccatcaacataaaccggatcatcatctggatcataatcctcagaaaactccccacagggcaatccagtcacgcaagcaaattcaggtaatgcaaatctcagggggtatccaccaaatactgtccacagctcgtactttttcttcgttaccagctgcgtacatagcaacgcatgcataagctttccagacatcgcacacttactaaccggcagatggaatagaggtccaaagcaagattgtagaatgaaatccaattcctttgtcccctgaaaaaccttccggataaaggatagaatatctggtcttgagtatatatttagccttcccctcggatattgatcggtggcgaaaagtctattaggaagatttgaatcacactgagaagatggttcctgagaggttgaccctgtcattagcaagaaacaagtttcagaagattaagattagattaacagataatatgaccaaatgaaaacgagttcacaaacgtctgtctattgcttgcttagattagattaacagtgtaagagtaccttccatagtgtaacagaataaacttgtctgccaatgctatcgatttagatgttatactgtcttccaaatcctgtaacacaaacagataaactcatcttagatatggcagcaatagatataggaaaaggaaattataactatatgcagatattattttgttttaaacaagtcaaaatctgaagtatatttttcatctccacaaaagaaaatcaagttgcaaatgaaactgacaaaaaaacagagagtgaacaaaacaaagttcacaaaccagcagaagattaggtgtaaccactaaactacagctaaaataaaatagaactgattagaaaaggatcactctgaagaaccaggagaaagacaactctaagaacctaacaaagcctagttagtgaaagaaacaaaaaataattccggctacttcagaaatgagaacaagagttaccaaaattcagcaacagatcatatggttttgtcaatcaaacgagtttgttacaaatgaattacgtttccaaaacaagaaattctcttgtttataactgaaatacgaaaagaaaactaaacaatgaaacaattcacataaagatatattacttatgtgattgtacaattactctattattgttttttgctaacatataacttagaagcaccactaaaatacatatcaaatgaataaagattttagttctgaagcaagaaacgaaagaaactctaattagaaaatcttatgatgaaagaaagaaactctaattataacagtatggctcacctctagcacagtcaaatatggactaagctagtgacgctctgcgagtaagtcagaaaggtacctaaaaatgccaaaatatcagagagtaaacaaaacaaatttaacaaaccaactgaagattagttactgaaaaatcaaaacacaatctgaattgatgtaatccaaatatagatgaccatcagaccatatccaacatgttcaagataacagccaaagttgataatgccaaacaatcagtgagtaaactaagattagttactgtaaaatcataacacaatgtgaattgattcagtgccctgtccacaaaaagggcgagtgctaattaactgtaagatcataacacactgagtcatcttggtgctagcttacctgaacttggagaaggtgagtatttaggcccgtaaatgaacctaaaagccaaaaaaaaacagacagagacaaccagtataagtaaaaagctaaacatgagagaataatcataggatcaaggtgaagtggaataacctaacaaatactagtaagtgaaagaaaaccaaaaaggttaaggctttacgagtaattgcaacaagagtgagcaaaattcataaacagagtatatggttttgtcaatcaaatgagtttgtaacttaaatactaaaaacgagaagcgaaaaccgaagatagaaactagaaaataataatcaaagagcctagaataactgttttaagggtttcgacaattcaaaatttacatgaatcataaatccaattcgatataagaacaaggagaaatttgggggaaataccagtggagtcttcagaagaaagaaagtcgtgtgcagcaatggtggtggacagtgacggagaagttggagagaatttagggtttgtgagcgaaattagaagtcgtcgtcgtctgtgtcttcgtctgagcgaacaggttcaccggaaaatcatctgcgtcgacgtctgagcgaacagagtcaccggaaaatctgaagaggatgatgtcgccggattcgtcttctacaacaaccagtaattagcagttttttagtggattaggtttttacgcgaaaggaaaagtcttcaaaagtcaaaaaggtaaagaaactgcaaattcgaggagtggtttggttgggatctctttggttaattcgggtttggtttaaagaaaaccggttagggtaatagagtaactttgccaaggcaaagtgcctgatgattttaaagtgtcgaaacacgtctaaacttatgaaaaagtgtttgtctatgcaatattctcttttttgaaagtatagttgaactcttagtcgcgagaatttcaatttaacatattgtatatgtaaatattttataaaattgatagtagcaaaaacagacaaaaactggttataatgtgtattattttaaacttcacaagatgaattgcatttgttggaagtaaaaggtaaaattgtaaaaaatggaagaatgagaggattttttttgcacaaaacgctaacataaataaagttaatttctgttttaaaaaggatattacataaacttagtcggtaatatactaatacaataaaacctctataaattaatactcgataaattaataatctctataaattaataaattcttccagtcccgagttgggacaagtgtaaaaagtaatacaaatcgataaattaataagataataattttttaaaaaatcctatgtaaatatatgatctcattaatattataaattaataattatataaatatatcaactatatatatatatattatatgtaaaaaaatttctttaaaatatatttataatatttttttgtttaaattcgtaattgtttttagtttaattcagttcttatattttagtgtatcaaaaactattggttttggtttctagacatgagaatcatgttttgattgtaattgaccgtagaaagatattttcaataatgaaagaaattttatagaagtttttataaaatttcgaaattatgaatttttttataatttaataaatattaatttattgataaattaaattctttctaaattaaaatttttgcagtcctgatataattaatttatagatgttttatgagtttgttaaaaaaaaaatcgttgtacttttttgtgaggtcggagatattattcgaaaaagacgggatttttaacactatattagtctttatttttctacttaattaatagtatagatttcattagaaacatgcaaaattcaaactaatcttcttcgtctcttaaaacctaaaccctaattgtcttctccggcgaattcaatttcccggggccaccgaggttcgtcggaattctctgttttcatagttttcgatgtcgcaattgatattaatgttccaatttaactgtcaatttcccgtttcaggctatttccggtttgtcgttagaattcaccgatcgatgtcgctcgtccgttgtttatccctcagatcggttctcaatcctcaacgttaccgatcatcttactcctttctcatccatcttcagaatcctcgtgaagaagaagaacctacacacaaaactcgaagttaccacagtatcattcaccagaactcgttaatcggtgcctcctcgacggctttctctcgctatcgctctgttttccaatctcctgcgacgatttcatcggatcgattcatttcgactttcaatttctctggttccggtgacgctgtcatcgattggttgttgcaatctgtggtttcgaggagttatgagttacataatgttgctgatgttcttgtttctcttaaccatttgcttgcattgttgaattctttcacattttctcaatggtaaggtttcacaatattacgtagatgattcataagaaacatgtttgatacgcttagattgagtatccttgctttgttcttgcaggtgggtgtttatcatcgtagcatcgcttttgattcgaggaatcacagttccggttatggttgatatgcttaacaacattgcaaagttttttaaggtaaagtttcttcctttatgtaatgcttcaaagagatagatgatgaaagcttttggtttgagtaattagtattgcttgttctgttgatggaaagttattagctatatgctctctcacagatctttatgtactcaaagagatagatagagcaaagttttgggttgagtaattagtaatgcttgttcttgttgatggaagttattagatgtgatctctctttaggatgtaatgataactacttagccaaacatttctagtatatttatctgtttggagaattgaattcattgtatgagaaatttatatggtgaaattctttttatacagagtctacgctcgaaccaaggagaggttctagacaaggtaaatctcgtaactttgctatgaggtttctttaaagttttgtggtgagaactgcaatgtgatttgagttaatacttttgaggctttttgtatcattcaggtatcatttcttaataaaagtcgaggagtaatgtacaccatgttggagaaggagtaagtagctttatgattacatttttctctaagacttaaaagcttaagaagctgatcttttcgttgaggatatttagttgtttacttttgtattatgatacaggttttttggagttaaaggatcagtcattggtcagggtattcaagttcctatcttctggttctcaatgggagagttgaaacaaaacatggttgagattcttatgtcacgtcttcggggtaagattttgtcggcggaattgatcaagaacggagtcttaagcagaggacgcttagtggtggtcgttggcgatggattcgggattgaaatccaaatgttcgatcttgatttctctcttatcttgaggcgtcgtcaagtctcgcaaagctaataagtttcgatttcattcaataattggagcgttttgcttttagtggctcaatggtgtttatttgatgatagagccagcacaaaatgtgaataaagcgtgtttggctggattcttttttatttaggcaaactaagttttcattcattcgaaataaaagattcaaaaagctactatgaaacaaaaccaatagagcattttacccaaaaaaaagaccaatagagcaaatacaatttatttgggccgaaatttgatgaaagcccagataataaatgggtcactagtaggctcaataatacataaaacagaattatagagttggcccagttacatgctaatttggcgttaataatattcctcgccttatggaacgtgacaatctatataacagtgtgttcgagaacaatcagccctcagtgataaatattgatgatgaggaagaaggagaagatctcttcaacgataattatatgaaagattataagctaatggatgggaatggtcagtatgatgatgatcaatatgacttagacttagatcagattctacgagaccgttctgctgctgatgctgtacttagtgctcgagaaaatcgtaaccacaatctttttcacgataacgataacttctagggatgcagatgcagccgaagaagaagaagttgttctgcaaatcactggggatgagcatgatgaaaaggaggaagacggagaagatctcttcaacgataactttcttgatgattatcggcatatggatgggcatgaatgatgaggtagagtttaatggatctgatgagtcagttgatgttgaatgtgattaagtcatttagatcagattatgaaaagtttgttctccatggtgttttttttccgataaggttgaattgttataagtttgttttgattgcaataaatcaacattaattcatcaaatttagtttttgattagtggacgagtaacaatcctaaattatttttatttttacagaacctgaattttaaattttatgacgtagtattatttgtttaactagattttaacccgcggtataccgtagatctatattttattttagtgttgacactaattactttcgtaatatataattcacagttttataattatttgttattttttatattttgtatatttagatatattatttagtatgtttatagaattgaaatttaattatttttttgtatctagatattaacctgcggtataccgcgggcctatattttcattaattaggaaataactgaatattttttagaatgatttaataaatttatgctattgtttgatttaaatgtataattcaccgcgagacgaaattttataactcaaattttaaagttttaagttgtatttgtttattttgttaaatgtttaatattgtataattgtattttgattgttgtttctcggatttcacccgtagtacaccatcccatattaatattgaatcaaacccgtcaattctaagatttcactcttggtagtatttaattgtataataataatttgattgtcattctaagatttcactcctagttctatcgcaaattattatcaacccaaaccagtcaattctaaaatttcacccgtagtacaccatcccatattaatatcgaatcaagcccgtcaatcctacgatttcacccgtggtagtatttaattgtataattatattttaattgtcattctaggattccactcctaattctatcgcaaattattatcaacctaaaccagtcaattctaaaatatcacccgtagtacaccatcccatattaatatcgattcaaacccgtcaattctaggatttcacccgtggtagtactgcgagagaaatcttataaaagaatcgaaatgtgtttttaaaaaattaaagttttaagtgttttttttttaatattgttaattttgtttagtgtttaagattatataattatattatgattgttaattataggtttttttccatagcataccatcccatgttataatccactcaaacccgtcacaccatataaccccgtcccgtgaaactaaacacaaatttatcattttattataaatttcaaatatttataaaattataaacttcaaaaaagattaatattgacccaaacttcatcattgaattttgagtgttatatctaagatttctctcgcagtatatcgtctcatattaatatcttttatattgtttaaatttcttgtaaaatttaatttataattttttgaaactttttaaagtttcaattctttaaaataaataaccctagtaaacaaaccattttaattttggacacctcataaatcaagtttcatgctcattcgtaatcgaaatcattttggtcctttttatagtatggctcttaaccattatccaatttttttaagcgatgttggacattgtacaatcgtaattattatccacccaaacccgtcctactatataacccagtcccgtgaaattaaacataattttgtcattttcttataaatttcaatattataaaatttgaaacttaaaaaaaatacaatatcgaccttgattatatttaagatttttcatgtaatatatcgtctcgtattaatatattttatatatatttataatgtttaaatttcttgtaaaattcaatttataatttttaaaactttataagttttaaaattataaatattttaaagcattttttaaaattataatatttaaattttgataaagttataatatttataatttcttgaaacattttaaagtttcaattctttaaaataaaaaaacccgagtaaatcggataactattttaattttggacgcctgataaatcaagcttcctgctcattcgtaatcagaatcattttggtccttttataatatggatctgaaccattatccaatttttctaagcgatgtgggacattgtacacatattatttcttcataggttgaataatatatgcccgttttaaaaaaattgaattacatcatatgcagaaaaaatataatattttattaactatatatattttatataaattcaaaataaataaagtataagatcaaataaaagtgaaagaagaattatatatttatgtttaaattaggtagaaatattttaggaaattagttaaggtaaataacaaatatggttagtttagagatattgtttatattaaatttggtaattaaatcattaattttcgttttaaattattaggttttaggtaacttttccaaaaattaatgttatctaagatgagaacagaattaaacatgttatccaagatccgaacagagttaaaccgggtaaaacccacccatttgaattaattgttaaattatggctcaaatctttaacattatcttcaaaaaacgtctacaaaaatgtatatatagattattttaaagaagatttttgatcctattgctagttatctaagtttattacctttttagaaatttcacgaaatcttattataaccattttggaagttttaaaaaccatgttgattgataggtgatatatgaacaatctatcatctttatgtttaaagagatagaaagagaaaacttttgagttgagaataaagtaaaagctataaggatttttattgtatttcaggttggggaagatctcaaaaaagattggcaactattcaaattgatcagatgcatggagactaactcatagacgggacatgtaaccaaactgaggcagcggttctaacattgagtattgatagatgagttggaaccatagggaaaagaatgtgggacgttcaaaaatttcatggaagaaaatgtgcatgtacaatactagaactagcgtatatacctctcgagtgtctgtgcatattctcatatccctgaccctcgaaacccggggaagaaaggtgtggattgtacttctccttgcttcataaaaactaccaagccaaattatagagaaatatataatttggtgttagactcgagattgtttactataaagctttttgatacacgatcattgactctacaaaaacaaaaacaaagtagaggagcatcaatcacaatccccatgacaaatacaaacgcgaaagaaggcttttgtattagtgtgagcctttttcatgaccgagagtgcatgcacctgatagacttttgcatcattccaaagttacaacaatatttaacacttccaaaactggacaacatgagacaagtgtgtagatagtagattcatcaggatacgaattgttgtgtaaatgcgtagtcttcaaacaaggtaatgaaacaaacttaggattaaccaaggccaaccaagagagttttaagtataccagtgtcgcacagacgtaaaacctttggggcatcttataataagaagtcatttgaggacacaaaacaacatctagatgttggacgcttaaccgcaacatcaatccacaacgttagataagaccattatctacactatacttttataataagaaaatttcactcaagtctaaccaaaaaaatcatatttttagttctttttagggttttgtgcaaaaaaaactcaaagtcgcccatttttgcaactatatcctccacgtccaaaaatataaaataatcctatgaagtccaaaacaatacgtaatataaccctttttgcaattttacatatattgtaaacgttttcacgatcatatacatttgtttaaaatatataattgaactcctcatctcgaaagctttgatttgatatattatttatcaaaattttaaaattttgacaataacgaaaaaatggttattttgcttattattttggatttcatcggattattttgcatttttggatgtaaaaggtaaagttgcaaaaatggacgactatgagtttttttttgcacaaaccccttctttttattggttttaggtatttcccgctattcgtttaattatttaattatgtagtttctctcaaaattttgttaatggtataactatttgatacaaagataaaataaaaatcaaactcaaatagaattattattattttttgttgctagaaaagacaaaacaaaaactatttgacatgttatgcaatttatacaagttatgaaatgttattttttgtcggtcaaatttttattaatttagcatgttgacccaaaaaaaactctttgacatcctatagcaatgtcaaactaaaataaaattgcataactttcagaagtatattattttggcttaaaacattaaacaggaataaaatttgataaaatatgtctatgggccataaaactattataagagataattgcgttgatttaaacacttgggccgaattagtgaaagcccatacgatgcatatgccaaattggcgccaatatttcccgcctaatcgacgagagaacccaataaacgagtgtattgtgccctgattctgtcgccggaaacaatacacagatagagcgagagaaatggcgggagaaaattccgataacgagccgtcttcaccagcttcaccttcttccgctggattcaacacagatcagttaccaatcagtacaagccaaaactccgaaaatttctccgatgaagaagaagcagctgtagatacccaagtcattagagatgagcctgacgaagcggaggatgaagaagaagaagaaggagaagatctcttcaatgatacttttatgaacgattatcggaagatggatgagaatgatcagtatgagtctaatggaatagatgattccgtcgatgatgaaagagatttaggtcaggctatgcttgaccgtcgtgctgctgacgctgatcttgatgctcgtgaaaatcgacttgcgaatcgcaagcttcctcatcttcttcacgataacggtaattattaaatccctaattggaatctggcgaaattggaaaccctaaatgttcactgattttgggattttgtgtttagatgtagttttatctttatgttatgtgtattgaagtatggttgttttgtttatagattcagatgattggaactatagaccttcgaagaggtctcgaactacggttccaccgagaggtaatggtggtgatcctgatgggaatcctccaagttcgccaggagtgtcacagccagatatctctatgactgatcaaactgatgattatcaagatgaggtatgagtatgaatctttctgcgtcatggtgctaggtgtattactactagtgtctaatggttggtgaatttcttaatataggatgataatgatgatgaagcagagtttgagatgtataggattcaaggaactctgagggaatgggttatgagagatgaagtgagacggtttattgctaagaagtttaaagactttttgcttacgtatgttaaaccaaagaatgagaatggagatattgaatatgttcgtttaattaacgaaatggtttcaggtactttcgttttctttgtgctatagctacataagttctctttactggtaaatttacagtcattagctctctgaactatctatgtgtttgcagctaataagtgcagtctggaaattgattacaaagaattcatacacgtccacccgaatattgcaatctggcttgcggatgctccacaacctgtgcttgaagtaatggaggaagtttctgaaaaggtcatctttgatctgcatccaaactacaagaatattcacacgaagatatatgttcgtgttaccaacctaccagttaatgatcagattcggaacatcaggtaataatatcgctgaattcatgggtagtgactcactttgtatacattttcaagatttcaacttaaaccttattgtttgtgaattgtcaggcagattcatcttaacacgatgatccgtatcggtggagttgtcactaggcgttctggggtctttcctcagctgcagcaagtgaaatatgattgtaacaagtgtggagcagttttggggcctttcttccaaaactcttattcagaagtcaaggtcggttcttgttctgaatgccagtcaaaaggaccgtttactgttaatgtcgaacaggtaggattctgtaatctctctatcattattttcctttaactctacgaacttcaatgtaagttattggaatgtgaaattgaccatactgttaattactcccttgtttcagacaatatacaggaactatcagaagcttacaatccaagagagtccaggaacagtgcctgctggacgacttccaagacacaaagaagttatcctgctgaatgaccttattgattgcgctcgtcctggggaagaaattgtacgttcatcatatattagccttctagaatacttgcacacatgtatatgatcaatcattcatgttatcttgcattggattttttgcaggaggttactggcatatataccaacaactttgacctatctttgaacacaaagaatgggtttccagtctttgccactgtggtggaagctaactatgttacaaagaaacaagacctcttctctgcgtacaagctaacccaagaagacaagacacaaatcgaagagctatccaaggatccacgaatagttgaacgtgtaagttggatatcaatcctcctaataaatcctttgaattgcttcagagttcatctcttttaacattatttcaatttctccttcagatcattaagtcaattgctccgtcaatatatggccacgaagatatcaaaacagctcttgctcttgctatgtttggtggccaagagaaaaatatcaaagggaaacacagattgcgtggagatattaatgtacttttactaggtgatccaggaacagcaaaatcacaatttctgaagtaagaaaactatcctgaccagcttacttaattaatatctttggtgaatattttcattaactgcattaatgtttcttctaggtatgttgaaaaaactggtcaaagagctgtctacacgactggaaagggagcttctgctgttggtctaaccgcagcagtacacaaagatccagttacaagggagtggacgcttgaaggaggggctcttgtacttgctgaccgaggaatttgtcttatcgatgagtttgacaagatgaacgaccaggacaggtaacaaaatgcaactaatgatagttacttttctgaaggaaatggtgctgacgatataagtttttgtaaccagggtgagtatccatgaagccatggaacaacagagtattagtatatcgaaggcaggaatagttacttctcttcaagctcgttgctctgttattgctgcagctaatccagttggtggaaggtaagctagaaactaatgcccttcattgacctaaaatttgtaattttgatcttgctaatttgtttgtgacattgcaacttcaggtatgattcatcgaaatcatttgcacaaaatgtcgagttgacagatccgatcctttctcgttttgatatcttgtgtgttgtcaaggtattttttcaaacctctgctcttgttcttgcatatcattgattgtattaattttttggctattgaccaattatatggctgcaggatgtggttgacccagttacagatgaaatgctagctgaatttgttgtcaatagccacttcaagtcacaacccaaaggtggtaagatggaagatagcgatcccgaagatggcattcagggatctagcgggtcaactgatccggaggtttgtgattttcatgtgtagctgcttctttgaagtttccatgtttacaggtcttgatctatatgttattttctatacaggtccttcctcagaacctgctgaagaaatacttaacatactcgaagttgtatgtattcccaaaactgggtgaactagatgccaagaagttagagactgtttatgctaatctaagacgagaatcaatggtaggtttgaattcatgattttgagtgtactgatgggttaccatctttcctaaacatcatgtggcttaatctcctgacctgcttaaacttttgtttcagaacggacaaggagtttctatagcgacaaggcaccttgagtccatgatccgaatgtctgaagcacatgctaggatgcaccttaggcaatatgtcacagaagaggatgttaatatggccattcgagtcctacttgactctttcatatcaacccagaaatttggtgtccagagaactctaagagaggtattaaagaacatttgagtcagttgttttgtgagcttgtatctatggaattctgatgtctgaattgatgaaaactcggttattcctgtgcagagtttcaaacggtacattacatacaaaaaggacttcaactcattgctgctcgttcttctcaaagagctcgtaaagaacgccttgaagtttgaagaaatcatttcaggatcgaactcaggactacctacaatcgaggttaagatagaggaactgcagacaaaggtaagttatcatatggttaggctaaatttagaagtatgattcttaatacctttttaacaactcttatgtcttacatttgcaggccaaggaatacgacattgcagatctacgacccttcttttcaagcacagatttttccaaagctcacttcgagttggatcatggccgaggaatgatcaagtgtccaaaaaggctgatcacttggtaaaacaagaagacgagcttcaagttactatcaacttaggtttatttatcattgcatgaaaaaaatgttggatatttaggaagatagtttcgttttgtgttaagattattaaagagctgctcaaagatttgctgttaggattatgcaatactcatcttaagatattaacgaagcattcctcttcctcaatactttgaccgttgaatctgagtaaaactcaggtggcgatttttcaatcggtatgtgagaaagaatttcggatgctagcttttgataccgcaagttgttaccaatcaaagtggcagtgtgaaaaacaatggaaaaatgtcattaaaatccttctcttatgttgacttttcaaaaaataaccaacttttgttgacatgaccatattgagcattctgttatgtagattaatagattccgataaatgagagtaattttttgttaacagtgacacctgttaattcaaaacgttatcattttcaacaacagaacgacgtcgttttgttgtaatgactgaactaaaatcccaaatttaatatacgattcctaaatcgagcaaaatccctaatcctaaatccccatacgatttgaaatccttatcccaaagttaatatacgattcctaaatcgaacaaaattcctaatcctaaatctccatacgatttgaaactaaggatttcattgagccgttatgacaaacgatgacgttttattgttagagggaacgttgtcattttcaaataacgagtctattaacacacaataaatttatgataacatggtctaacctacttaatgttatgcctgatatgaccaggtcaacgaaaatttggtatttatttaaaaaatcaacaaaaattgaatatttatttggaaaataatcctaagtttgatatttatttcgtttcgagaattgaagatttaaatcaacgttttcaataggtcgaagattttagtgacatttttctcgaaaaacaatgtaatacttgttgatctggctttatcatcaccattgtactaagtattctaacatttgaaagttaatgaaaaatatttggatacataagaactacatgccgtttttactttgacaatgtgaactccttgctgtttaaaataccaaggcacatttgtcgactgattcgtgtgttcgtcgagatttttttttgtttattgcaattcggagaagtttgggtcgttaaagttcgagtagggttcataaatatagtgaaaaccaccgtttggtgatacttcgtcgtcctcgacactctcagattcatcatcgaacctggtatgagctctctttcgtctttggtgctctactagttagggtttcgccattactatctccatcctctgttcccagagttagaatttttcttctgaaaacgcgaattaagctcgacgttgaaatgttttgctcttcagattaagacgcgaatttgagaggaagctttattttgtgtgtagatggcgaataatcctccgcagtcttctggtacccaggtttgctctctcttttagtcgtttcatgcttctatggaattcgaagtcactcagaagtcactcaattgatatgttctaagtaatttgatttagccaaatatagttgatcaatttcaagcgtgttagggttctttgatcttagtctctttcattgtttaatagcttggagcattcactcaattgatatgttgtcgcgcctaagtgtcagaatcaaacattcaatagctgttatttggtgaaagttttgttttagtgtaatagttagtgtgtgaactattggatgtgcttatgagacccttttccagcagtttcggccgatggtacctggacagcagggtcagcattttgttcctgcagcttcacaaccttttcacccttatggacatgtacctccaaatgttcaaagtcagcctccacagtattctcagccgatacagcagcagcagctctttccagtgagaccaggtcagcctgtgcatattacatcatcctcacaggctgtatcagttccgtatattcaaacgaacaagattctcacttctggatctactcaaccacagccaaatgcacctccaatgacgggctttgctacatctggacctccattttcttctccatatactgtgagcttctgcttttttcttgtatttgttattcggataactttttatatatgattcgttttcactttgctggattcttgttcctgcagtttgtaccatcatcttatcctcagcaacaaccaacatccttggtccaaccaaattctcagatgcatgtagctggcgtccctccagcagcaaacacttggcctgttcctgttaatcaaagcacatcacttgtttcccctgtgcagcagactgggcaacaaacaccggtcgcagtttccacagacccagtaagtgactacgtttactgatcacaaatatgttttggtgacttgtattgatgcctatacctactattaatcatgaaaccatctcttactaaaatgcgaatcatatcatgttgagttgtattaatatataaattgtgacaaccaacatatgtcttctgccatttgtagcatttcaatctttttcgctgtattattttgggatagtgtttttatctgaatcgagtgttcctcagctttctccgaattctttagacttagtaatttcatgtacttcctctggatcgttacttaggtcaaactctgattaggtttgaaaacgtaaggttttgatctagagaatcgtcaaactctttgaagcctcaagaagcccctagcacaaattatttcagaaccttgtcctatttatactcaattactaacttgctgatgtggcatagttgatgaactcttatcgaactcatttgtctagtctttatgtatgcaattgtagctaaatgtgcttgttggattttggtaacagggaaacttgactccgcaatctgcatctgactggcaggagcatacatctgctgatgggagaaagtatgctactaaactattatttcagatttaggccaaatatcttcctacatgtcactctttgtactgtagatttgtgttcatgcagttccaatttgaaattgattacttttagttggaaattgtttgtaagcttcttactttttgtacctttcataaggtcttccatgcttccttttttttttttttttttccatgcagatgtctgtttcatggttttgggtctatgaattcgctttatctgatatatacttatctttctaggtattattataacaagcggacaaagcaatcaaattgggaaaaacctcttgaactgatgacaccacttgaggtaatacttacaaagtagtctgtcttctaagatgattttcattttactggttgattaagcttaccaggcttttagttggtgtgccacttcactagtgatgtaaatggttgcagctttgtctggaacaacgttgtttaatttgtatatttttttcactgattcggaaactccataactgtggagatatttattaagactgctacgtgctcatctgaaagcagctttcactttattgaaacaggctaccgatgcttttctgtttctcatttttttttttttgtgtaaatcggtgtcaactttgtaggcagtttggggataatttgctaattttttatgctcgttggattaagaatctcctgataatccttatttcgtttttatattaagatcaaatctaccgtatctatgcatgattttacagtttctaaaatctctttctgcagagggctgatgcatccactgtatggaaggaatttacaacacctgaaggaaagaagtatgcatctttaaatttcatttagtctttgtatcatgcttattctctattgttgcaactgattagttgttttaatttacgcagatattattataacaaggttacaaaggagtctaagtggacaattccggaagatttaaaggtctacctatttatctctctctcatgcacattccccaatgcaaagcctatgttaaacctgggtagttgttgtatgcagttagctcgggaacaagcccaactagctagtgaaaaaacgtccctttcggaagctggatctacccctctatcccaccatgctgcatcctcgtctgatctagcagttagcactgtgacttctgttgttcccagcacatcttcagcacttactggacattcttcaagccctattcaagcgggtttggctgtacctgtcacccgtcctccctctgttgctcctgttactccaacatctggtgcaattagtgacactgaggctactacaatgtactatttttccttgggaagttttgtttgatgtttatacactctgtcaagcctttgaatttaactgttgtgcctatcataacagaaaaggcgataatttatcatctcggggggcagatgattcaaatgatggagctacagcacaaaacaatgaggcatgattttaattttcctttctacaattacttgcctagattctaaaagtctattcttttgtattccgtttacctgctttctacttcagcttcatgaggtcaataataacttgtacaagttattggaagacttatgctcaataattactatacatgtgatgatgtggtggtgtcgttaatatttatggtctagcgttacaccttggtatgctttctaattattttgaattttttgttaggctgagaataaggaaatgtctgtgaatggaaaagccaatttgtcacctgctggtgacaaagcaaatgtcgaggaacctatggtatatgctactaagcaggtactttcttatcctaattttctcctcctgatatctctcatatctgtaccataatgttttatttgccattcatcaacttttgcactgttattttttctaggaggccaaagctgctttcaagtctcttttggaatctgtaaatgttcattccgactggacatgggaacaggtaatctggacgcatacgcaagtatttgtgtcactgatccatatggcctgcattctctccctaaccttctatttggttcattgctgacctgatccatccccttatagacattgaaagagattgttcacgataaaagatatggtgctttgaggacactcggcgagcggaaacaagcgtttaacgaggtatatagtttcttagttcctagctataatatgcaaatgcattttaagagcctgtctatataatgtaatgcagacttccagtctttatttgtgatgtaattatttattcgctggtagatttctactttaagtagctttatgcttacatctgattgtcaaataaattttttcagtatcttggccaaaggaaaaaagtggaagctgaggaaagacgaaggaggcagaagaaagctcgggaagaatttgtcaagatgctagaggtatgtactaaaggagtcagaagttagtgtttggtttgattagtgtgactgattagctgattatgttatactaatattgacctcaggagtgtgaagaactttcatcatccctgaaatggaggtgtggctttcagttaattacaagatctttggttcttgtctttattttatatgtgacatatgtgctaatggaaactattccctcaccagcaaagcaatgagtttgttcgaaaatgatcagcgttttaaagctgttgaccgtcctagggatcgtgaagatctttttgacaattacattgtggaacttgagaggaaggtaaccatcagactttttcggggggctttcgttttcatttgttgatttggctttttgattgtttggtgtgatactttgctctgctaagcaaaacaatgcatgcctatgaacatgaaggcgttggacaaagttttttttttttttttggttattacagtccaaatagttttcgacctcagtatgatcacaagagacatgtcatatttacgacgaagcaattatttgggtgggcatttagattgtggctgagataagatctggtgaaccagcatggtggctttaagcttctatagagaatatcgtttgttgctttgtagaagaggcaaattcattgtgtttgaattgacattatgaatcttttaatctgcaggaaagagaaaaggcagcggaggaacatcggcagtatatggcagactatcggaagtttcttgaaacctgtgactatatcaaagtatatcattgtttgtgaagcttattcctgcgaacctttctgtttcatagaccttgacataatgccttttataatatgtgtttgaaggctggtacacaatggcgcaaaattcaagatagactggaggatgatgacagatgctcatgtcttgaaaagatagatcgtctgattggttttgaggtaagtaacttcatcaagtagttcaggctgccacatagaatttgtttataatgtttgttattgcaggaatacattcttgacctagagaaggaagaagaagagctgaagagagtagagaaagtaaggtcaatgttcagggttgtaacctcattttttgttcttatgtagtccaatgctcatggtttcattttcttgtggagctaggaacatgtaaggcgggccgagagaaaaaaccgtgatgcatttcgtacactattggaagaacatgttgctgcaggcatccttacagccaagacgtactggttggattattgcattgaggtgtctgaccaatttagatctttactggacaaattgaattttatgttggattcttttcctcacttattttacgtacagttaaaagacttgccccaataccaagctgttgcatctaatacatctggttcaactccgaaagacttgtttgaagatgtcacagaagaattagagaagcaggtaatttggactacatatatatagtgtaattctctattggtagagtattccacctatgcgtgaatctgctagttatgataatcgaacctttttgtgttttgattgacagtatcatgaggataagagctatgtgaaggatgctatgaagtcaagaaaggcaagtcaaggatagcttcaatttctacttactaattttaccaattttttttatctaatccctttctctacagatttccatggtctcctcgtggctgtttgaagattttaaatctgctatttcagaagatctcagtactcaacagatatcagacataaatttaaaggtaaatagaacatgtgtcagtacataaattaatcaacagaaacggctatgtgtacattggaagatatattaggtgtgaagaagttcttgtaaagttcagttatatagggctctgattcatttatttttccgttgtttatcagcttatatatgatgacttggttgggagagtgaaggaaaaagaagaaaaagaggccagaaagcttcagcgtctggctgaagaatttaccaatctgttgcacactttcaaggtatatctatcttaccaggggtgactttctttttgtctggattcactgggacgttaaagataattttttgttttggttaaggaaatcaccgtagcttcaaattgggaagatagcaaacaactagtagaagaaagtcaagagtacaggtaaataatttattgccttgaataggttgcttcatggcttaccttacgtaaaaaaaggttgtggtattaccttcttaaggtcccattttgaatatctttagatcgattggagatgaaagtgttagccaagggttatttgaggaatacataacgagtttacaagaaaaggcaaaggagaaggagcgtaagcgtgacgaggaaaaggtactgattcttcatgccatgaaatttatttgtcttttatgcaagaacggatctcttagacttttattgttgtggacttttcaggttagaaaagagaaggaaagggacgagaaagagaaacggaaagacaaggataaggagagaagggaaaaggaaagagaacgtgaaaaagagaagggaaaagagaggagtaaacgggaagaatcagatggtgagactgctatggatgtgagcgaaggtcataaagacgagaaaagaaagggaaaagatcgtgacagaaaacatcgaagacggcatcacaacaattctgatgaagatgttagttctgatagggatgacagagatgagtcgaagaaatcatcccgtaaacatggtaatgatcgcaaaaaatcaagaaaggtaggtacaccctagacttgagttctgaaattcgttaaagatttaaaataaagagggatggttttttcttggtagcacgcaaactcgcctgaatcggagagtgaaaaccggcataaaagacagaaaaaagagagtagtcgccgaagtggtaatgacgagctagaggatggagaagttggggagtgatagtgaaattcgacattaatctgaaacctttctacatcccaattactttcttgattcatatttttacactgtaatgatatttttgttttcatttcatttctctgttaattggatatatactgaaaatctttgattcttactgtcaatggagaaaaaccacccaaaaaagagtactggagtttacttcctctgtttattgtttgacttgagacaaatcatctctcatcattgctttcctcctccactggccactgcaactatatcgatattacacttggtcctggaacttctcaacacacatatttatatgatctgttagcggttgtgacttgtgacaaagtacatttacatttttgttgtgcatacttaaatctcaacctccaaccgaccgaatattcatggatgctccttcaccatcgtcttatcaatgaagtaagcaactgcaacaacatacatgaattcacacatcattcattagcatcacctttgaacaaacacggtaaatactgaaacagatgtaagcaaatgttccaactttcttcttggacttaggagaatgcattcacatacctcaaatagctcgaatgcactacccttccgatacgtatcatctttcttcttggactctgtaggaagcacactgaataacaatgctctccatcctataagtaaaacagcagtacttcccattgtcaccaacacaaagctatatgccggaatgtgacctgatgaagctgacctaatgataattccaagctgtaacgaaaggaacaagctttaaacagtttagtagagataccaacaccctaaacctacaatgtcaaaaagattggtaaatgtcgccttaccggagttccgacaatccaagatttcgcagctgcaaccacagctttagactttcccttcattcctcgtccttcctccgcataaccccccaagaaataagcactcagaaaccatcctgccacataaagtttccatttttacttgaaacaaagcttctcaaacgcaagatagataacagagtaacgaaaacgaatcaatacccgcaatgaaagggtcagctgtgtggagagtatcaagagaaaaaacagggaaaccatggctaaatctcccaatggcagagaagataagcagagctaaaacatcaccacccgcaagtaaagccacacgactgaaagaaacaacacaaaacatttgagataacaatacaaaagcaatccttcctctagagagactaaaacaaagtaaagttagagtttttaattacccccatttggtaatgttagaagatgaagtagatgacggtttatcgaattgaatcacgccctcgagaggaacattatcttgacccacgaaaactgtttcatctcctgaagaagggatttgagaagctgaggttgagggttttgagttgacgcttccgtcggggttagagagagcgaggacgacgcggggacgactccggtgagtgtttggtgcagggaggagccatgaatcgggagaagagaaaggagaaggtttggatttggtgatgaatctgacggcggagacaggtccggtgggagtgcgaagaactaacattctcattgtatcttgtcaagccaatcgtccgccacactctcatattcatatcatcaattttcttatcagtataacgaatttaatttttttatgtaaaaaaaaataaaaattatgacagtgtaataaaaaagtgttttgctttgtggtgactataaatataaataatactcctttcgttttatattataaattgttttgaattaattattttattttacaatataaatttgtttctaaatttttatgcaaactatatattattttaatatattctaaatatttatatcatataattttttttatgattggttgattttttaaaagtaaatttttttatctgtgtgttttttaactaaaacaatttaaattatgaaacagaaaaataaaattttatttcttcgaaaagatcggaatagtgttcttgtgactgaagtaataaattatatgttacaatttgatcgatcatatacacaaaaaataaattaatatgcatactatggagtctacacaaattataatttatcctcaatattcacgttggcgcatcaaattgttgacattttccaaaaagatatttagtatttaccaatttagagattcaattttgaacaatcgttccattgattatttttttcttttttcaaagatagttctaaaaaaagttttattttattttattttattttttgttcagattttcaacgttaatggtggggcaaacggttatatcggttggtgacggtcttgtttctctgacgataatgaggtgcggttgttccgccttctaatgcgagttgtggtgaacttcccgacgactttacgcatccttctagtcgtaccactgatttaaagacaccaaaagagggactaaagaaagttgtcagctcacttgtcggaagggctgttgcaactggcggcggaagtcaaagacgggttggtggggttcactacgagtcgagacgattagcgccagatttgtcggatctgaggtggctaggtgtgcagaggcggttaggattttatttgagtcaaccgctctaatcattgttttcgtgtgaccggatttgaggttgtggcggtcatagaggaaacttgtgctggtttcggcgatggaggtgagagttcgatttaggttttcggttacttgggtggggactggttaagcgggtctattgtttattgtgagaattttcaggtcggctctgatgttggcttcgggttagtggcgagaatcgataactttggtcatgtcgctcgagtcgtgtaggagcagcaacgaaggcctattgctatcgccggagttggaggtggagccggtgttgcagaattaacagactttttcagatttttgtgcttgtgttgactaaattttcctttctctttttataccgattagcctgtataaacctaatattgtaatgcccattgagaaaaattaattttttaaaaaagatatttacaaatcatattcctatttttttcttattcattggtggctggctcggttaaaaactcattttcacaagaccgatgcctttcctttttttatataacactcatcactattgtgcagcttaaaagaagattggctcattgtcgctttccattgaagagatcgagtcctcaggttataggccatgttcgtttgtacacctggataatgcatccagatgatccacctaaatgatgcatttgagtgttctttgtttcctaatccggtagtccatctagatgaagcatctaaatgaatctttgttcgtttgattagtttattacaatttgtatctgtatctaaatgcatgttgtattaaaatgactaaaaatgacatatcttcatttaaatcatactttttagtttcggaaagaaaatattatagttttgatgaaaaaatgcaattttataactttggaagaaaatgtcattctcaaattttttggttttggcgggaaaacgcaattatgcaactttttcgttaaaatagtgattttatatgattttacgtttttggcgagaacacgtaagtccaccattttcccgcagaatcatgattttatagttttggagggaaaatatgattatacggttttggcgggaaaatgtaattccgcaaatttctcgctaatttgcgattttattgttttggcgaaaaatatgatttttacgcttttggcgggaaaacaaaattctgtaattttcccgctaaaccatgattttatagttctggcgggaaaatatgattttacggttttggcgggaaaacaaaaattttcaattttcccgctaaacagtgattttatagttttggcggaaaaatatgatttcacggttttggcggaaaaaacgcaattccgcaatttcccgctaaaccgtgattttatagttttggcgagaaaatatgattttatggttttggcgggaaaacgcaattatgtaaatttcccgctaattcgtgattttatagttttggcgagaaaatatgattttacattttaaggcggaaaaacgaaattccgtaattttcccactaaattatgattttatagtttgacgggaaaatataattttatggttttggcggaaaaacgtaattccgtaatttttccgccaaaattataattgtcggttttgtttaaatttggtatttgtgattttacaatttttagaggttttaaaatataaaatgaaaaaactagaaaataattaacattatttgatttatgatgtaattttttagtttaataagggtattttagtaatttacaattttttactatgcatcatctaaaatcatctgaatgcatcttataaaatagacattttttggatgagtctgagaaacgcatctggatactccacccaacttatatgcaaaattgtactgaaacgaacatcaatttgcatctacggctagttgcatcagtgagatgagcaaacgaacatgaccatatatgaaagttgtcttttctttaacaaactaaaaaccagcttgtaaggaaagaaaagaatgtaaaataaagaaggttgctcagattcttgctgaaaaggttgaaaaatatcaaaacagataagaatgaaacagattatcagaattagtgaatcagtttgaacgttaaggggtttgcaaagtgtgtagaggagaagagtacagtcaattgggtaaaccacatgaccatgaaagaatctttgacggacatgttgagcatgcctactaacttatatcctctattgaattttgtttgtaaatgaaatacctatttttatttaagaaatagatttaaatgtctcaaaagcaatctaaaacgttaataagtatattttgttaaaatacaaatctatatatacatttttgcaagacttttttgaagataatgttgaagatttgagtcataattcaagaattatttcaaataggtgggtataacccggtttaactctgttcggatcctggataacatgtttaattctgttttgatcttggataaaattaatttttgaaaaagttacctaaaaaataataattaaaaacgaaattaatgatttaattaccaaatctaatataaatagtatctctaaactaaccatatttgttatttaccttaactaatttcttataataattctacctaatttaaacctaaatatataattcttctttcacttttatttgatcttatactttatttattttgaatttatatagttaataaaatattatattttattctgtatatgatgtaatttaaatgtttttaaacggacatatattattcaatcgatgaagaaataatatgtgtacaatttcccacattgcttagaaaaattggacaatggttcagagccatattataaaaatgacaaaaatgattttgattacaaatgagcaggaagcttgatttttcaggcgtctaaaattaaaatggttatccggtttacttgggttctttattttaaagaattgaaactttaaaatgtttcaaaaaattataaatattttaactttatcaaaagttaattattataattttaaaaactttttataaagtttatctttaaaaaatgttttaaatatttataattttaaaatttataaagttttaaaaattataattgaattttataagaaatttaaactttataaatatatgtaaaatatattaatacgggacgatatattacaggagaaatactcaatataacaatattatatttttttgaagtttcaaattttataatattgaaatttataaaaaaatgataaaattatgtttaatttcacgggactaggttatatggtaggacaagtttgggtggataataacatagaatggtatattacgattgtacaatgtcccacatcgcttaaaaattggacaatggttcagagccatactataaaaaggaccaaaatgatttcgattacgaatgagcatgaaaattgatttatgaggtgtccaaaattaaaatggtttgtttactagggttctttattttaaagaattgaaactttaaaaagtttcaaaaaaattataaattaaattttacaagaaatttaaacaaaataaaagatattaatacgggacgatatactacaagagaaatcttagatatattgcgagagaaatcctagatataacaatcaaaattcaatgatgaagtttgggtcaatattaatcttttttgaagtttctaattttataaatatttgaaatttataataaaatgacaaatttgtgtttaatttcacgggacggggttatatggtgtgacaggtttgaatggataataacatgggatgatatgttacagaaaaaaccctataattaacaatcataatataattatacaatcttaaacactaaacaaaattaacaatattaaaaaaaaaacacttaaaactttattttttttaaaacacatttcgattattttataagaaatttaaacattataaatatttaaactttatactacggatgaaattttagaattgactggtttgggttgataataatttgcgatagaattaggagttaaatcctagaatgacaatcaaaatataattatacaattaaatactacctcagatgaaatcctagaattgacgggtttgaatcgatattaatatgggatggtgtactacgagtgaaattttagaattgactggtttggattgataataatttgcgatagaactaggagtgaaatcctagaataacaattaaaatataattatacaattaaatactaccacgggtgaaattctataattgacggacttgattcgatatcaatatgggatggtgtactacgggtaaaatccgagaaacaacaatcaaaatacaattatacaatattaaacatttaacaaaataaacaaatacaacttaaaactttaaaatttgaattataaaattttgtctcgcgatgaattatacatttaaatcaaacaatagcataaatttattaaatcatcctacaaagtattctattattttttatttaataaaaatataggcacgcggtataccacaaattaatatctagtattatattaaaaaaatagaactctactattttttttgtaatctagttaaccccggttaaaacatttatggatctaccattaccattgcaaatcatatatataaacttgagctatagactttataatctaatattctaacttggtcacttttaattttaagtgtatagttgagaatacgtagtttgggaagataacaaattctaacttggtcacattttaaaaccaaaacgaaactaatcatctaaaatggttcatgagatcacagtggttgttacatcatggttaagctttaaccaaaaaacaattcaagccttcacactaaaccaaaatgttaaaattccggtttagctcaaacttgttgcacatgacaattatgacgtgtacacagctggaatttcaatttcaatttttcgaaacgggtcttggaatcttgatttttcaaattttgaattttcctatataacggaaaatttggagttagaccgtttgaagaagaagaaaaacctctacaaatctctctctgatatctctctttttttaagaaaaccctaaattttcattttcgcaaaatgtctagagatctttttttttccggtgatcttgcttgagtcaccgacgattatgatccagaaacaacgatctctcaattcggttaggattatcgattcgaaggtcagttatcaacctctcgaatttagggtttcgcagaggcaattccgatgattatgaatcctcaattgatctgtttctctgttaattgttcgattactgttactacatctctcgttctttgtgtatgttacctaatttgttccatcggtgcgttaatcttttggcgtttgatttgctcgatcgattttgttattttctcgtcaataccatctacgatagttttgtgatttgttgatttggttttgtaaacgatcgcgagattaggatatctgttttaggttttgaattttgtgaatggtaatcaaagatcaagtggtgttgttatgatttgtatttggtatagattttgttctgcattactgtgtttccggtatggttcttggtctgattcttttggtttacttttctttttttttagatggtgttgagttttctttgcctgagaagaagaagaagaagaagatggttcatcatagttaaccaaggaagcggctctaaccttaggtatgttaataaacacaaaatgtctttggttttttccaaatatttgatctcttcaatctttttctcttgcttgatcttttgatattgttctttaaatatgatgttaagtcacgtttcttctgcaggtgcaatttccagagcctataatgtggcgtttcttagaactcagaaaatagagaattctggattcgcaatcaattgaagaatgtgtgtacttacatgcacttattcgtatacacatacatgcctgcattcatacatacatacacgtttgcattcatgcatccatgcacgtttgcattcatgcatccatacatgtttgcattcatgcatccatacatgtttgcatccatgcattcatacatacatgcatacattgattagttgcctacttgcttcccttgcaccctcttttgcttctttgattatttgtcttatactctgtttacttacttcttgcttgtttgcttcttttttttcttcttcattccttgcttactaatcagcttccttctttggttacttgtgcgctaactcgattccttattttcttctttgattctgtctttacgtacttgttacatgcatacatctatgcatcatatttgcttgtacgtacacattcataatttcttctatgtttctttgattagttattactcacttgcttccttgattgctttcttcttttattttttcttccttgctttattaccagcttcttggtttgtttgtttcctttcttgcttccttgactcttttgcttacttgcttgcctttgtattttcttccttaattcctttgttaataggcttccttgtttcattgcttacatgcttgatttcttacgtactgtctttttttttcttacttaattctttggttaacttgcttccttgtttctttactgtctttcttccttaactactgaacttgttttaaaatttcttactttctatccttatcgcttgccattttctgactaattgtctcagtttattttccactaaaatgtgtactttgctttagatagtactaggttactatttgaaattctacagatggagactcttaaagggtccatcaaggcaaagtcctcgtcatcattagtgggaaacacaaggatcaagttctacgattattcttttctatttaactttctctcttcgtttcaaattttagtatttgttagttttaattgttcagggtttgagagcttggtgtttacttgcaacctgcttcttggattctctgacacaaggttttaatgttgaataccgtgggaatcagataatgtataactattttaacttatcttgaatcaatatacaattatatgaatcgaaataagctagagaaaggtttatatgtttgtggtataagcagtggcataagttgctggaaaacttgcatcatagagtaaaacaagaagatcaaccagccacgaactcccacttgtaagttaccatttacaaatctatggataatttctattggatatgacaatttgccttttgttatgtttgtcttgctggtcttgtatacatttgcactggtggaacacgttttattcgtatccgttttggattttgttagcttaaagcaccacaatccatagctaagaaaacgtgagagatcaagttctagagaaaaaaacaaaagctggagcaagattcagatttgtggaagtaaagcttttcatggtaattcaacaaaaccattttcaggtcttggtttctattgttttgaacttatatagtatgttttacaagtttttgttgtcttctcaaatcagacgcaaataatgtcgcggcgtgcctctcaagtttttggtctatcgcaatggagctttaaaactgttgtgcgtcatctttttgtttcccaagtatgtttcttcaattcttcttttatgcttagtctttcgagttactttctcttttcttcttcttttattcaagtagaagattatatagtctatgtgagtctcaaaaacaaaaaatgttctatatggagatcggtcatttatgagaactgatcaaacacccattggttggtttgttccacttttcacattgttttactttaatgcagccatttgagtccaaagtcaagatctacttagagcagtaaattacaaattttcacatgaagtaattgtttatttgttttattgaaattgcaaaagtgagaatttacttgaagttttgtggttttcttgaattggggaattttatttatttgcaggttttctttcatccttgcacggtgaagaacaaagactctaagagaacattatttatgaaacgagttatgcttctctgcttccctttccaggtttcactttgatttttatcagatatttgtctttgtgctaatatatggtgatgaaattctgctgtttcatatggatttcgttaatgtgttcatgtgattaatacaacaacgaatatcatgatttggtaaaggaaacatgaatgcatcaaggtaaattaatgttttgtaaatttagtgttcttgttccctatatctaatctggtaagccaatgtgatagtcgttatcagagaatgacataatttaatgtgttccttaatcgtgttccttgtttgggaattagtacaacattaagctacagagaatgacataatttagtaagagaaacataaatgcatcgaggtattttaatttaatgctctttttcttattctaatccggtcattcatatttaggttactgaatcataagaggcacaaagacttccttacttaggctcgttagaaaaagctacttactgtatatatgtaagtgacataatctttaaaaaatatgtagaggaagaaggatgctatctccaaagattatgtcacttacatatatacagtaagtaactttgcatccagaacgttatattaacaactttgtcacaacttctttataacaattgcgattttcagggtgtggagaaagatcaattctattatttgcagctatggcttccatggttgagaaaccaggatgccattgatgcaactatgtttgggatgcttggtataacccttttcggttcgaccattttcactaagtgtccaagaaacaacttcttatgtttgattgggatttgcgcaggctcgagctagaatcatgttcacttccttccattcaaccatgtggataagagaactgctttgacttacatcaacgacagtagtaaactttctcctgattaggtgatgaatcttcaaccttaccagcaaatgtctttttttatccttcctctttatactaatttgattttcccagcaatgaccttagaaagaaggtgctctcgattattgacatgtgtggtcttaggttgttggctgttgctttctaggtacttgtttgacattgatactcatagtttcagtcttcttttgttattcttttctgcgtggaaacaaatgttcaattgtatgtgttcttatttccctttttaggtggtactagataattcgaaggaaagccctggtgcatggtgcaacaacatatggtaatttgttagcttgttgccactttttgatccttacgacatgacaatactgaaatcattcgaaggttttcaaatctcggtgttaatatcaagatgatcactggtaaatgtgctcacccattgatctggttgtaatagcaatacatatttaccattttccactaacattcttttggatgacgtaggcaaggtgaccaacttgctattggtaaggagtcgcagacttggaatgggaataaacatgtatccctttttcggcttttcaaggagtacgcgcaagcggtaggaaccaacaaaccccatggacgaatatgtctctcaaaggtagcatgttatgaatatgttttagaactctttgtgagaaccaaacagagtttttgccacatgttgtagatttggcacataagagacgtagagaacatacttgttggagcatcaaatgattcctccaaagaaaatgatcatattgggaagttagtgtctcgcggctgaataggtaagcatgctcggagcaatacgactagcggcaaagtccaactgccattaggaacaacctgagagatactagccagtcgagagataccaaacactcgagggccaattgagctagtgatatcaaaaagaggactagctcttctaatcatcaagtagagctagtaacaaggtgataaaggagatagagtcttgttaacggccgaagcttgatcagcctcttccacatccagcttccagaactctgaaaatctacatcgacctctttgatagcgtgatagtcatgtgtgcatgcatatattcatatgtgcttacattcatacattcatacatccatacattcatacattcatatgaacatacatccatacattcataaattcatgcatgcatacattcataaattcatgcatgcatacattcatatatacattcatacatccatacatttatatatacatgcatgtatacaatacaatcatgtgtgaatctatgcctacattcatgtatatttgctttcttgattcattgattgcttctttacttacattgtttacttgctttcttctttgcttcttttaattatttgatttcttaactagcttgcttgtttttttttctctgtttacttcttgtttgttactttgattatttgatcgtagttcactccttactgcttcatttcatttcttaatttgtgtgtttgcttccttcttactcccttcattgtttgctcagaccatacatgcaattaacttgtttacttattattgccagtttctttatttcttttattatttggcattcgcttactcaactgattcattcatttgcttggctcttttacatgtttccttctttggtttgtttcttttcttctgtcgttgttttcttacatgcttacttggcttcttttatttttttgtttactcacctcattgttaatttatttatttgcttctatttagttctatgcttctttcattgtgtgtataaaagattaattttgaatatatataaaatttacgataagataattttgacaatatgtaaaatcgaaacactaataaatatttgaataaccaaaccgaacccgaaatatattataattatattgacttgatgtagcccaaaattatttttataaatccaaaaatatcaagtactataaatagatcaaaattactaaaataccaaaaataaccaaaaatcgaaaaattaaacaaaattttatcaaaatctaaccaattttttcattatttcggtacccgaatcgaagtagccaaaaccaaacgtggcacgcctatgccaccaggcctaaactataaaacccaaaaaactagaatcgaacctgaactagtacccgaacgcctgaactagtactcgaacgcctaggcctaacaatgtatacgtaaaaatataaaactttatcacatttcccgattttcattaattgtataataattcattatataggggtgtaacactttagctagagatattccaaaaataagtcactcgggattagaagtgggcgtttggatacccattcgttagggtatttctaaattttgggtttggatcggggtcaagtccgatattttgggttcggaaactggttacccgaagttctcaaaaatcaaaattttaaaaccaaatatatccaaactactcgaaaatacagaaaataactaaaaaccttgaacacttttgtattcaaatttactcaaaagtagattaaatacctaaaattattttaagtatctgaaaatctaaatattttgacgcttagattattgcaaatataaatattaatacgatcaaatgattcttcaactttttttgttaatctcctcattacttttaacaacaagtcaagaaattgctcgatttgttttgcaatttcttgacttgtcatcacatgtctccacagttctcacatgtcatcacactacttagtgtaccacaaaaaatctggtaaaccatactatcataagaggaaccaggagaatggagacatttgtccatgcatctagcaaattaaccagatactcatgttcatcttcatgtgcctcatattcgtgtatttttaatacgcgtagttaagcaatatatgataagctagaattatagtttattttactatattaattttgactccacacaatgcgtggaataccccctagtaaactataaaaaaaaatatgaatagaaagacgtaaatctttttgaccttgaataaataagaagcttaacttaacaagcatccaaaatgtatttttgtaatccgtttaattttatcagaaatattaaattttaaaattttatgattgtgtatcatatttaaactagattttaatccgcggtatatcgcgggacgatttattttttaaaagtaagatatattgaaacttgcaaattttattcttataaaatatttatattttacagtttataattgttaccacaatttttagcttaaagttttatattttatagtttaattttatatatactaacattatacataccacataacatttttggttttatataatcttttctaaattaggatgatttgatatgtttaatattaatggtcttaaaaaataataaattaaagatttaacccgtattgaaacggtgatttaattatattttactttttttattaatgttgattcaaaaacccgtccctccaaatccatcttgccaaaaagccatttattttattaatattaattttatttatgatatgactctaaattataatctaaacattttagctaataacatagaagtgcaccatatttatttaataggggaatgtaccatatgacccgaatgcacttttacccaaatccaccaaaaaagtcttgcaaaaatactatagagataagaaacgatagtcggttttgataggtataagattagcaaatatattagttagcttaaattagttaaagaatacaaattaaaaagatatattacactttattcgaatatagtataaaaacttatataacacagagatttgataattttttaattgttgaatacttttttgtgctaatttttatgtgattaagatttagttgatttcgtatataaaatattaaattgttttacgaacttatttgtttataatttggtaacagatagatatttgaatattcagtatattttgcttaagtttaggaaatctttgatgacccgtctttaaatcaaataagccctataattaagagatgaactaggatttaacccgcggtttaccgcgggcaatcggtttatttggttcttatactaaatatttgaataaatttgatatcctaaacttataaatataaattttttaatcagacataactaaataataattgagatttttttttggttgttatttagtgataagaagaatgtgttaaaatgtgtttaatttttcttttgttatttacttatttttgttgaacggattagattgaagtgaattaaaattattgaacggtttagattgaatcggatcatatcaagtttaggagattgttaagaccaaattacccttaatgattttgaatagcaaagaacaaaatccaaaattgaaatcaaaattgaggccaaattagacaaaatttcaatttgtacttcccttttaataataagaggatattgtcgttaaaagattttggtaattaatgacgtcattaaaggattttgtttttgattaaatttttctaatggcattgtcatgtaattaactacaaaaattaaggttaaatttaaaatgtacttcccaaataatatagtaggatacttgtaatttgtatcatttatatgatatttatatttatatttatattttataattgtcattaagtaacgatataccacataagaagtttgttttgtacaatcttatattaattagacagatgttatatgtctaacactagtgatattaataaataataaaataagaatttcatctgtattaaagtagtaggttaatgatgttttatttacttattaatattgtttcaaatccgttccgccatataactccgtctcggaatataactcatcgcatattattttaattttcctaatattataaacttttattgattttaaatacatcaatcataatattaataataatttaaatgaaaaattatagaaaataaatcgtgattgtcaagttttcacttttgataattttttcttgtaattagtcaattagtgttatattgtggagagttgaatagtctcattttgcaattttagaagatcaagggtatatttccaaaacattgcagttttgaggattcaacttgcaatttacccttttcaaaaatcactttcgacaattaccaaaaaccagttcccccatttcatttcacgctttcttctcttctcatctcagagctccgtgatgaagaaatggttagcaatcgcagcgacggtggcgataattgcaataatcgttagacaaggcacgacacaatacggatggaacaaagaggcggcgttggaaaagctaaaggaatggtcagatcggctggggatttgggcgattccaacgtatgtagcggttcacacaataaccttagctctttgtctccctcacgccgtcttctttgaagctggtgcttctatgctctttggtttccttcctgctcttctctgtgttttctctgctaaagttctcgccgcttctttctccttctggatcggcaggtctgcttctcaattgcactgttatgtgattcaaattgatctgttggatcgttagtttgtgtcgctaatgtacgaatttgatcgaaatgatttggatttagaacaatgattctcacatggcttatcttggcttcgtagaaagtatatgattcattagtaatacactctggtttagtttatgttatcgtgttttgtgaatgcttaaggttttacttggagatggtttagatttttctttagtgcaccattgttgaaaccttttgcagaacgtttattgaaatccattaaattgtaagcatgaatgataggaagggaatgtttgtgtgaagaaatggtgtcattgttggttattcagcggtaagataacaccgttgttcaccaaaaaggcggagaagatgcatgatattttcttgcgagatttagatggatgtcttcagattctataatggtgtttggataagagtggttgttgtcttgtgtatgtgacggagatgtaaagaaccgttagatgcttgtcatttgcttgttaatatatgctagggaatgatttgcaatattcacatttatgctggatttttacatggcttcatagaaactatatgcttcattagtaacactctgatttagtttaagttatcgatttctgagattttacttggagatgtagaataaactcttttgttggttttgattgtcctgctatcgctgaaacctccgtatacagaagttttcacgaaaatccattctactctaagcattataggaagtggatctttgtgtaaagaaatgatgtcattttggctgttcagaggaaaactaacaccgttattcgccaaaaaggcggagaagatgcatgtcttcctattctataatggtgtgtggatgagattggttgttttcttgtgtatgtgatggatatgtatggactaattgttaaatgcatgctgtgattctaattgccaattaatatatgtaggagaatgcaactaggatgttgattaaccttagcaatgtgatatgcagttttatttatttatctatctattgggagcacttgcattctctcatacttttttgaattttcaggtttgtttttaagagttccaccagagctacagggtgggcgcatagcaacaagtacttcaatattctctcaagaggagttgagcgcgatggttggaagtttgttcttcttgcaaggttctcgcccattccttcctatgtcataaactacgctttggcagctactgaagtccggtttgtagctgattttctgttccccacggttattggctgcctcccgatgatcctgcagaacgcatcagtcggtagcctcgctggtatggctgtggcttcagtagctggaaaacagaaaagtcaggtctggggttatgttttcccagtacttgggatactgtcaagtgttctgatttcattgaggatcaaaaagtactcagctggaattacagaggcatcatcagatacctctgctaacaactctagtttagcttcatctgaaactgcgaatcccgcttatggaaccgatggatccaagaaaagtgagtgattatacaaaccatgatggtggtttttgatcgccggtattacactttgtttggtttgcagctatcagattctcaacatcatggcttattttggacgagttaggcagtatcttaatagtaacaaagcattagtttttgtacttcttaagttaaaagcttagaacaaaacaacagtgttattttctataccagacacaaaaactgtgtcgttgtaataacacttaccataacattttctttcagtgtatgtttaaagccgtttatatggttgaagcaatgtgactaaaatttttgtagcattgaaacaagctatatttgcattgctatggtcttgttttgtgactaaaagacttggatgcagaatggatataagttaaatgtctgattttgtaaataacttatgaagagaaaatctttattcggtaagagttgttttctcaatgtagcagttcactcatcattttcaaacttcaactctcagagaacacaaagaggttagacagtgcagatgcttatggttgagaagctttacctaacaatggtacaaggcggttttgttgggatcacatgtgaagttaggcacatggattcgttcttggagttggtacaaggacttctaaaagacaacaatgaggtataataaggacaagttgactatgtctctctcttttatcttaacattctaaattaggatttggtaaactgagagcagttagcttcttgaatctctaaagtataaaaaccctcaccgttttactactatctcatcttaaaactcccaagtaacaaaaatggctatctcaaagcttattcctactcttgtgctctttgttttgttctcttttgatgttagtgttgctcatccaggtctaggatttggatggggaagtaatagtcccattggaggatctttttactcaaatctttacccacaattttaccagttctcttgtccacaagctgatgagattgttatgacggtgctcgaaaaagccatagctaaagaaccaagaatggcagcatctttactcagacttcacttccacgactgcttcgttcaggtaaaagtatctttacctatttttgttttccctttatgtgtctcttaagcttaacacttatacactacactctgtgtgtaaacagggctgtgatgcatcaatcttgttggatgatagtgcaaccataagaagtgaaaagaatgctggaccaaacaagaactccgttagagggtttcaagtaatcgacgagatcaaagccaaacttgagcaagctt

SEQ ID NO: 1188 - DNA, 42801 bp, Arabidopsis thaliana
gaattcattcaaacgtttgagctctccattttgatggtccacaatggctttaaccacatcaaccatagagatcagtcccactatctttccgtcaatcaccggtacatgccttatgtgattctctacatcatttaaaaaaaacacaattttcttttgtcaatttcaaaacataatttacaatttggattagatatatatatatatatatatgtaagtatatatagtaaattacctgacataagctgcattgctttgattatgtttgtcccagatgaaacagtaaccaacttgctctggccaaaatcatttccaattcttttacttaaaattacgaaaatttacaaaatgaaaaattaacttgagagttttatcttttgtttattctgacctcgtctgtcataacttctccaacttttgtaagctttgatgatcttcctgccccaatgatctttttcatatagtctgtttcattttgtgatgataattagtcacaaaatgaagaacccttcttaataaattgtgtgttttaactgttaactacaacattcaaggtattgggtgatcatattcataactccttttttttggtatttttccgtagaaagaacattattaaagaaagcttatatatacctctctctgtgacaattcctgctatatattgttggtctccaggttctaacacgaccaacgatccaatattatgctttgccatctgttttttgtttttaacacgaccaacgagattagtggtctacgcatatatcttatatatgcatgacaaattgacataatatacaaatatgtgtgctttacttattatacataaaatagaaatatatctcgaaaacattggtctgatttacaatttgacatatacatacgtgtatacatgacacattgacataaactacatataggtattatattgcaccgaatgtggaaattaatcacgtcttattttattagctgggacatagaacaacgtggagtaggcaacgaacctaacattaataagtaaataaaatagttcttgtatgagtttttagttcgagatttatagacttatggcagcttaaatgtccaaaggtaaagaattgtaccccaaaaacatattaagctaactaatgccataaaattgatacattgttttaaaaatctcgttttcatgggtactaattgatgcgtgtgtaacgtgatgagcaaacaataaaaacggagaaaaagaaagaagtttgaacgaacatttttaacagcgtcagaaacagtgtcattcgtacggcacgagatccacgtatcaatgtcagtatccttcgtggagagcacatccgccaccgtcagattctccaaccctttctccggcggcggaggcgaagttaagcaaccaaaaccggccgataccttcctctgatgaatctttgggacctcattagctcttgctaatagtcctctcacaaaagctttcattatataatcttattaggttcaaaattgtactttttgcaaaaataaatgaaacagagattgggttttgtaataaaggaaaggtgatgactctttgcttccaatgaaagactaaaacataccttaccttaaccaaacgttaattacttttaattaaaaaattaagaagaaattaaagtttttagaatgaaaaaaaagatctgattgtttgattgctccaagagggaaaagtatgtacattaaaccacacaaactgcaaatagaagaatataatttgatatgatatgttttgcttcattcgcagactggcttcgtgtcgaagctgcttaaacaaatagcaaaagcttggaatgcagagatcgggtaacgataatccattgtgaaaatgtctttgcctatcttcccaaactgtaatatcactctatcttgttcctcttctggtatgttcatgttcttccctgcttctgcagcagctgccactagctggaagtttttcaccgaggcgactgtgactcgacctttgaagtttagacaccagcactgaagctgttcgtgccatctcggcgacttgtttttcagaattaatggttcttttataacggattctcctcccaggttccctgagcagaaatccatcagcggcttcttcttcttctttccttggtttgtgaactccgttggcgactggattttgccgccttcttgaatcgctgaaatcgggatactgtgcattatacattgcattcttcttggacctctggttctcagaacattcagctcatacaagattgaagctatgttgtaactactagatgacgacgatacccatggagacacttgcatcgatggtgggagctttcggttaaacggaggaggttggttttcgtagactgtgaacttcgttcccaggaaatttgatctgtccaccacacacaacaagacttataatagatgggcatggtgatcatatagaacaaaaagaagaagactttacctcagttttcctatgtaattactactacttctcgagaagtcattccccgataacgatacaacaaactccgcacccgtcgctctcctgactctctttgcagataacaacaacttactcttgtcaccggaaagagctataagaagacgaatgtgatatataaaacagtccaaactcaattcataagaggttcttaaggtgaactagtaaaactaaccagggcttaaaccaagatagagacggtatatccccgtagctctttcacgtttaataaagcattgaattggagcatctctaggtccaggctaagccaaacaaaaccaatgttttagacacaatgataatcgattataagacaaactggtcaagagtaacaaacctgtcttaaagaaatcggaaacgtgatcaaaccagagagctcaggaactttaacaacttctttagtcatctccctccatgacttacaaaccgaagcacaagcaacaacatctctcctccccggccataaactctgttcagactcaatcctttggattatatcaagaagtaactctggaggcaaatcaacccaaatactctggtttaaaccttcattagttgataaagaagaagacacagatgatccttctggtgcaatgtgtgacctccctcttctaccaatagctttgtatttgttcttcactatgttcttcaatgacattgctactctgctacaaacaaaactattataatttctgtaattgagagtttgagagaccaaatcaaaaaccctaatttgtacctgattttatctgctcccccagaaatttcccagctccgttttggctgatgatgaacaaagtaaatcaacagaaatgtctcagtattcaccaaagagaaactttattcattggagaaagcaaaatcatgaaaagagcatggatccggcttctccggcaatatcgtgaagagttcgagaaagttttaaataaacaaaacatcgagaaacgagaaagagaggaagagagaattattgttaccaacaaaagcgacaaatccatggggaagcacaattatatttctgcagatgagataagtttttggattcttcttcttccgatgaagacgaagaagaagaagaaaaattcagcgaggaatttgaaattaaaagccttctcttctcgaaaatgttaagttaaatgaaccaccaacaccaacacctctccgatgccgttactgtcgccgtcgtgagcttcgattccgaagaggagaggaaggaggaagacgacagtaaccgcaatgatttcgaggaggaagaagaaaaagagaagacagatgggtttttttcttttaattagtaaaacggaaaaagactaagcgcggctcatgtttttcaattgaaattagtaaattactcaaaataggattttttttttgtaaaactatttattagctgataatttttgcttttttgagagttaattacaactggatttttttaaaattttattaattggcacgaaatatgatatttgaaggtgtattttaaatttttagtaaatttacaaagaaattaataataagaaatattacgtatcaggttattttattgtgtatgttaaattgaattatatgtaactaagtaaatacaagaatttgatgttgtttttttttttgccaaaaggtgttgttatttatatgaaatattgtacaaacatccatgatacagagatgatattacacattacaaagacgtctatataaaaagattgaacatgaacttttaaaagactgaatcaaggttcatgtacaaaacagaaggatcaggatgctagaagatcaactaccaaaggagaaggtagaagccctggcagcagtgttgaaagacaaacatcttgacttctcaataagaacaggaaacgaaaactaagtttcgcatctgaacttatagcttccatcttatgcttatgtcaagagagcttcttacttaccaacgtatcaaccaaccataagtagtagtagaagattgaaaccgtcctataaacccttcaagtttatacccatcaaactgcaacacttaaaactaaaaaggacagtaactcgaaacaatccaagatagattgttcagccaaaagcagtaaacactaaaaggagttatgattcctaagcagctatagacattccaaaaaaacaaaccttaccccaaaaagttgaattcacagagtataagggtagattatactcacatttgtagacacaatttttcgagatcttatcctcacaatgaaaacaaaaaaactcatagcatactctaagtatcatgcaaatattttattagtcggtggcatcaaaccacctaaggctcaaaatatcccctctagtaaccaactttcgttacaaatttcaggattaaggctccaactcggaaagagcatattcgatgttctcttcagctcgcgacacatatatcgattccacctcacaaatcactcaaaccgagctcatctcatgatgcataagttgggtttacttcgcaatcacttgaactaagtccttctcacggcgtatttgtcaggtcacctcgcaactacttaatccaaattcatatccaacagcattacaagaatattagtcttcaagcaaataaccttactcaaagaactcaagcttatgttgataccggatcgcgcacgacaaatccatcttacgcatccaagttccatcactttacagagcaaagaatgtacatcttgcataagaaaggtggttaaatcttgatattaatttgtgattaaatttatgaattaatggtcatggtttaaggagtaaacttgccattcaagtttacgaattaattatgagagttattttatgagctagatatgtacctaatggccaaataaagatacataggaggaaggaaaagactataaagagaggtggagaccctaagaaaagagactccatctttttttttgtaaaatggttttcaatgttataaataaggtccaatggactatttccggatttaggctcatacattttcccttagactcaatccacttacatataaccagactaaaccatctattacaaaaccgatctaaaccgaaagttgaaaatcctaatctcatatcgtaaaacacgatctgagccgccgtccaagaattgcagaatctcaccggaacagaaaccctttggggagcctagacgagattcgtcgaacggagatggtaattcaggatccgttgtcctcctgccaccgtagagcagttttgaggaggaagaggcgatccgggttgccatagtcatgaatctcatagctcagtcgagagagttgacggcagtagtgagtagatctcaagaccatcgacggtggtaaagcctcaccgaagcggagtcgacctcccccatcaagcggcgacccaatgaaacctccagaatctttagacttccgacctaaccgccgtcagcccttgttcttcactgtgaagtctcatccttcctctccgtgaagccacaccaccgatatagctcttaccgacagtgtctcgcataatcttctcccctccaccagggccaactcaatatattctctgtcactgtacaaattttcaaatttagcccttttatactaaatattttgagtttggcccttacatttagttaaaattttattatggccctcagatttagtcaaaattatctttttgacctcaaatttgataaatttttttattttaccctttaattttgatcaaataatttttggatcctgtgcaattgctcctcttgcactcccctaatgccgcatttgccctccactgctcccttgattttgaatagattgaattgccgagaagatgtagcggatcacggttgaagcaccatgtcccaatgggtttcttcgtcgctggagtcaacgaaaaaacttattgacggaacaagagattgtgattataagaagaaaaaaatttgagagagaaatcgcccacgcgtaaatatcacttgcccgacttctttctagtataactccaagaaaaacacccaagaaactccatcttctacattcttgaccccattttagatacaaacaatgttttttccaatccttatactaaaaactatttctttgctttatgcaatacttccaatatccaatgcacaatataagctaatatctctatttttatctctttattttctttgctaaattatattaattattttactcatttttgtgtttgtctcctgaaagctttgttccatctccttacattgcaaaacgaatctatccggattttgtattcacaatctctgtaagtccaaccaataaatttcggtttggtttagcttaccagttaccactccatactctaaaaatttagaggtcaacaaaataaacgaactcactcgagttaaaaaaaaaaatcctcccatcaatacgcctccataaacctctctctatctggtggagcgacaccaaaaacaacaaagccttctcattttcacactttgggtaatcggagaatcacaaaaaaatgggaaccctaggacgagcaatttacactgtgggtaactggattcgtggaactggtcaagctcttgatcgcgttggttctcttcttcaaggaagtcaccgtatcgaggaacatcgtaagcttccagatccttccacttaatactctctattgaaaccctagatccaattcgttatctctaatttgtgtcttcacctttgattggagaaatttgtggcttagattgaaaaaatttgattcgagaaatttgtgtttgttttcagtgtcgaggcatcggacgttgatgaatgtgtttgataaatcaccattggtggataaagatgtgtttgtggctccgagtgcttctgttattggtgatgttcagatcggaaaaggctcgtcgatttggtatggctgtgttcttcgaggtgaggctttattacttctagaaagtcttaatggcctttggttcgatagaagtaccaaattttgcagcagtatattgtgcaaagtagtcatagtttagttttaggaaatgaagttctctttaccttctaataatcttgtatcgctgttatacgttactgtcctgatcattggacatagatttattgtactgtcgataaaatgtgtcatgaagtagctgtgaaacttattgtatgttaatctgggtttctaacttgtgcaggtgatgtgaataacatcagtgttggatctgggacgaatatccaagataatacgcttgtacatgttgcaaagaccaacataagtggcaaggttctacctactctgattggggacaatgtaacagtaggtaaaccttaaaaagcgatttatcagttttgaagtatctgtttttatgttgtgttacacgattgttagttaaaggttttgtttgtaaaatgaaacggagcaggtcacagtgctgtcattcatgggtgtactgttgaggatgatgcttttgttggtatgggagcaacactacttgatggtgtggtggttgagaaacatgccatggttgctgctggttctcttgtgaaacagaacacgcgaatcccttctggagaggtttctttctttccactttatcttttctggtttactgcttacggagtttgtgataagactggaactggaaactgctttatttctcactaaactgaacgagaaaatccaaagtatcaagaaccaaaaatagaactctagctaggtttacttatcacggaccctgaagctctaccaagcctaataacgaactgctaattaaccaagtaatagcagctgtagtctgctgcatttagtcctacgctgacctgtagctaaggcttgaccagctgaacttcttcaagtagatccacttttgctttgcttacaatttagttgatacagaattagttaatgaaatgatatgcctgtaaattgtattatattttgatcaaaaagaagagtaaatagtatttatatatcgtctaaatctgagaaccacctttgtttccgttgcaattctacttgtatatgaaacaagggtgagttgggagtaacagagggttcttgtgtttccaatgttttatgaggaattagacggatttcttatatcgctatgcttttgaactactttcttcaaccgtcaacctgagaatatatttacaaggacatatctataagttatcagtttcatgtggcaggtgtggggaggaaatccagcaaagttcatgagaaagttaacagatgaagagatagtatacatctcacagtcagcaaagaattacatcaatctcgcacagattcacgcctcagagaattcaaagtcatttgagcagatcgaggttgagagagcgcttaggaagaagtatgcacgcaaggacgaggattacgattcaatgcttgggattacccgtgaaactccaccggagttgattcttcccgacaatgtcttaccaggtggtaaacccgtcgccaaggttccgtctactcagtacttctaattccaatctcaggttgtttttgtgtgttgaaatcatttcaagacaggattgattctctggaaggtcaagagagatattattttggttttaacttttcttccgagcaagcaggagatttatcatccttgctcaataatgtatggttgcattatgaagtcatttcttcgaggaacaatttgcagaaagagaaacaaagttggattaatctttcattctttctctcgctgtttctctcattcaaaatggtgtctgtttgatacactctctaggttggcgattcgccgattattattatcatgtgacagatttgacttaagtaggactaaacataagctagtggcactcaataactccttgttccaagctgttaaataaacaaagccgaataaaaaccacaattgtacttggaagttggaacatatcaaagagctacacacaagaaaattggttagaaaatccaactttgaactcattccctcttgctcaaatttccattggtgcaacatcttgatcacctgaaccaccttgttcaccagttccagcagcaccaggagcagcttcgggttcggcctcaccctcaccagcatcttcctcttcctcaggaaccttctcaaacgtatcaatcaccttttgaatgctttcctggtccaagaaatggaatggttcatcgactcctagaacagaaacagtgcagagcgagctcttcagtgtttccccttgcaaagtttcccttatggccataatagcatcttttatcagatcttcttttgatgattcttggaagctctcgaatttgcgctccagataggttttcgcagcttgtgaacgagacccgatagcgaatgcttgatattcaaagtagtttccgctagggcagttgtagtagaggtgagctcctgactcgtccaatccacctaccagcaaacccacaccataaggccgtttccatgatcgttgggtacatacctgctcaaagataatttatgaagatgtttaatacaagacaaacaaatgacttaacatttgaatgaaatcagagtgttgttcaaactacaagactgatatcaatacgttctcagaaatcaattgaaaatgtagatacagcagctaacttaatttttgacagacatgaaagtaagtgggacgtagcaatcaaaccttttaaaaattgtgaacacatcatctaacttgagaacactacgtttaacaccaaaagtagtgaacatgtagcacaaatttctatcacaactgtaaaccaacatcttactgaaaatatacttcattaggcaagtaaataaagtggccaggacatactacaactacaagtaagtaaacaaatgcaaagtaatacaagtcaaaaccacaaaaccaaaaagagatcaacaaagacgtatatttattctagaattgcaagcaaaaacaactctatcaagcaaagagaacagacgatgacaacacagaaacaaccaaacgaccaaaatcatcacattcttatacacttctatcgtcaaagtgggtatacaggttaactctttctaatcggattaagcaactagcaacagaactggatatgattaacaacacaagaatctctaattcccaatcactaagacttgatcacaaaccaatatcactacttgcataacaacacacacattctacaaataaaattggccacattgctaataaaaacctaaactttactccaattacataaagcttcaaactttcagatactcacacatcataaaactaaaccctttagcaaattctaggtcaaaattcaaaagttaacccaaaaatctcaatttacctgagctttatcagcaagatgaacaacaagacgaccaacaggaagaggagactcataagtaaaagagtgattaatagactcagatctcatatatcgagagagaacacgaccatcagcagtgagaccagcaatagcaacaccaatatgatcatcgactttaaagatcttcctttgatgagaagagagctctgattgtgctttgttgacacaagcgaggacgacatgagagcgagatctgagtcctattgctgcggagccttgtttcacagcttccatggcgtattcgacttggaatagtcgacctgtgggactccatgttgtcacatctgtgtcgtactggttcctgaacatctttcttcttcttgttcctctgttcttcaaaagcttttcgtttgcttcaagctagaggaggatggtctctcttatagagcttagaagaagaaagtaaagattgtcaaaaaaaagagaaagaagacagtagagtaaaatgggcttatgaaacttaatgggctgggtttaattatccattactctttattattttttacacatttaaaaggattataattttataaataaatacttagcattatattatttctttttatagtaattaatttaattcataatttaacatttgcagtttcaattggttttacattatttatttacacatttttcactacactgattataaatttactattccctctgatcctaaaacaatgatattttggatttttcacaaattaaaaaaaataacttttatattatttttattgttttttcttactgcaaactatgttttaatctatgaatgtagatcattacagagaaggtttttgaaccaaattggctcgttcctaaagtctgctttgaacacagaaatcgtaaaaattggggaagcaaaatagtccgcttaaaacacaaaaatcgtaaaattaggaaaactaaatggtgagctatactattacaaagacgttttgtgaaagtaaatacaatagatgaaaatctgaagaccaatactctaaatctagaagtaaattagcaattttacttctattagacttgccattgatggttttaatgaggacttcgcaatctctttggaattgtactttcttgtatttttgtatccaaatttgttgcatcgccacaagtaacgctttcgtctcagcctttaggagagtgttgacatgatctaaaattgaagatcctcatgtgtttgctatcccttcatggtctcgtataatccatccacccgtactttaagtactattcctgtgtaagtccgcatcgaaattgcacttgacaaaagaaactgtcggttttctccatgaagtattttccgatgatggtgctcttgttgtagtagttttttcttgcctccctctcgtgtttataattcatttattatttttttaattaatttaataatatcagttctactttttttcctttctctattgatcactaatgaaaataatattaatttaaaacatcaacttttgtgaaacaaaagtaaaatttaaaacatcaaacttcatggactagagggaattacaagttattgtattttattatttctaattttatgaaaattaataatttagcatgtgtagtttaaattggtttggaataaaattaatttagaaatctaaacaaataaagtcacatgttattagatttttaatttgatattttgtttttgataaaatcttgtattatttggttggaaacaaagagtattaaaattgtgtcaattagctaactagccaaattcgacatacaaattagcaaaatagtcatacgtcagaaaactttagtaaatagttttttcttggggtgtaaaataaccaaaataacctggaaaaatagacgggaactcgtgagttccgacactaggtgtctatatgtagggaacataaacatgcgtaggtaatgagtaacccgttttatttataaaacacacgccatttatatatgtttttgttcctgatgagccacataacttatagatttcaattaccaatgagaacataaacatgcgtagataatgagtaacctgctttatttattaaacacacgatatatatagatgtatttgttcatttttttcttaattctataaaccacataccttttagattttacagatgcatttgatatttaaacactaacttatatcactaaatatgtcaaaaacggaccatatatatatacagatgtttgctttgtatgcgactagttattcaatggagactaacagataaaaaggtcaatggtaactgtaacatagaatgttatttaaaaacaacacatgtaattcctatatgcatacgctgtatgaaaacaatgggcgtgagttggaaattgtgtattgggcaataaactcggcaaagtatcaacttatagagatcatacattacatgcaatgtttcgttatatcagtaatcattagtatgcaacttgctacataatatggtcgccaaatcttatttgcgatttgacaatgtaaatctatccgtaggaaaatatttgatacgtatctattgcattaaatgcggcgacagtgttatatacgagttccaatgttgcattgggggaaggggtgaaacaaattccaaaaacaacgtgtttcgtataaatataacataggataaccactaagcatccaccagataaacgacacgtcgcgcatgacgtctgcgataatgttaaaacacatgaattattgtggttatgcatgtaattcaaatacaattcagttatatgtttgatgcgacatttacagaagcgacagattccatcgattagcagcccttcgagagtttggagggaaatcataattattcaatattatgtggcttaaaagcttgtaagcactgttgcggaaaatgtcttaatatattgtagccctacttcgtagcaaaagattccacatataacaggagagatgagtagcatttaaaacacacgataatgagtaacccgctttatttataaaacacacgccatctatatatggcgttgttctggatgagccacataacttatagatttcaattactaatgagaacgtaaacatgcgtaggtaatgagtaatccgctttatttataaaacacacgatatatatatatatatatatatatatatatatatatatatgtatttgttccttcttttttttttaattctataaaccacatactttcaattacagatgcatttgatatttaaaccctaacttatatcactagatatgccaaaaacggaccatatatatagagatgtttactttgtatgcgactagttatttaatgaagactaacagataaaaaggtcattggtaactgtaaaatagaacgttatttaaaaacaactcatgtaattcctatatgcaaacgcggtatgaaaagaataggcctgagttggaaattgtgtattgggttatagcctcggcaaagtatcaacttgtagagatcatacattacatgaaatgtttggtaatagcagtaatcattagtatgcaacttgctatataatctagtcggcacattttatttgcgatttgacaatgtaaagagtccgtaggaaaatatttgatatgtatccattgccttaaatgcggtgatagtgttatatacgggttccaatgttgcattgggggaaggggtggaacaaaggccagaaacaacatgtttcgtataaatataacaaaggagaatcactaaccatccaccagattgacgacacgtcgcgcatgacgtatgtgctagtgttaaaaaacatgatttattgttgttatgcatgcaattttaatacaattcagtaataagtttgatgacgactgcttccgtcgattagcagccctgcgagagcttagaggaaaatcataattattcaaaattatgtggcttaaaagcttgtcagcactgttgcccaaaaatattttagtatattgtagccctacttgttatcgagacattcccaatataataagagagatgagtagcatttaacgatcacaccacttcctctttgaaaaaattaaaaggaacaagtatacaacaaaggagaaagacaagttacagcaatactaggtatgccattaatgatagatttgttttacagagtaccatgtaaaatagaacgttatataagaacaactcatgtaatttctgtatgtaaacgaagttatactgacgaatttgaaaacaataggcttgagttagaaattttgtattgggcttgatgttattcattcggttataagctcgacaaagtatcaatttataggtatcatacattacatgaaatgtttggttatatcagtaatcatcattatgcaacttgctacataattggattgacacattttatttgcgatttgacaaaatgaacagtctgttggaaaatattagatacgtgtttactacattaaatgcggcgacagtattatatactggttccaatgttgcatttgggtaaagggtgaaagaaagtgtagaaacaacatgtttcttataagtataacaaaggaggacaacatgatgcactccccagcgagtcaccattaacttctccactgagaatatagacaacattggtctagaaaaacaccaagtgaaacaacaacgttaagaaaatgatatactggaaaaagcatgtctccattatattagtttttcactctatagaaagtagttcacctctggaaatttgaaaaaaaaaacatgaatttaagaagaaactcgatagggattattgtcaatatgaaaatagagaaaccaagcaaccaatttaaaattgttttcaattacataatactaaaccctaagataatatatagggaacgcaagcaaccaattttatagattttttttgagaaaaatccaaaacatacaacggatagaaaacactgaaatttgaaagaaaaacatgaatttaagaggaaactagatagggattactgtcaatatgagaatagggaacacaagcaaccaatttaaaattgttttcaattacataatactaaaccctaagataataaatagggaacccaagcaaccaattttataaaaaattttgagaaaaatccagttttaattatatatatatatatatatgcatgtatataaatatgtatttgtgtagttatatcactggatccgaaaatcaactcaaacacatctcgatccctttttaaaggtataaaagtataaaatctaaaatgaaaacatagtatacagataaatcaatgactataaataacaagcatcattatagaaaaacaccttatagaataaacatagcatgttatctatataaaatacatgaaccagctataaataacatgcataatatgaacaaacctcttcttctttttttaacccctaaacggacgaaaaagaatccacaaaatttgaggaaatttccagatctcgccttatctaacttcatgtagagagattaagaaaaaattgagggttagtagagactaaataaaaaagaaccaaaacttagatctggacacaatcggtaagaactctatgtaggatacttatgtaagtatacatgggaagaaatagaagaagacacagataaataatcggaaacccaggactgaacttaccagattcattggcgaataccagattggataggaggagaacgaattaaaacttctctcgcaaacggcaaaagaaggaaaaaaagattagcagctatataaaacacatacaaaaaactataaaacaaatgcaaacaaatgaaataacagagtacttaatggcagaccaaaaggtataaaagcatgaaatttaaaatgaaaacatattatagagagaaaccaattagtcaaaataacaagcatcattatacaagaacacattatagagtagacataacatgttatctatataaaatacatgaaccaactataaataacatgcaaaatatgaacaaacctcttgtttttaaacaaaaaccctagacggacgaagcagaatccaaagagtttgaggaaattcccagatctcgccttatctaacttcatgtagagagattaagaaaaaattgagggttagtagagaataaataaaaaagaatcaaaacttagatctggacacaacaggtaagaaccctatgcaagatacttatggaagtatacatgggaagaaatagaagaagatatagatagagggaaaaaagaaccgaactttagatctggccacaatcgttattttctatgcaattgaagtataaaggggaagaaatagaagaagatcggcgataaataaacgaaaatgaatggaacgtaagacgttcaaaatcctcgatatcgccgaatctgcagtcatggaacgtaagacgttcaaaatttgggttagtatagtataaaagagaacagatcaaaagacaatatttacaaacctcaagtgtttttcaaacaaaacccacagcgtcagccacaaaagcctccgatatcgcctaatcttctttcgtgaatagtaagagacaaaaaatgggttagttgcatgtaagaaacacagataaaggacgcaatatctacaaacctcgtgggttattcaaacaaagcacatcaatatttacaaacctcatgtgttttccaaaaaagcacagaaggattcccaaaaaaaaaacagagactttagccgcaaactctcgatggtcgcctaactttcattcatcaacagtacacgaaacaaaattagggttagttaacaacgaaccgaactttagatctagacacaagcgatgattgacatgcaattaaaggtataggggaagagaaataagaagagcaactgtaaataatcggaaatcagtggttctacttacccaaatcgtcggcgagggaagaccaaaaattaatccttcgattgtcaccggcgactgcaacgagaagacgatttgaaaaggataatcggaaacacaatcaatttctagaaacaactactacttggatcgaaaagatgagagcaacgacgatgaaattaatcgccgccgagagaggttttttcggtgagaaaaatttttttttttttttttttttttaattttagggttattactttggtcgtgagacaaacttgggccgaataatgcaatagaattcaaatttcaaacccagaatcatacgctccccaaacagtgtcttgtcgctttgatgtctaaggttatacatgtaaaattacatgtgtttccgacttacccctgtagctcatggctattctcttaattttttttgaatccatggctattttatgtagatactcattgaaatatggtaaaagaaggtacagtagaaatactaattatgttcatgcttgaaagttgaaacacacaaaaaaaacgaataacatgtttttatgatttaaataatgagtgatgaaaacacacatgaagggattgacaaaaatactagtcactaaatatcctcatgatacaaaaaaaaaagaaaaaaagaaaaatagtcactaaatattcacttaactaaaaatcctcatgatttgttcactttggaaaattcagcaaaaaaatttagtaagcttattgaatgtaaaccagtaatttctgatgagattaaaactgagttctagttaaaagactttcggatgaggaggttaaattttcataatttgcatcgcatcaaaaaaaaaaaaacattttatcaatggttgagtttctgctcataaatttttggaatgtgagtaatacaatcatatcaactatgctattcatgaagctctaaaaaactaatcatgaatcttatattggaaactcaataaacttttggtgtgggatatttagtttcacacattgtgatctataaaagagaggaagagatagatcaagcaatggatctaaaaatgtataaaacacacactttattcactaccttgtattcaattaacgtcattaaaaagcaaagctttattcaaatttgtgacaatacaactatggcaacactacactaaatacataatttcaaagcaaatttataacataaagtttttcttcttttttaggcattaatataataaagttgaatctggtaccaaaaagttacgaaaaagaaacgcattaatctcttttttaaaaagcatctgattaagtgcctgcgtcttcttcttcttttatccctccaattcaaaattcaggtacgtcgacgacaccaccaccaccaccgacagaatattccgatttaaccctcaccgaatattccctcttcctccatggaaaacgacgtcaaagagaatctcgaagaagaggaagaccgtcttcttcctcctcctcctccttcacaatctctcccatccaccgattccgaatccgaagcggctttcgaaacaaacgaaaagatcctaatcgtcgatttcgaatcacccgacgatccaacaaccggagacacaccaccgccattctcatggcggaagctctggttattcaccggtccaggtttcttaatgagtatagcgtttttggatccagggaatctagaaggagatctacaagctggtgcaatcgctggctattctctgttgtggctactaatgtgggcaacagctatggggttgttgattcagatgttgtcagctagagtcggtgtagctactggtcgtcatttagctgagctttgtcgtgatgagtatcctacttgggctaggtatgtgctttggtctatggcggaacttgctttgattggtgctgatattcaagaggttattggtagtgctattgctattcagattcttagccgtggcttcttgcctctttgggctggtgttgttattactgcttccgattggtgagtcctttcgatactctattcgttctttagagatgttggattcgtagaattagtagagacttggtttggagaatcttatgattcattctgaaattttaaaactttgcggatcatcttagcggtattgagtttgagtatggatcattcgaactcacaaatcagtagaaacttggtttagagattcatgattcaatctgaagttgagaatttgcttttactttggctgttttcttgtaaaactttgctaagatgatccaaactcacaaatcagtagagaattggtttaacgatttgtgatcgaatctgaaattaagaaacttgcttttttgtattttgaaaacttggctaatgaatttgttgcaaacagttttttatttttgtttctagagaattacggtgtgaggaagttagaagctgtttttgcagttttgatcgcaactatgggtttgtcctttgcttggatgtttggtgaaacaaaaccgagtgggaaagaacttatgataggtaaagatttcagatttttactcttgaatttcactttatttgctttgatttgagtgcttaaaaatcaaatctttgtgtttatggataggtattttactaccgagacttagctcaaagacaattaggcaagctgtaggtgttgttggctgtgttataatgcctcacaatgtgtttttgcattcggctcttgtacaatcgaggaaaatcgatccgaagaggaaatcccgggttcaagaagcgcttaattactatttgatcgagtcatccgtcgcacttttcatctccttcatgattaacttgtttgtgactactgtctttgcaaaggggttttatggaactgagaaagctaataacattggcctagttaatgctggtcagtatcttcaagaaaagtttggaggcgggcttcttccgattctttatatctggggtatcgggttgttagcagccggacaaagcagtacgataactggtacatatgctggacagtttataatgggcggttttctgaatctccggcttaagaaatggatgagggcagtaataacaagaagctgtgctattgtgcctacaatgattgtggcaatcgtgttcaatacttctgaagcttccttggatgttttgaatgaatggctcaatgtccttcagtctgtacaaattccttttgctcttctccctcttctaaccttggtatccaaagaagaaattatgggagacttcaagattgggcctattctccaggtaaatttccacttcttttactacaagtctccataggataccacaataggtgaattagtgttgagtcttatcgttttaggtgtctcgacttttttagtttcactgtttgtgcaattatcttagtaaacatgtagaattgaaagtccttcaatggaatagagaagcatgaagagtgagtatttgtaagttgattggatttattgattacattgcagagaatagcttggactgtggctgcacttgtaatgatcatcaatgggtatcttctgttggatttctttgtatcagaagtcgacgggtttctgtttggagttacggtctgcgtctggacgactgcttatatcgcctttatagtgtacctcatttcacacagcaacttttttccttctccttggtcatcctcttccatagaacttcccaaaagagtgtccgtctccaatagctagtagctgcacaaaaataactgccctcaagaccatttgttacatgtcaagaagatacagtaaacaaacttcatccactatagtcttatacatattgaaacgccaaagtggtgataagagttagcttagctttttgtgaatgttaacatcacaaatatgtagtggcaaagtctttgttgtacttttttgtttttgttaagaggatgtgcacattccaatatgatttaaagaggcttttacatcatagaaaaaagcagaaaacaaatcaataaaaatctaataaaccattgaaaaaatggtcaagcaaaaaaaaaaaagtttcttaactagtgttagcaaaaatcattgaacatacgctaaaagagataatactcaatactaatctgccattctaacagatatatacaacccaaaattcaggtaactaacacttccaatacataagcttcaagcttcttttacgccattcctctaatggtaatatcttcaaagaaagcaagaggtagctccggtgaaacaggcatggtcgcaacgcacttgtactgtaccaagagaatcagatattagaatgttcttgttgcaatatatcacaagtttaaagttacatcattgaattgttgaatttaccttgtgttgcttgtacttatttctaacagcttctagagtgtttcctcttctgcttagatacaagtcatgtatgatacccacgcacacttgtagatcagctgctttgtactttgtgtattcttctagcatttgattctgtttgcatcaccagaagaggatttagaatataaagaactttttctgtataagaacctgtcatggttcttaatttgcttacccaaggatgttgttttggacggatgatgaaccgggcaagaaatacagctgaagcagacaaaagagatggcaaatacttcacacaggtgtaatctaacatactcaattctgatagatagcaacaaaggaactctatctgcaattgtgagtcctgcaaaggcatgaaaaaaaagaagatttaacaatagaaattatgagatgcaaatgccacagtttacaggtacatcgattttgagcttactttgaaatcttcttgtgcaacccgtgtaaaccgtctgcacaaacacgacataaaaaagagaataacaatcaaaacaagggcaagtaaaaccatgaaatcataagtttaaacaccagactgtttcagagtcgaaccttaggaatgttttgatggttgggcttcctaattcaaactgcagagcaagaagtatatccgcctccatcgacaccacttcttgtttagtaaatgtattatccgtaatgtaacaaaaatcttcaactttaggaggacctatctcttcatatttcctacttttttaaaagcaaaaataaagattccataagccaaccatctaagactcttcacaccaacacaacaataaacaaagaggattaagatgcttacgacgcaataagcattgcagaaactcccacaagctgaagcttctgcctgttaataggcttcacagacaagaatctatcaacataggagatagtgagataaagcgtatccgaaacaagcttgtactcctcagcaacctccactaaccaatccaccaaaaccgctctcatgtgtggagttaaatcactctgaaccttttcaatataatcaggtagtggtctatgtttcggcttcccctgaaaattttaccaatccaaaaacaataaccattagtcccaaagtatcaatcatctctaatttctccaaacatatcatataaccataagagcaagctgtgattggacaaaatctcagaaacttatcaaatccacaactttaaccaaacccattaatcaatatcaagtccaacactgtaccaattccaaaataacataaactgataccataagatcactaagatcaaaaatgatggaatcaagaaatctactaaagatgattttttttttacctccatttcacggagataagcacaaatatcactagcaaaaggctcacacatctgaggatcaacagatctcgattcgattagtacgctagcttcaggaatcatcaaagccttcttcatctgcctcttcgaggtattaacacttgttttagccttaagggtctctctttcttgattgggtacagcaacgacattggacatattcggaagctctccgagaacaactctcttcttactaactgggttttcgtctaacgccatggacgacgcttttcgtttcgccgccgctctcgtcatcctcgcacagttctgattctccgccatggggttatttcagtgggaaagtgagatttgagaaaaggggtaatgtacaaggtaggtaaaaggaaatgggttgagtaaaagcgccatttttgttggggaagttttgagatttttaggtcatggcgcttctctgtgtaaattttccgatttcgaaatttttagggatttgacttttgagtatccaaaatttggggcttttttgcagatttcatttccacatttatttggcggctgttttctcctttttacccttcaaaaagtttcactcctatatttagacaatcattattgttttattcacttaattaaagatgaaaataacaatcaatgaatgcttttaattaaggaaattattagtagttgatttgtttttttttcggttttggttaagattcggaattaagtgagatgcttttaaaaaatttaaaaaaaaatcggttttgcatttgttttttttttatactttttttgggtttagttttacatttttgatttttttttggatacagaaaaataaatccactaaaccatatgaaaatattttgtctaaacaataataaaaaaaaatcattgaactaggaattcatttaacaccatttcctatataattttttcgacaaattcagctattaatttaacaaaaataattgacaccaacggacacttatcttatattagagttgtcaaaatgggtgtgcggcccgtgggctgcctgcgtccaatacttaatggaccgagtcatggataaagccattataaaacgggctttaatggttatagtcgttaacggatatgaactttagcagagtagatatgatggacatgggcggcccaatagtcttataatgttaggttaaatcgatttgaggaaaaatcgaatattaaaatggacattattggattggacaaaggtgttaatggatacggactatgttcgtccaatatcaaaatagacattattggattgggctaatggacatggacaccccgatttgacaactctatcttatatgatccgcctatctgttattatctaataaacgtatgttggaaatgaccagaccaattctaccaaataatctttccaataagggttcacttgtagaaattgcctttttattgacttaaatgaacaatttctgttttgttttgtttttgtcaaggatcatagcaagtctaaaggcttatcttgtcatgtcttcccattcatctggtttcgataccatttgaagtaaattattgactactaaagttttggccttctaggaacttataaattttgtcataggaggctcaatgattaaacaaataaaatcatgtcacataaaatacttcttatcatattgcataatcgtataaatttccagagtaacacattaatttgtcaccacaatgttaatcaagtaataacacaatacatcttcacaacacaaattatttgctcctgcttcacttcgatacatataacatatgactcctctagcttcaactgttgatcagtgtcccttagtaatcgagctcagtaacaattgggaaatgaaagattggttctgatcaaatggtaacaacatcctcccaaaaggtaaccggaagctcttggtagacaggaattgccgcaacgtattggaactgtaccataaaaagcaacatttaagtataaatgatactactaattaaatcaaatgatttcataatttgtaatatgtcaattaccttatgttgcttgtatttctctctaacagcttttgaagcaccttcacttctgctcaggtacaagtcaagcatgatctccacacacacttgtagatcagccgctttgtactttgtgcattcttccaacatttgactctgttttacattacaagccatagattattagtgtctcattcaaaagattaactcaacatataaacctgaaaaagagagattgagacaaaagttcttacccaaggatgttggttaggaaggatgatgaatcgagcgagaaagacagcagaagcagccaacaaagatggaacaaacttcacacaactataatctaacatacttagttctgacagatagcaacaaagaggctctagctgcaagtttggcactttgaaatcttcttgtgcaacccttatgaaccgtctgcacaaacacaacaaaagatgagaacaaagaaccataagatacaaccaaaagtcagtattattcatcacaattctaaccttagaaaagtatttgtcgtaggccttcctagttcaaactcaagcgcgagaagtatatcctcttccatcttcaacacatcttgtttcgtataagtattagccgtaatgtaacaaaaatcctccactttagggcgacgtttctcttcatacttcctatttatatcaaatgccaaaaaagagaagccactccatatgtaagtttcaacatgacaatgaatagcaaagagagtaatacaagaggatcaaaaacacttacgaagcgataaacattgcagaaactcccacaagctgaagccagtgctcgttaaccatctttaatgacaagaatctatcaatgtaagagacagtgagatagagtgtttcagacacgagttcgaactcttcagcaacttccactaaccaatctaccaaaacacctctcttgcttggtgttatatcttcttgaatcttttcaatgtaatcatgtaaaggtcttagctttggcttcacctgaatattcaccaaaccaaaaacacaaatcttcagaacatatccacaaattctaagtccaaacagagaacaatcatagaaactcttcagataaagtatactaaattgacctattgaaacttgtcaatgttctaagtccaaaaacagagcaagtaggagatcttattacgtacctctaattcacggagatactcgtagatatctgagacataaagtccacacatctgtggatcatcagacctagcgtcaatgtcagagcctgattgaatgttctcttgaaacgcaagtagcttatgtcgaatttccgcccactctaccggggaagcatcttgagggttatggtcggaatgaatctgtttatctttcttagacaccatatttatcgaaaaacaagaacacatcttcgaaagaacaacaataaatcttacactaagtcctatatatagagtagaagactctatcctaaaacaaccaggtttcagaattcagatgagagatgagacagactaaaaaaaaaaggaaaattaaaccaaagcccaaaacaataacttgttgaacacgaaatcccaagtaattaaaaaaaggaaattaaaaaaaaaatcgttccaaaacgtgttaatttagagaaattacctttttttacttgattaaaaatctcaaaaagtaattacatataattatctttttttaatctaaaacttgtaattttactttggagaaaattgtaaagtagaaccctaattataatttcgatttgatttgcttattccgctgagttaggcctaaacgagaacgctacaacttgtgaagtttttgattttgcaaccaacacttggaggtacgttgtcctgcatccccttatctggtttctcacacccaagatcctgtgtatgttgatggctcacttcactggttcacacgagggtgaaagttgaaaccatggttttgtctttggatcttcacaccgaaacttttcaagtcatcgctaaagctcccttgtttcttgtttctcaagtttaatctctctttagtaaacttgattatcaatctcatagacaatcttttcttttcttttgtttcttgagattttcattagtttctttaaattaacaacaatgtcttctagagttttagccctctaggaattttcattaagtataaacatacagtagtaggctcaatgcttaaacaaaataagatcatgtcacataaatacttatatcatattgcataattgtataaaattatattattccgaatttcacactaaaattttgtaaataaaaaagaagagatttcaataatacatcacacatcttcacataacgcagacttatttgctcctgccttcacttctatatttcttactcttctagcttcacttgaagatctgtgtccattatactatttgaaacaagattcggtaatccagctccgtaacatttgcttaagatagcataacctcagatcaaatggtaacatcctcccaaaaggtaaccggcagctctggtgaaacaggcatggtcgcaacgcattggaactgtaccgagaagaagcaacattaagtatcaagaaagctctgcttattcaaatgattttatcaatgtgtaatgtttaagtaccttatggtgcttatatttctctctaacagcttgtaaagcacctcctcttctgctcaaatacaagtcatgtatgattccaacacacacttgtagatcagccgctttgtactttgtgtactcttctaacatttggttctgtttacatattcacaaccataaatcattagtgtctcattctaaacaatgaccacagcagactaaaacctgaaagagactgagacaaatatgcttacccaaggatgttgtttcggacggatgatgaaccgagcgagaaaaacagcagaagcagccaacagagacggcacaaacttcacagtcttataatctaatatactcaattctgacaaatagcaacaaagaggctctagctgcaaatgtggaactttgaaatcgtcttgtgcaactctagtaaaccgtctacacaaacaccaacacacaaaatcagaacaatgaaactaagacaaaccaataagtaatcatcaccaatacacacaaatctaacctcataaaagtattaatcgttggtcttcccaactcaaactgaagagcaagaagtatatcagcttccatcttcacaacatcttgtttcgaaaacgtattatccgtaatgtaacaaaaatcatccactttaggaggacttatctcttcatacttcctacaacatttcaatacttccattagcttccatacataaacaatgacaacaaacacaagagaggaagaatcataaaacacttacgaagcaataagcatagcagaaactccaacaagctgtagcttttgcttgttaacagtctttaaagacaagaatctatcaatatgtgagacagtgagataaagtgtttcagatccaagtttatactcttcagcaacttccactaaccaatcaaccaaaacacctctcatacttggtgttacatctttctgaactttctctatgtaatctggtaaaggtctctgctttggcttcacctgaattcaccaaatccaattcagatccaattcaagaactaagtaaatgattctaaatccaaaacacaagatcattattacctcaagttgacgaagatactcatagatatcagcaacataaggtccacacatttgaggatcatcagatcgagaatcaatgtcagattttgattctaggtcaataatagccaccggagctgacttaatctgtttcgccggaggaggtttaagattcctttttggcttctgggtttctttcttctgattgagattagccaagagattgacattggagacgtttagaagctcaccgagaacaactctcttcttgttgacccgatctccgtcaatacccatcgccgtcgaagcttttcgtttcgccgccgctcttgtaaccctcacgcagatctcttgctctgtcatgattgagatgagattgaagagagagcgagagagtgatgggaagagagagtttgagatttgagaggattgagagatcggatgagtggaagaagagaaggtgagaaggggaagaaaaagggaagagcaaaagcgccattttttctgattgtggcgctctctgtgatttttttggagtttgagttttttgggagtcaactaaaaaattttggaggtgcgaaaattctctgaaatttgtttgggcgggtgatttatgtttttttgttttcagattttgcctgaaaatgtttttgaccggtaaagattggggttttggccgtggtggttcgattcagaaacaaatttgacatttgacatttttgtcccttcgaagacatctgttaaatttataatttagattgtaatattttgtctttgacaaaaaaaaaaaaaaaaaaaaagattgtgatattttgtactttactaatcttatattttttaataaaatatttagaattgttaaatgtacaattttctttaaacaagatcatgactttttaaaactaactagttttttagggtttttttaaataaaattttgatccttttttatttttttttatagtgattattttataattttgagaattttatgttgtttagtatggtctaaattgtgaaaacgattacagaaaaaaacaaagaagatataaagaccaaaatctataactaaataaacttacgaaaactataatgaaagctaagtggaaagcagctagcataggttcgatgaagaacatcaatgttgaaccgtgaggctcagacatttgtataattgtcccatctccaacaaaaattgaatcttcattattgttaccacgagcaatttctttatgaggtctatcttcaaaaccttaaaacaaaaagacgctaatagtttttttgagaactaacacaaaaacaaaaccgctagaatagacttacctgacagcaaaagagcatctacgaacatccagaaaagccgcctttggccaccaaaggccaccattctcaagcataaaactagaaaaatcagttcccacaatataatatagacattctagaccaaatcaccgcttctatccaacactgaaagctcactggaacatcatgcggaacaaacctttatcctatcaaagtgaagaaacacaacaaacaatcaaaaacaacaaagacacctccttagagcagagccaacccaaggcaaattcaaggtgaagaaacgttgcgaatatacattcggttgagaaacgattatgttttctaatttcttctaagctcaccaaatatcataatagaccttgatcaccttttaactagactcaaaactaattttactcatcatccacatgttcaattgatcctccacccaatatatttttcaaacttgattgccaaatagttctaaaataaaaaaatctcttgactgcttttttatgatgtaaaatttgttgattggtaactaataatttacaatgagaatgtgacaatatacaaaaacaagacataacaaaacagatcaaagatttgaggacagatcttggcagtgactaatgtaggggtctcgtcacatacaaagtttgaagcaatctttaagttttggtttctcgtagtaacacaatgacatgatgcgagagtgaatggttttctcgatcatggctagaagctgcatatgggtccgacatttcttgttgtgagcttcctctcattccactctctccaaagataatacaaagtcgcttgaaaagatagtcgaatgagaatgtagtggttatcgtcatttatgattattaccctatttagattttgtaaaataatatttggattacctaaagattagttcagttgaaaataatttgtaagaaaaaatcaagttaccctacttattttgattttatatatatactattttccacaaaacatttatatttaaaacatttattgtattttatatactgatattatcttcatctgatatcaataaaattagctgaaatttttattattaattgtattttatgtaattaatttaaaataaaaccgtaattaattcataaaaagatttgaacgtaagtttaagattataactgaaatatttatattgactatagttttctccaccacacaaagtttaaatttcaaatacttcctgaattttcggttatttaattatttataataacaccgaaccaaaccaatcaatgtctaaactctaaactctaaagactttgtcatttcgtgaaccgtcgtcataactgatccttccaaagaatctccaaaatccctaaacttcgaaaatggcagaaaccgccgagacaatcaacaccacgatctcatcgccgccaccggaatccgaaagctccaccactatttctgcaatgacagatccaacatctcaagaagcagcctcaaaagacacagatctgacgaaagaagccgaatcagagaagaaaccaggaggaatctctctccgaatctggccaccgactcagaaaactcgcgacgccgttctgaatcgcctgatcgagaccttatccaccgaatcaatcctctctaagagatacggtactcttaaatctgacgatgcaaccaccgtcgcgaaacttatcgaagaagaggcttatggtgttgcttcgaatgctgtgtcgagtgatgatgatgggattaagattcttgagctttattctaaagagattagtaagaggatgcttgaatctgttaaggctagatctaatgctagtgttggaaatggaagtgtggaggatgctaatactgatgctagtgaggtttctaaagatgatgctggtcctgcttcagaggaggagaagagtgaggcttgagaaatttggttttacttccttattataatctcttgtctcttagggttttgctgttcttgtaatgatgatgatgacttgtggatttggtattatgcatatttgaagatgtttcttcttccttaatatgagtgcaagtgtcttcattttgttgcttggtttggctttatgggatttgatatttaacaataatgcatctttgttggtaaattgttttccttttctgctatgtgtgttttggattgctttgattgatgtgtattcaacaaccacatcgtttgatttgtgtcattcattgtgtaattacggttagtatcatcgggttatgtctttgtgaatgttagagtggtgtgttgagtttattgttttgttcagtttctttaagcacatttgcatctttgctttggtgaccattagtgtctctatgcagcttaccattgagttatgtaacgttttttaaattgggttacaattacgattaagctgaagttctgttacttttcagtggtgacaggaacatgtgagtttgtcttactttggtgtatgcagctttctatggcttataggttgtgtagtgtttggtcgattggatttggagttctttagaacacaccattaggattaggctgaaagttctttggatttttcagtgatgacatgaacttgtggtgagtcggagcacggattaagtatctttagattttataaatcctcaagtaactagtttgatgaacctaattacatcagaacatgaaaaacactgcctacaagtttctagtggttatgtcatagcggtttctttctgtttttactctgtttttgtattcctattctattggattagattttggccagttgaattttaaaccaagttatgtaatgtgtagatagtgtttgttcttatgttgttttacatagaattagaggatgattccagtctattttctccttcttccttcttccttcctatgctcaggtgggtatgtttcgagttcattgacctctgtattcgtttaatttagtaactgaaacaatttcactgattctttgatattctctctagtcttctctggttagtggttagggattacagtcaaaatagagttttaaagttcgcagttcttccatacagaatcgtcatgaatttctttatcaattcaagaatccaaaaaacaatgacttagaaaaacatacatagtttatatgtaagccaataacttataactacagttacatagttttgttttgtgatgtggaaaggagattagataaaatcaaatgtaggtttagaaatcagaaattttttggtttaatacttttattcataagttacaaaaagcaggcggatatgggaataaccagattgaaaaaatgtgaaatagaaactatgcttattggtcaattgattgataagatctcagccaaacaatttttgtcatcctggatgaccccatcatcacaaatgggaggcttggtcagtaaagagattgagattatattgtttgctagaagggtgatgacccttttttggcagagcaacttcatgccaacaaaaaattcagaagtctataatctgtgtggtacgctaagcgttggctttttttttttaagacaagtgtaagcggagaggtgatcaactgatcatgaagctttgtaggaaaagacacgtgagaagaaaaactcctatattagcttccacacatgtgcttcatgtcccattcaccaagtgtacattctacttttgggagtatattatttctttagatccaaagaagaaagatgtacctttgttctaattggattattctttttaattttcaacgatcttgtttttagtattaggattagaagagttagagcacctccatcaacaatattttttttttcttcactagaatggtaaattatattgatgaaataagttctgaatacaataggcggcaatgcaatcaaaccttccaaagacataagccggcgagtacatgtagactcctagaaacaaaaatctaattaagaaaaattaaagaggaaataaactcaaacatacaaatacacgcatctgaaccaatcttctcggaatccaaactcaaaaaatcaaaaataaaattacaaagtctaaatcaccataaaaacaaacagattcacactaaggaaaacaaaaccaacaaaaccaggactctctttaccacaaacggcggtgaacaaacaaacaccccgcgacccaaatgatgatggtcataagaagaagaaaggagatcgagatcttcaaaggagagaaatctacttctgaaggcggtgaaagaactcgcctctgccgaggttcgaacggccagaactggtgctgcacataaaagggacaaaaacaagcagcaaaatccaaagacgaaaaatttagaaattgtagatttagatctgaaattttagatctgaaaccgttggaaaaaaaaaaggttcagatctgtcagagaggaaggaaaacaaaaactaaacatgaagaaaccaagaaatttcggttctggtgctgaaaaagtcactgggaccgaaaccctagcaacaacggcggcgactttgttttatagagagaaggaggagcgtttgtccctccatctgcaatatctagaaaagatacttattattaaaataatataaagtggtgaaaaagaagagagagaagtgagaatcgtctctgttttcagaaactctgagagacgtttctggccacgtgttttttcaggaatggttgattttcttttttttcattaaaattaataatttatctgaattcaattaaaataagcaatattttattcatgagaaactcttttttgagaatctaccaatgtagatggccttatcatcctaggcccttgaccacttagcttgatggttttaaccagctcaaccgattataattggagtctccggtttagtttcatttgggtaatattctatgtcatttggtcatttgtaagatgtcttaagctctatatgaaacaaattttgtgtatttgtatagttatgccattggaaagcaatccaaaaaccataatcgaatcttaaatcaactcaaagacatcttgatctctctttaaatattacctaattgactttttgtttggaaaatcatgtgatccgaaatcagatatcgccatggaatctccaattttggtttttaaaccgagcttcctctattcatcatcttcatcgcccatatagtcctcctttatcagctgctgaattccaactccaacactgatcattcatctcctccaaaatcaacgaatctccttttccattttatttgttttctccatatgataacacaagggtagaagcgttattttacaaaggaagaagtgccggttttcgtaatcacttctgcaatgtttcggatcttataagtttttaactttatgatgccttgcatacaattaactcaattatatttggtaaatttggatgtctacataagaaatataacaaaaaaaaaaaaacagaagaccatcatcgttccttaacagaaagaggtaaataaattgttcaaaatatgatacattcatagacaaaggtataattactcttgtcatttacttaattattggggaaaggttttgtcattctgtgcaaatacattcttttttttttgaacaaaagtgggatgtttaagagcaagatatactccagtgatggtattaattctttcaaagaaattcagtttatgcagcctatatagtttgaattaaaatttgttgtcctttttgttccttgtggagtaattttacacaattattactttcattttcttaattttattttggtattaaattgaagaaagtaagtgttttacttttcttactttagtgttgaaatcgtaaaggcataaagccataaaggtcatcaactgattcttggattgtatatatttttctcaccgacgcaggaagttgtctgtacaacttactttgcttttcatgcttcctcgtcggttattagaacagtaatcggaaatgaaattatataaaaatagaaaaccacagaaaagccctaaatactgtaatgcttcaaattaattaatctattagtttgattgaaacaagatttacggttgcaagaaaaagttaaatactgaattcgtcaaggattccaatcatgtacaaacgctttatataataattataaacatggaagagaagggaacaaacctacaaatgaaaactacttactaatagacaaacacttacaaatttggtttcgatttgatattttcgtatatgtcattcgattttatttttgttttatttgtttaagaatacagaaacaaaataacactctcacatatcatgtgtaggaatgtactataaatttctttaggaaatgccccatgtaattcacatatagacgttacgagttatacttctactgagtgccttttttgtctctgtactctaaggtcacagaaaaaacagcccatgttactttatcaatcgacaatggttcgtgtttttcttccatattttaaattatcatgtggttcggtaggaaatgtgtaaatgagttgatcttgtttactgatttcttattttaaacattgaccttgatcatagttacctttaaaaattcatcaaaattcttatggactcatttgtcatgcatcttaaaattgtagaatctttgctttaagtatcatgaagacacttaaaactgtttaagagaactccacatctttaaagttggttcacaatattaagcgaatctttgaaattgctgattcgaatgacatttgaaacaaaactaattataaatgttgtggtttcggacctgcaaagattataggttttggcatataaaatcttggtgttcaaaaaaaaaacaaagttggttcacaatcctaactccacgtaaactaaaaccaagttcaattgtctctaatcgataactttcccgttttccttccggtccgattttaaaaacactgcaacaaacactgatttttgtagttaaaaggttaataacctaatttctgttattcctctctttccagctaaactggaattttagtagttaatatatctgttatattactaaccgaaagattattttgcccccctttctttaatttactacttttcttttctgtccttgcttttttgtttgtgacttttctatgggataaataaactataatcctttgtattccattaacaagaaaaatcaaacctttacatgtataacgacttgtgcaaacgaaaaagccagtaactaagcctctgattagtgaattacatggcattgaatcaatcaatgcttttaaaaaatgttttttttcccttttgcgatgaaatgaaactaaaacttaaatacacaatcgttatatatagtttatgcaaaggcaaaaataaaataaaataaaaatcaatatcaatggtcactagtgtccacggcctttcctgctcggtccagaggctaaccggaaagccaagctcctcatcaaaagatggtctctcgaaccgttcgccgcccccgagaaaacgccaaaaccaccactctctacggtggcggtcgtttgatcacagccggtcgtttgatcacagccggtcgtttgctctgttcgcaatgctctgcaatcaactcccccaagaattgaaaacacctccaccaagaagatgatgcacaacaagatcataagcttcttctccatcgatccttgacttaacttcggtttattacttctcttattgagttctctctcaaaatgttggctttgtcaaaacgagttgttgagttatgagatggaaaggcttgtgtgtgtatatatagttgtgtgtgggtgcgtgtgtaagcaaaaggcatttattgaccaagaatgttggactaattgatttcgacttcgcgttttctttatacaaatagtaatattttatggcctttgaatatttcaggtggcatctttttaaaatgtgtattcagaacaatttctaactgttcttaaactagttttggattttatgcaaaaatgtttttattaatatgtaaaaaacatgtttataaaatttatagactccagtttatatgcttatttaatctcttttattttaattttagattttgaaatcataccatgtttaatttatctaaaattagacatgttaaaagaagactatattatgtatatattcatcatattagcggagaagttttgatcagttttttccaacctacttgttttggctgagaggttattgttagacgctgactttgaatataaaattacatatttatataatagttataaaggttaaaggaattgcacacaaaaattcaaacaaattgcgattaactatataagtactattttcttaatgcgtagtcagtcatattagtggcaaacattagatcaattttctccaacctaccaggcttgatcgacatgtattgttagactctgactttgaaaattaaaattaaacaataataaaataaaaaagaatattgcagaaattacaaatgttagactagttgatttggatttcgtgttttctttaaataatttagtaatgtatatattttatggccatcctttagattatttcaggtataatctttttccaccttaaactatttgtaggctttgtgcaaatattttataaatagtagatcatttgatgtgcttcaaaatatgtttctatctaataaaattataccttgcttaaatgatctactcacatctaaaaaccggccatgtgtgtatgtatatcagaggctattgttagaatgttttgactttgaaaagaaaactaaataatagtagtaattgcagaaaattacaaaaagttgtaaaaagtggaattttatatatttgtagttgtgtccaatgtgaagagacaaaatgggttagattgttgttgaacgaatgagctaacaaaagaagcgttgttgaagaaaaaaaaagtcataagagtgtgtttgtgtttgtgtttgagttgtcaacttttgacttttgtccgacgtcggtttttcgttattaccgtgaaagaagtcgtgttcgtcggatccttagttttgctgtctagtgatgacgtggcattcactcgttaacgtgtttccttttctttttgtcttttgcttccgtccgtctgattttagttttcctactactttttttaaactagattcttttcctaatagtctatttcaaaagtgaaaataaaagcactaaactgcagtaaaggtgttaatctgtagttaaatatttatttttacattcctatatactctccatttctaagaaataaatgttaagatagcaatacaaaaagttgaaagtacttttcttttatcatttttggtatcatttttatgataagttactaggcctcggcaaaaaactcgtactcgaaaatccgaaccgaaaccgatccgagaaaatcggttcggggcgggtacggatattagttatttatcctattgggtcttagattgttgtatccgggtgtatagagtaatacccgacccaaacccgatacctgaaaggatatccgcttacccaaaattacatatacttattcatagatttatacatataaaaatttatttaatatttaatatttaaccaaatatatttatatccaaatattcaagaataattactaaaaactaaatgtatctatatttaaatacttaatactaaatatttatatatgcaaaatagtcgtaaatgttttggatatttggacaaaatttcggttattcgggtaaaattcagatatttaggtaaaagttttgactattttggtataaatttcgggtattcaggtataatttcaggtatttgggtaaattttttgactatttgggtacaaatttcgggtattcatgtacaatttcgagtatttgggtaaaattttggatatttggatataaaatacctgatttttttcaggtatttagcggttctaaaattctataccgaaccaatccgaacccgattggaaccgaacgaacccgaaccgaagttttctatttaccctatttgatcctagaatagtatacccgatatactcatacccgatcaggtattacccgaacccgacccacgtacccgaatgcccaaccctaatagtttttatggtaactaatagttaccatgaaagttgtacagtaccatgacactcaaaaataatgacaataaaactatagattttagcaaaatattgattgaaaataattaaacttattaaattactatagctccagaataaaagaaaattgtttagtaaaaatgatgcattaattttttttaacgtgtgaaaaatggaacattcattattcaaaaacagaaagagattcatatttcaaaaggtgttatgtaagaaagcttataaaaaaaagaaagaaaacgaatgtatcattccattgtgggttgggcctcttttttttgttttatgtttgtttaaattatgttatcactttgtatggctagacccaatttgttttgtatcacctgtgatcctaaaaagtcaatataaccctttgataaaaaacaaacaaacaaatcattccatcatgtaatttaacatataaatgtttaacacaacctgtatttctaatagaaattttgacttcaccctttaggaaaaaataatcagtataataaaaaagagtacaaatatcaatggagaagatataaacaaaaaaatatatatagaaaaaagagaaatttgcaagaataactaacaaaaacttataaattaagaaagtaacacaagacaaaaaaacagttatactctccatattatatataataatagcatatttacccctttctctccacctcattctaagtccctccttctctcctctctctctcatctctttttctttcttctctcaatctcttctctctttcttttttctgtatcacatgacaaacaaacgagaagcacaaagtagatttttcagataccacttatgttatctggttgcttgggttgccaatgttgtatcttagggtatagtttttctatacatccaaaatagtatagtacaacattttatttctatccaaaatagtacaacatgtttttacttacaaacactatttactattttataaatccaaatccgattttaaaaattcaaactattttgtatgtagaaaaaaacatagggcttttctaataaattttataattggaatctattttttggaaaagatatatagcaaaaaaaaacaaataggtgcaaaactaaactaagtgttactaaatcatctcacctccaattcaacactaaaattgtctttttcttatccttacatgctattttcttaatttttatacatatggtgctatatttttaatttatttatcaaatatggttattaaggtaaatcacccaaaaaaaaattatatatcaacgggaaaattcccaaaaaaaacctcaactatttaaaatttgtcagaaaaacctatcaacaatgaacgggccataacaacattggttatgttagaaaacctcatgtaaaactagtattatacacaagatacacattatccatacaaataaaatgggcccaaaatatttcaaaacccaaagtggtcatcgaatatgtaagataacaaattactctctaactagtaaagctgttttaaatgggctataacccgcggaccagatccaactcttaaaaaaagtctataagtcataaggacaaaaaacaaaaaacaattgaggaaggacaagaaattttattaaaaaaatgttgccaatttgccattccaactacagttaggtttatgaatgtcaacatcagatatttttcgagctaccttgcgaatggctaatcacgcaagcacgttcctggaggttgacgttacacgtatatggcctatcctacgttcaagattaaacttcttcaatcctttttttttttttttttttcaattatctctgttttgaataaaatctactacgtacagttgcgaaaattttagttgaatcttgttcatccagaagtagaaaatagcacatctattggaaagactaaaactgttttcatattttcttatgctaaaaatacaaacatttcgtttggaaaaaaggttgtagaaattacacaaaatagatctcacagtttaatctcatggcaaaaaaagaaaaagaaggataaacgacaaggaagcaaacaataataaatcaatcaacatcaataaaagcaattactctttcggattcaatgaagaaatcagaatcgggtttttatttaatttttaattttgtataaagtaaatatttagaatattaatctttcacacatttttttacatcaaattgttttacaaataagatttgaccatgacctaaacgatggtagtttaatggtaggtgtaaccttcatttgatggtgtgcgtgcgtttttcataaccgttacatttaattctgttcgtataagagattttaaaatataagctcaaactgtttaagagtgtagtcatgtaatcatatacatttgactgtatatgtactgttccatccaaaactttctgtccatgtaatcgtatttcaacatgtcatgaaattttaccaataactaatgcgcaaatttcaccgtcagaaattttatcccatctcgcaattcaactttagattggagaattgaattc

SEQ ID NO: 1189 - DNA, 30734 bp, Arabidopsis thaliana
aagctttcttatctaatcagaaaatgaggttcatccttcgttccatttgtttcctactcctcgtttcaagtttttctaaacacttttgtttcatctacacaacacttgtgtgattctgaccaaagggatgctcttcttgagttcaagaaagagtgtttgatccagaaaactacttgggttgatttaaagtgattgttattcttgggatggcgtgtgatgctaagtcaggcaaagtgattgggctagaccttagtgacgacttcctccatggcaagctcaaatccaatagtagtctttttagacttcgtcacctgcgtgatctgaaccttggttacaacaatttttccggttcgccaatcccagctcagtttgataaacttgtggggttagaaatgttgatcgataattgagtttagtatgtctaataattatataagtaattatgtatgttaagtcaaagtgtgtgtttggttaaagagtcgtgtctattaagtttagacagttatgtcttaagggtcacaagaaagaagagttgcatctcttaactttcaaacccgattgaagtctatttaaatataagttgtattactggaacacaagttgttcattttgtcttttctattgaataaaacagaagttctttttcattcaagttacgtattgatcacgatcaatacgaagttgattttctctctgttttactctgtttctgttttggagacttaagtttctaacaagaaagacttgacctcttttggtcttcactttcagaacaaaattccaaccaagcttcttcagctaaccaagttgttgtctctccatctttcttctttgggctatttttacatgcctctatcaatttataattcttttcttcatctacttgctcgaaacttgagaaaccttagagaattggatatgagtttcgtaaacatttattcataaatctcccatgaattttcaaacatgtagtctctaagatggctaaatcttgaagactgtaacctatttggagaatttccaagcagtgttcatctgatacccagctgagagtccattagattgtacgaaaatccaaacctgataggctattaatatagtgactacgcatctattaatatatcatgtttattgaaataatttaaataatcaagagaaacaaattgatcaaaagtaagcaaaaattaagcaaaaaaaagcaagaaatgagcataacataagtaaaatttctttaaaaactgacaaacaaaattcacatagtcaaagttaagattttaaacaaatacttctaacaatcaaatggatagggtgaaaaaaataaaagtattgtcttcagccaaaagttaaatttttgtcaagcccatatttatgtaagatttcaaagttgtatgttatttcatttttggatctaaatataatattgtaaagtcatagtagaaaaccatagaccatgggctattaaacttgtcggcccaaatgttatttttttgtctattataaagatgttgaagtgtaattatgtatttttatttgcaatattgtcttaaagtgtttttcataatattggctgagtaaacaaaaacaaaagtacatataacataacaacgataatcttgtgtccgacaatggctttgttggagacctagtgtttgtttggaacctttggacgatgcttttgtgagaaacagatccattctcatacagaatcgtcctcgccggacactcttctccggtctcgtggcacacttgccaatttttctgtacgtctttccccattcgtactattccaaggagatattcctacataacttattctagttaacaaatgcttgaattatatagttttgcaggagttagtgatcgaaggtcggttgatccgctcggataatacaatcaatcacatctccgttgaggctcttttcaaacaaaaagaaagtcaaaacaattaaactaattttgcataattgcatttgtatatgtaacaaaaaaaatgagaaataaataaaaccaagagtttattacttacgtaaatagtagaaactgggataattgaaactccaagttgaatgaagaactgactcatgataaggacatcattagtgagttcaaactcttcattttcctatgatttaatacgaaaaataattgatttaactttcatagcacaaaataatagcaagtcgacgaaattgagaagacattatattactggaaagatctaagctagccacaacaacagttgatattaagaaacaatggaatttctcttaaaatataagaatacaaaaatcattataaataagagtccaaaaaacaaatgttgagatctggagtttacaatattaatgtctaccccaaacctgccaacccgcttctaaagtgttgatatccgcagtatcatatgatccagatgccaactaaatttgtgagaggctaaagtcatgggacgatacaaaagagaactcatcatcagagtctctaaacactgaggaattgagccgtggagattgttgtctaatagatctagggcgtatagagagttgagtccacatattgactgaggtatctctccggtgaagttattattgaatcccaaaaaaatatttgagagacctggacgtgatgaagagtggtccttggaaagcgtcaacaccaccgcaacctgaaccgctggagactaatgaagaagaagaatcactgagttgggtagcagcaggtttaggctttgcacctggagttgtatttggactggatatggcttcatacaagcatgagtggttcatgaataattttggccgcaacaagcaacagagcaccagaactcgttaagtcactcatcgatcatcgtccttccttaacgcattgttgttatgttcataaataatttgttgtatttcaaataataaataatttgttgtatttgatgaaatcaagttttatgtataataaaatatcatgttttgaactatcaggaaaccaaagacttacaataaaaagttagttcataggttttaatatgttttcggttttccattttccacattgttgctgaataatagaaaagtttttttttttttttttaaagttattgtttagtgaatgcaatattacattcttgattaatttaataagaaaacatcagcattaacatgcatgtgtcgtttgataaacatgtaagtaacaagaggagtagatgtgcaatgtgcaaacatggacttatcgaggagattatatcaggttcaatgagacgagtcacggccatattgtcttggttgttccttggaacccaagcaacaatattagatcaaccgtacctagatccagactacattgccatgaaatctgattattcagatcttcaaaattattgtgaacggtggcattttgcaatcctcatccatggagactacaggtcgatcatcaaaatcactctatagttaatgggttaatagcgtccttgattataatagtcgttagctaagcttcgttgagagaaaaagaggttttgtgagagatagaacgtaacgttttgtgatattagccaacgggcagcgtcaatattgagttttcaacctcgccaagtctacaagttttgtttcgtttttgtctttatcttttaaaagatgttgaaactacacatattaatctttctttttctgtctacatatatttaatcttggctcataaagaaattaattttctttataacgtacattgtgggaagcaatgcaaattttgaaaagtcaatattgacgttggttttaggtttgaaattggctagaggacgacttggaaagcatttcatggaaaaaaatgctacacggcacttatatttttttacttttcctcacgaaactccaattttcctttgcttattgataatgatttttctataattctaaataaattgctcttttaactttccatcaaaagacttcaatttatcaaagtctatggaactttatgttttctttatatatgtagtcgggaagacacttcataaaaagatccaaaacactaatttactattattattcggaaaactttgttttttcacaaatataaaagttttcatatttagtgagaaaatgagcttccttattcgttccatctgtttccttatcctcattcctagttttctaatcacgtttgtttcagctacgcaacacttgtgtcattccgaccaaaaggatgctcttcttgatttcaagaatgagtttgggatggttgattcaaaatcatgggtgaacaaaagtgattgttgttcgtgggatggtatcacgtgtgatgctaagtcgggaaacgtgatcgggctagaccttagttctatcttcctctatggccagctcaaatccaacagtagtctttttaaactgcgtcatctccgtgatctaaacctcgctaacaacaatttcaacaattcgccaataccagctgagtttgataaactcacagggctagaaagacttgacctctctcagtcttcactttcaggccaaattccaatcaatcttcttcagctaacaaagttggtgtctctcgatctttcttctagtgattttttcggtgatgaatcttttcattatttatccattgataaatcttttcttcctctacttgctcgaaacttgaggaaccttagagaactagatatgagctacgtaaaaatttcttcagaaatccccgaggagttttcaaacatacggtctctaagatctctaaatcttaatggctgcaacctatttggagaatttccaagcagtattcttctgattcccaacttacaatctattgacttagggaacaatcctaatctgagaggcaatcttcccgtttttcatgaaaacaactctttgctaaagttgaccattttgtacacatccttttcaggtgccatacctgactccattagtagcctaaaaaatttgacctctttgaccctttccgtttcttatttctctgggaagattccattttcacttgggaatctttcccatctctcccatcttagtctctcttctaataatcttattggtgaaatcccatcttcaattggcaatctaaaccaattgaccaatttttatgttggtggtaacaagcttagtggaaacttgccagctacgctaagcaatttgaccaaactaaatacaatctctctctcttccaaccagttcacaggttcccttccacctagcattagccaactctctaaactgaagttcttttttgctgatgataatccttttataggagccattctttcacccctactcaagattccctcattgactaggatccatttgagttataaccaactcaacgaccttgttgggattgagaatatctttatgttacctaatttagaaaccttttatatttaccattacaattacaccaaagtccgtccacttgacttaaatgtcttctcgtctctcaagcagctaggcacattatatatctcacgcatccccatttcaaccacaaacatcacttctgattttccatcaaatttggaatatttgagcttaagaagctgcaacatcactgacttccctgagttcataagaaaggggagaaatctacagattctagatctttccaacaacaaaatcaaaggtcaagtaccagactggttgtggagaatgccaacgttgaatagtgtggatctttctaacaactcgctcagcggtttccatgtatccgtaaaagcatctcccgagagtcaactcacgagtgtagacctaagctcaaatgcttttcaaggaccactcttcctcccgtccaagtctctcagatatttttctggttccaacaataacttcaccggaaagatacctcgatcaatatgtggactaagctctctagagatcctagatctatcaaacaacaacctcaacggctcactcccttggtgtttagaaactcttatgagttctctttcagatctagatctccgtaacaacagcctcagcggaagtcttcctgaaatatttatgaatgccacgaagttaaggtcacttgacgtcagccacaaccgaatggagggaaagcttcctggttctcttactggttgctcttctctggaagttctaaatgtgggaagcaatagaatcaacgacatgtttcccttcgagttgaattctttacagaagcttcaagttcttgtcctccactctaacaagtttcatggcacattacataacgttgatggggtttggtttggatttcctcagttgcaaatcattgatgtatcacataatgacttcttcggtatcttgccatctgattacttcatgaactggactgcgatgtcctccaagaaagataataatatagagccagagtacattcagaatcctagtgtatacggttcctcacttggctactacacttcacttgtcttgatgagtaaaggagtatcaatggagatggaacgtgtccttacaatctacacggccatcgatttatcagggaatcaactacatggaaagattcctgattctattggtctgctgaaggagcttcgaattctgaacatgtcaagcaatggttttacaggccacatcccatcttctttagcaaacctgaagaatcttgagtcactcgacatatcccaaaacaatatctctggtgagattcctcctgagctcgggactctctcttctctcgcgtggataaacgtttcacataaccagcttgtaggttccataccacaaggcacacaatttcaacggcaaaaatgctcttcctacgaaggaaaccccggacttaatggtccttctcttgagaatgtttgtggacatatcaaagagtcaacaccaacacaaaccgaaccgttggagacaaaagaagaagaagaagaagaatcatttagttggatagcagcaggtttaggctttgcacctggagttgtatttggactagcgatgggatacatagtggtttcatacaagcatcaatggttcatgaagactttcggacgaagcaagcaacagaacaccagaactcgttaagtcagccatcgatcatttttccattcttgttgttatggtcataaataatttgttgtatttcatgtagaaaagacaagcgtgtaataaaatatcacgttttgaactattaatactaatacgttagtactagtgttgagggaatgcaataagacaccatcagtatgaaaatgcacaagtcgtttgataagcaggtaagtaacaaaaagatcccaaacgaaaatattctccaagtattttgatcacatttcatctcatgtacacatacacacaagtttctccccacttttatttttaaaggctttaattaataacctgatttggaggagaagaacctgcttattcctctagaggctttctctggggtcgcgttagtagatgaacctgaccttgagagcctggaacccactcgtgatggcgatgtcgtcgtatcgctagtctctgaatcagaggggcattttggagactccataaatctaggaacctcgttaaccgaatctccttcgtctactacggcatagttctttgggactgaggtagtggtggtgcctagttcctcttcttcagaataggactcatttcgagtttgtggtgacctcatttgctcaggttgtggccgaaatgacttcagctgcttccccaacacaaatatggtttcttgacactcggctaacttctctgctgctgccgatagctctctctcctgtataatatttttcatgttagttttctcttttactcaaaagcttcaaagtcctatgaactcaggaattcatgcgtgtagattctcttatatatgtgtatgcttgtgtttgttttttatgtctgtgattggatatgtacatgcacctaaactgattgcatgtagtatggtgaacaatgaataagtagatgatatatgagctacgaatcaaaatgcagaaaaagctgaaaaatcagaagcaaaacataactcgcattgaatagagtctgcgaaaacattacctgtttgctcttgatatcagcttcttcatcatcctcagcaaccaaagaagtgtttctgtgtctgagaaaaaagtgaaaatatagacatgtaaaaagcagtaagtaaattcaggctcttacatattctggtaaagatgatacctttgaatatgttcttcaagttcatggcacctcagaatggcttcttggtggttgcatttttcatcctcaagctcgttctccaacttctgtatcttttccttaagctggttcacatcgatctctaaatcagctgcacgtgattcaagtgatctatatgactcagtcatacatctgagttgagtatccgccaatctgtttgacctctgagctgaatcaaactgtgatctaatgtcagctaacagctgctcagattcttgtaactgacatttcagcccctcgatatccacagccatcttttctttttctgatctcagttcttctatttcctgtaatttggaatctgattcataccctgaaactctgttttcatcacatggaacccctggctcgttgtggacacatccattttgatatatttcctgagatgaatctttatctacaaccttgctctcgggtaatgcaaccttgtctatgcaatctggactcagagtttcaacctcagaggaagctagacccctaaaacttacctttcgctccatcgcctcgttgaagacattagcaagattcgaaacaaaatcgtccaaacttttatcaccgcttaaaacatggttgaacgtgacggagaagccctcaatcagctcaacaaaatcatttccctcaatagaggtgtcctgacctgcctttacctcatttcttagcaacaaaacaaaatcatgaatccgagatacagcatttttcaaatcttggtgaatgctctgcagcttttgttctgccaaatgacaatcttcaaccagattttgttctggacataaatctgacacttcttcaggatgaacatgcacctcagaaggcttttcctggtccatacaagcattcacatcttgcaaaatgcattttatatcccccactatcttttgtatgtcagcatcaggagatacagattcaagaacctttgataatctagatctaaatttcatcactgctggactacctctatcggaatcctcaaggtcggtatgagcatcaagaatcaccatttctgacttttgatcacctgaaccatctttagaatctatactaccattactgctagatagatttggtaaacaagctaacttctccatttctagaaaatcatccataagctcaacatgactattaacactctcaaccctctccaaggctgccatgtccttctccttcttgatctgttgtgatgggtttgttgacagagatccgctgcagctaccagagtcgtcattcccatcttcagaaacagagattgagcttgatggattgctcgtattcagatttggacacacttcaagtgaggacttctgagaattattttgctgcagttgagcttctaagctttgaagcttacttgtgctctgagcacaaagattccgtgactccaacaactcactattccgctttgccaaggcttctttcagcatttttgtctcttcttccattgcaagtaaacgctctgttagaaattcattttccttttggaatttctgtgcattatcgagagagaactcagacccagttgacgagtatcctcctggcgacttgcacggactagagaccttgacaggagatctcttttgtcgggcatcaccactatccctgcctaagttctcaacctcaagcttcatttgagcaagtgcagctgggcctggcaacttctttctcacaagacttctcagtctctggcattctgcttccaacttagctattttctttactccttccaagtgttgcttattagcagattctgcagatctaatacacatgttcttttcttcgtttcgtatctctagctctttagaaacaacatggacttcatacttaagagactttatttctctttcacacatttccagattgctcttcagggtctcgatctcggcatcagctcttgacttctcctcactgacttttaccagcatgttggaccgctcctgtaaagttctagataaagcatcactatccgctgcagacctaagtaactcttgttcatagtcacacatcctcttttcaaactccatggtcattttttcaatttgcttggtcttgcttaaagcaacatcatgcagtttcacttcatggtctttcttcaagttccttatctgcctcatacattctttcaatgcaccatctaaatgcgctgcacgatcctcagctgtgagtttcgaaagagtaacagactccaacgtgtttttcaatgccaaagcttccgcgtcagctttttcccaacctgcaacaacagcaaaaagctataacactttactctctacattacagcttaaaacattcactggtgacaagataaaaaaagttaaaatacctgaaacagcatcttcagcaaccttagagtgctgcttcactaaagcctctttagtaacaatttcctcattagcaacagaaagtttttcattcaaatcctcaacatcttcattaagtttctgcacttgttcttcatactcatgaaccttctcatcataagcatcaatctgttcttcaaaatccttaacttgctcctcataactctcaacttgattctcataagttttaacttgaacatcgtaacctttaatctgaacatcataactctttatttgttcctccaaaccagtgaaatgtgtatactgctccacagatatttgcacatactttggcttcttaatagcttcctgtttcccaaaataaccaaataaaatgttcatcaaatctagtcacaatacaagtaaatgtcagagagtaaaaaaaaaaccttatcaatctgagaatgagaagcatcagctgcagaatcaatcactaagattgatttatcagacgcctttttcttccacggccagcttcgtcggtccattgcaatctatataaattaatcacattgttttcaaacagatccgaagaaaaaccctaataaagtctgataatcatttttttttttttgctgaatgaggaaaaaagataaggtaatctgagagatgcatcgtcaaaaaagtaggttactaaattaggaaaaacaacaaggtaaagtaaacttgccgacacacaaaaattgaagagaaaatagcaaaactaaattaaactctacgaagcttaaaaaaactactgtaatcgagttttgaatttaagcatcacaaagttaagaacacacatgacgaaaacagaacaagaggatgtttttttttatgttcggggagaaaaaaaacagatggttagagcttacatcggagagaaatgtagctttggtgatagatttgttgtttgtttcttcgaagtttaaatgagtttgtacatgcgattttttggtaatggagatctggaatcgagtttttaatcactcagtgcttggatttggagctgttgaagaatgcggcgttgagtagtcgtaaatcggaaccctacggttggttttacggcggcggaggcgatgaagtggtggctgagcttgagcaaatggtttttttttttttttttggtttttgttatcagtctcttggttaaatgtgtcaaaattttaaagaacgttgcagcataaagctccaaaagaaaagcatcttctttcttcttcttctttttattttgttttgttttttgttttcaataaagcatcttctgtttttttttaatgaaaaaatatttgagaggaaaaataaaataagtaataaatttgatatgaataaatatgttttatctggtaataataaatatggaaataaagggcccatagctctacctaacacattcaactcaaaaagagtctttggcatttggttaactgatgatgatattgataccatttggcagttaagtaattagaagaaagacgttatgactaatatgtgttggaaggtttgctgaattctagctgaaaagtagcagaagaacaagacaaatgtagataaattttttttttttctaattaggtgactttggaagtgtgaagaagtggttattttaaaacattttggttaaatttttgtatatgttcatgtagttttctatttctacaaaactacatgaacatgtgattcagctaaatctcgtatcttcctactcattataagtaactaaattgtcctaaacatataattattccaataaatatgtatatagtacgagaaatgaaaggcacaaataaatgaggtcggataatatgtctcgaatggacaaccctactttttataatttataatacagagtttaattaataaagtatttatttgttcaaattttctaacgagatgagagaaataattcaatttcagaaggaagaacactgttttattaatattaactgaaatatagttacaaatatacatcttatcaatctgtaaactagtcgtagtatcagttattcaactatacacaaaatttattattttgttagtcaactaatcttttagatttcacatgatttatctattgtcttttaaaccttagctgatttgtaagaaatcagcatagaattcggccaaaaaaaaaaaattcaatcagattgttatcgtttaatctctaatattccgagaattaataagtcgatatctattttaaatcttgtaattatctatgttagcattaaagtattgaaattctcataaatatgtgttttcatgtatcatgattccaaggatttactcataaagtattagatttctcaaactaattaagagcctactttgcagctaggaataaagaaatttcatagtcaggcatcctccaactaattaaaaatgcaaagtttttaactttgaatcacttcgatcagtgtttggagtaaaaaaaatatcactgactgcgctagtgaccttagtgaccacaccaccaatcacgtctatggcggggtcttagttttgaagaatcattaaatttgactttacttttacattgagagatcattttggctctataaaaagtggcaatctcataagacatcaaatgttcaccagtttctaaatgattattttcttagagagggcaaaccttgatagtgcatagtcacgttttctaagaggagataaaacagttcttgaggtgatcttaagagaaaaagtattgagctattatcttttaatatttttttgttcatctattgtaatttagcaattgatttatttgtgattaactttggcatatacgtctaatgcattatcctcttagtgatcagccttacaagtacacatttaattaccaaggtccgagaaatcatggaaacctaattagaaaagcattctcaaaaattaaaaaaaactttagcctttaatatagaatgacaccaaactaatcaaactatggtttatagactgaccttaattttttttgttttcatttttaaatcttaaaatattatagtaagaaaaataaaatataaaatcattacacttaacattagagagtctcaactctatttttgtagtattcatttattatgaatactaaaaaatatcaaaaacatatctttttataagttcacaccttcttttcgaaaagatcttaaaaagtacctttgaagcttttccttgatttatgtaataagaatctataaattttattgaacctaaatattttgtgatatttttagcaaaaaatcgtattattatttttcaaattgaaaccttcttatagcttgtgatcatcatttgaatctttttgtttttcgtattaacagtctttgtaagttttgtctatttgaaaataaattatttgtacgtgaaaataataatattattgctttatcgatgattatgataccataagatcatcgactataccaaactgtcaaatttttaatgagccataatcatgtttaatttttgttgtaagaattaaattcatgatcttatatctttttggccgtttgatttatgagttcagtgctaattaattatgaacaatttttatttttattttactaaagatacttgtatattaagacgaatattagacataacagagacatttaacatgtgcatttacataattccataattagatcatatgttttgcaagtaaaaggacaatcgagtgagcatggtgctatttgttgaggtccaacatccgaagatgattctttgtcgatcacatgtgaggtgaactctttctgcatcaaacttcgactttctacctttccaatacttgaaaatgtcatttctacaaaatttaatttaagctaagttaataattatatagtagaaataatttttaaaattacaaatatattgatcaattatatcgataaaatccatacgaaaaatatagaaaaataaatattcaccagaaatgagagccaataagacaaacaaagtgaagatttttaaaataaatttcattattataggcaggtttgttacaaagcaaggtctaaaaaagaataaattgttgagtttgataaattattagattatgtttcaatcttataaatgttggagaagtggtactttagggtaaattagtcattttatgggaaactttatttcaaatcaaaatcatgaagcttaaaacatctctatcaatatttttaatgagtatctataaaagacaaaagttatatataaaaacaaatgaggaacttcaaaagttaagaaacatatctcaaaatttctaaaatgagatactttgacatgattttcttaactattcatatccacctattttaaatattattttttgctttttgctattatagaaatccatctaaaacgagtcgaatggaggtgttcttctatactaaaggttaatggacaaaaaaataataatgttaaagagtaatctttatgagaaattttattttaagccaaagattgtttgtagatcatagatttattgagaatatttacacatcatatattgatgtatataacattaatgaatgagaaagactgatcattttaaacaaataatcaatataaattacatgagtcaaagtagagtttgataattatatatactgtacattaactagatatacttgaaaattactttctaatttccactatgtcatgaatcataagatccttctactaggacacacatttgtactgaaagatctgcttgatccgtttaatctactcgatccactatgtctgtggtacgctttctctattcaaagcctatatttgctagattttgattactttgctaggaccacaacttcaataaaacatcagatgacttttcacatattgtatttgaaacaaattaagatgttaaaaactataaataaataaattaaaaagaaccaagtgaataaaactaaatcaaaagaaaaaaaatttaacaaaatttttgggcatatattgagttttcaccttaaggtcactccaaagtgagatgcatatattttcatgttaaaaacttaaggaacttaatatctttcttttttttctttattgcataatattatgttagagcataataataataaaaatttccgttaattaaatatgataccgaatttttttattgggataagtgagatttgctataatcggatggtctagattaaaaacacgcgatttcgattatcaggttaacacatatgtttagttgattgtattcaagattttagtgttgcccaattttaaatcagatttcaaactctcaccaagcccaattatttattttattttttattttattttaatagaaatatatgcatgctcagacaaaataaacataaaacatccaaatttcaatacataatccgttgtatcaaaagataactaaaaatcagggccactaaactattaaaattaccaaaatattcttagattcaaatctcaactaacataacctaaattctcaacaagttctacaaatcctttattattcttcttcttttctcctctttcatctcttttttctcttacttctctaacttttacttagtttctatctctttctctttctccttattttcgtccacctcatcaaggatatcccaatacttctttagttctttaagacaattggcggttccttcttctcgtcaattttttttttttttttaaaacaacattagcttaattgcattatagtcgaccactataacacattttacttctccaatctgaaatgagaaacacgttttattacgcaaatcttctctagattcctttctccaggaacttaatctgccaccaaaataaaataaataaaatctaatctgtaaccaaaatgaaattatatattggtttgagtttaagagagagtttgagtttagattttataattaaacgaagttaaatattggtttgaatttatatactgatctaaattttaactaaacgaagaaaatgttggtttgagtttagaaagaacggttagagtttagatttacgattaaaggaagttaaatattggtttgggttcacgaaggagaattaatgtttagattttattattaaacgaagttaaatatcggtttaaatttataaacatgtttaaattttacaattaaacaaagttgtatatcagtttgagtttacaaaaacatttaagatttagattttacaattaaattatgttatcaagattgcggccttttagaatttccattttttggagattggttatcttggagaggttggcgagataagaaaccaatacgatgtcggttagatagggccttagcaaatgaagaatggcatgatttattcagtaattctttcattgaatatctaactatgttagcttcagatcattctccggtgattgcaacgattgcggataagataccacgtgggaaacaaaattttcggtttgataaaagatggattggcaaagatgggttattagaggcgatttcacaaggttggaatctagattctgggtttagagagggacaatttgttgagaaattaacaaattgtaggcgggcaatttcaaaatggcgaaaaagcttaattccttttgggcgccaaacaattgaggatctaaaggccgaattagatgtggctcaaagggatgatgacaggtctcgagaggaaatcactgaattaacattacgattaaaggaagcttatcgtgatgaagaacaatattggtatcaaaagagtagaagtctatggatgaaactaggggataataattcaaagttttttcatgctttaacaaagcagaggcgtgctagaaatcgaattacgggactccatgacgaaaatggaatatggtctattgaggatgatgatattcagaatattgcggtttcttattttcaaaatttgtttactactgcgaaccctcaggtttttgacgaagcattgggagaagttcaagttttgattacagatcggataaatgatttgttaacagcagatgcgacggaatgcgaggtgcgagcggctttatttatgatccatccggagaaagcgccaggtcctgatggtatgacagccttgttttttcaaaaatcttgggctatcattaaatcggatttgttgagtttggttaattcttttttgcaagagggggtttttgataaacggttaaatacaacaaatatatgtctgattccgaagacggagcgtccaacgaggatgacagaattacggccaattagtctttgtaatgtggggtataaagtcatttcaaagattctttgtcaacggctgaagactgttctaccgaatcttatttcggaaacacaatcagcttttgttgatggaagactaatttcggataacattcttattgctcaagagatgttccatgggttacgaactaattcatcttgtaaagataagtttatggcaattaaaacagatatgagtaaagcttatgatcaggtagaatggaattttattgaggctttgttaaggaaaatgggtttttgcgaaaaatggatttcatggataatgtggtgtattactactgttcaatataaggttttaatcaacggacagccaaaaggtttaataataccggagaggggtttaagacagggtgacccgctctcaccctatttatttattctttgtacagaggtactaattgcgaatattcggaaagcggaacgtcagaatctaattacgggtataaaggtagcgactcctagtcccgcagtttctcatcttctgtttgcggatgatagtttatttttttgcaaagctaataaagaacagtgtggaataatattggagattctgaagcaatatgaatcggtatcgggccaacaaattaatttttcaaaatcttcgattcagtttggtcataaggtagaagattccatcaaggcagatattaaattaattttgggcattcataaccttggtggtatgggatcgtatcttggattgccagaaagtttaggcggatctaagacaaaagttttttcctttgttagagatcgtttacagtctagaataaatggttggtcggccaaattcctttccaaaggtgggaaagaagtaatgatcaaatcggttgctgcaacattaccgagatatgtaatgtcttgttttcggttaccaaaagcaattacatctaaacttacaagtgctgtcgctaagttttggtggagttcaaatggggattccagaggtatgcattggatggcatgggataaactatgttctagtaaatcggatggcggattaggattccggaatgttgatgattttaattcggctttgttggcaaagcagctgtggcgtttgattacagccccagattccctgtttgcaaaggttttcaaaggaaggtattttcggaaatccaatcctctggatagtataaaatcatactctccatcttatggatggcgtagtatgatctccgctagatctctggtttataaaggacttattaaaagagttggttcaggggcatcaatttcagtttggaatgatccatggataccagctcaattcccgagaccagcaaaatatggtggttcaattgttgacccatctctaaaagtaaaaagccttatagacagtcggtcaaatttttggaatattgatctcttaaaagagctctttgatccggaagatgtaccgctgataagtgccctgcctattggtaatccaaatatggaagatactttaggatggcattttactaaagccggaaattatacagtcaaatctggatatcatacggctcggttagatttgaacgagggtacaactctcataggtcccgatcttacaacgttaaaagcgtatatttggaaagtgcagtgtccacctaagttacgccattttttatggcaaatattatcgggttgtgtaccggtatcggagaatttacgaaagagaggtatactttgtgataagggttgtgttagttgtggtgcttcagaggaatcaattaatcatactctttttcaatgccaccctgcaaggcagatttgggcactatcacaaattcctacggccccagggatttttccctcgaattcaatttttacgaatttggatcatttgttttggagaattccttcaggcgtcgattcggctccttacccatggataatttggtatatatggaaagcaagaaatgaaaaagtttttgaaaatgtggataaagatccaatggaaatattgctcttagcggtaaaagaggctcaatcgtggcaggaagctcaagtcgagctccatagtgaaagacatggttccttgtctatagatagtcgaattcgggtgagggatgtatcacaagatacaactttttctggctttcggtgttttattgatggatcttggaaagcaagtgaccagttctcaggaacaggatggttctgtctatcatctcttggagagtcgccaaccatgggagccgccaacgttcgtagaagtctatctcctctacataccgaaatggaagctcttctttgggcgatgaagtgcatgattggagcagataaccagaacgtagctttctttacagactgttcagacttggtgaagatggtgtcttctccaaccgaatggccggcgttttcagtgtatttggaggagttgcagagtgatagggaagaattcacaaatttctctttatctttaatttctcgtagtgcaaatgtaaaagcggataagttggcacgaaagattcgtaccgtaccgcatcatgtcacgtatgtaaacaatatccctcgggattggctcttttgagttttaatttatatcggttgacaaaaaaaaattaaattatgttaaatatcgatttgagtttagaaaaaatacttaaagtttaaactttgttactaaacgagattatataaaggttggttttatgaaaaaaaaaaagtggttagaatttaaattttagatttaaatgagtttttaaatttatttaggcatattttgattggttagaattcaagggatgtacaatagggtttagtttttttgtggtatttaatgcaagaagctttttgatcttcctcgcctcctctgccgacgaaggtttcgttctcctcttgacttacactttctccttggatttaaaggatccatcttagattctgaatttcttttttggtaacaacattcaataggaaaaaaagaacttgttgtgagcctgagcctccacgagttgctttagcgtgtagaggtgtaattaaactcctaatttatgatgagaacttctcctagagattcgataagcaatttgccagatgagatacttggcaaaatcttgtctttgcttccgacaaaagtggctgcttccacatcggttctgtccaagaggtggaggaatctgctaggtcttgtagacaacctctgctttgatgagtcggtggttgtttatcccaacaaagaagaagcttttaagtggttcacatcgattctgtgatttcgtagaaaagacatttgctctgctaagcaattctcccatcaagaaagtgtctgtgtgtcatatacgtatatgtgaatgtgactgccacgagacataccaccgttggatttggactgcaatggaacgtggattgttggaactacacttgcacgccgaatcatttttatttgtagagagagagttgttcacgagcaagacactggttaagctcacactatccgctggatatgatttcgaagctgagcgtgtgtttctccctgcgctcaaatcactttatctcttaactgattccgggattgattatgacaaccattgtcggctccttgatggctgccctgctttggaagagttattcatacgtgatgctgatcatgattgtccgccatgttgcggttcagtcgtgaaaagtgcatccatcaagcgacttgtggttttggttaatcttccaaacaagagagacagtcacgattatgcttattttgaagcaccaagtcttgtgtaccttgactattctagttatgtctacgagacttatcagattgttggtttggattcgcttgtcgaagccaggctgagtctcaagatatgggattattatgattacaattatgattacgagtatgatgacgaaagtggtgattattattctgatgatgatgagggtcgttcttactgttattcttatgttgatgatgaacgaaaggagcctatttttggtgatgttacaaatctacttgcgggtgtaaccaacattacaacccttcacttgtctcccgattcccttgaggtcagttctacttcttcttctgttgattgcttttcatatttgtctactgcttgctagcaaggttgtgatgaccatatatataaaccaggcattttatttctgctgtaaatccatgccggttttcaacaaactccttaatttatttattgagagtaacaaggataaaggttggcaaggaatgcctcttctcctgaagagttgcccaattctacacactttagtcttcaaggtatcatcagtttccttattgtttgattcgtttcttgtttattgtaagcatgtcaaattggtctcgtttcagggtcttgtacatagagtaacaaacaaatgtggagatgcatgtgcttgcatccctaagaaggaaaagagggagaatgagaaaaagaataggaagattgtggagaagaaattgtcttgtttatggacttgtcaagtgaaggtgctggagatttcaaagtacgatggttcttttcaagagctgaaacagatgggacatttattgggcaaattgggatgtcttgaatctgtgaaagttggtgttcacgcggacaacaacactgagttcttgcaagctaatctgctggctctccccagactttcatcaaagtgcaacaatatccagttcagctgacctttttcttccctcatgatgtggcattctaaaagtaacttaatatgaatttggttatatcactaaaataccattgaagttcgttataatctgtttctgaatgttatatcatacgtatgggttttccttcttcgtgtgatactgtcagctggtagaatcttactcctctgttgccacaaaataaattggcagttgatgtttctagcgaccatactattagttcgatcatgtatggacaactaactcaatttagtagtaccctcccaagagtatatcaagtagtgaccattcgattagtttatggttaagagtttaatggaaatatacgttctatattagtgtgtttgttagtatgtgttagcttttggtgtgtgttaatattctgaaaaactcttctaagttagatccttagattaatttatgaagggtaataaacatcactctcaagtcttcagaattgtcctagagattcactaagtagtttgctagtgagatacttggcaaaatcttccaagaggtcttgtagacaacctttgctttgattccgatttcagtcatcgttgctttttctctctcagcctctcaggtgactattgattccgctgctgctgcaactaccgtcccttctgttgccttctccgacgggtacttccctttttctcactctggttccttcttcttctttctctcaaagtttagtcctttttcttctaattcttgatttaggaggaaactgagtggtactactactcttcttggctatgttggtcgatcagctaacacgcttcctgatttctatggccacgatgcttttgattcttcccagattgatgaatgggtagattacgcttctgtcttctcctctggttccgagtttgagaatgcttgtggtcgtgtcgataagtatcttgagagtagcacgtttcttgttggcaattctcttaccattgctgatgttgctatttggtcatctctcgcaggtataaatttattatctttgactctttggtatgagtttctttgtatttgatgaagctgattagttgaacttttggtaggaactggccaaagatgggaaagtttgaggaaatcgaaaaaggattagagtttggttagatggtttagttcgacattagacgagtacagcgagctgcttaacaaggttctagcaacatatgtgaagaaaagctcagggaagcctgtcgctccaatctaaagacagccaacaagctactaaagcagatgcacaggataaaggcaaacctgaagtggagttgccggaagcagaaattggaaaggttcgacttcggtttgctccagagccaagtggttaccttcacattggacatgccaaggctgcgttgctaaacaagtattttgctgagcgttttgatgatactaaccctgctaaagaaagcaatgaatttatggataatatggtgaaagatattgggaccttggggatcaagtatgagaaaatgacatgcacttcagactactttcctgaactgatgcaaatggcggaaaaactgatgcgttatctggtgtgctgaccattgtcttattgtcttattatcgattccagatggaagagtggttaagtgatgaatgaaaactctttttgatcttcccatgttatgaaaattgtgttgagaatttgctttttaccttcttctttctcattcaacacaaagatccactctttcaataacacactgcaagtttttgcatttaactttcatcattttctagagtcgtctgttcctttttcctacttttaaccattctttcttcaatccagttcttagtaatgtgaggtacattacgtaatgtccatctgaaatgtaaaaacataacggtgttgaatgtaaggtctctgtgtattaattacagtttgtttggatggaacatcattacctggatatcatcacatacattgtggacatggatccgaagccattagctggctcattcaactagaggctagcaaaaaaagatttggtcggttgaatgtataaatatagaaagccttctggttttagtcttgttttgttaccgaagatttaatcaagtgtaggaattggaaatgtggaaagggaggatggcgtgccagcgttaggaactgtatggagaaattaacaaatatagttttcaggaatacttagcaaaagctcaagtaaatccagatcttttgtctttaggctttgactagtaaaatataggtctacccaacccaatgttataaaatccgaacaaatatcatatctgaattatctgaggcgaatttgatccgaaccaaaaatcaaaaagatatccggaaactcgaaatagttctaaaatacggtatatacggccgtatatatatatatatatagtgtatatgtgttgtacggtgggaagccgtactgtgttatggctatacaattgtttaatacggtaaaagctatatggtccgtatatagaacaattatacggtgaattccgcatatacggcgatttttttaaaaaagctcaaaaagaagaactccgtcattttgttaatgtttggaaaaataggttaagaaaactattagtttgactctcaaaaaataacttttccatcttttttttctattattttcctgcttattagttagggctgcctgaattttcagccctatactagttggaatctcaacattccaccctaaacttttagccacttgaaaaaccatcataaacaattttaatctcgataaaactacatgtactttcggatttgttcttaaaactacgcctccaattgaaccgaccagttaaccgataattatacatccggtttgacttacccataatttaaccaaaactaatccgattttgactctattttaacccaatttatacccaaaaaatatattctctagaagaaaaatactttttatttattttcatttatttttgataaaaaaataaaaataaattaattaattttaccaaaataataaaataacaaaatataccgcaaaataatataacaaaatagacaacaaattctttttataaatacaatggtgttatatatataaatgtatttggtatatactctaaatttaataattcaaaagccattttctttttacaaacaccataatcatatataaatatatatatatatatatacatatataactcatcttgaatatataaaaagaaaactgaatctataaagaaaaataaatttataaataccataagatatactttgattgtggtgtttacggatatttataaaaataaatttggcatatattttgaatttcattacatatatagagttcaaaggtcatatattatgatttcaagaaaaatgaatatttttgtttaaaaaaagacatagctttaaatttataaaaaaatataaatgattgccaaatggaaaatgtatatgtttgtaaattatcaaaattttataacaaaatgtagctcaaaatataatttggggtatattttgtcatattaagttttgctaaaattaagtaataatttaatatttttaattgtttatcacaaatacaaattaataaaaatacttttacttcttaataagacaatttagttacattttgtgtgggtcaaaattaggctaaaatagagtcaaaatcagattagtttcggttaaattatgggtaagtcaaatcggatgtataattatcggttaactggtcggttcaattggaggcgtagttttaagaacaaatccaaaagtacatgtagttttatcgagattaaaattgtttatggtggtttttcgagtggctaaaagtttatggtggaaagttgagattctaactagtatagggctgaaaattcaggcaactctattagttatttaaaattttataaatattttgtaaaagtgatttgtgttgtactcatgtaaattattcatcatgcatggttattacagttatgttttattgttattataactttgtaattatatacatatcttgacaaattttatatgtatatatatatatatatatattgttgaaaacatatccaccgtatagtcccatcataaacggccatatatacgtctatacactatatgatgctctatcgtacgcctagcgtataacatatggtagttataatttaataccaaataagaaaaatatccgaaataatctagatatgcaaaattatatttaagtatatttttcaaaattatacaatgttttacaaaaatttcattaaaattaaactaattattattaaaattgaataatcttttaagttttttccggaaactgatctgaatctaacaccaatccaaactgaatccaaaccgaatagtgataaaatccgaacggataaaataaattctcctatctgaacccataaaaatctgcatcaaatctgatctgaaatctgaatgatcatgtctggtctcaactctcaagttatgcttacatgatcgacctgaccccaactaatagtatggtcactagaacatcaaggcctatttacattgtacttttattttgtggcaacagaggagtaagattccactatactgaccaaaaagatgtataaaaacaaacggttaattcctttaataactaaacacagaagttccttgtaacataatacacaggaattttggcactaaaaaaatgaagtcagtactaggtagtaactaaactaaggcactttagtctagacaaccgatattcatccttcaatttggattttggtcactgcgctaaattcgtttctacgtatactttaaagtcataatcaatccactatctaatcagtttgattacattgacatgtgtcatagttacttatgtctacatatgcttaacaagtttatcatttttgtattcctctttacggtttatgttggtgtagctattaattaatcaatatttgtttttatttgtatttacttaagtaagagagatgtggtaggaaaatgataagaactcatttcttacaaaagtttggtaggaaaatggttaatgatggtcttaccattttcctacgaaatttccttcgcattttcttacgaacagtttttcgtaggaaatttcctaccaaattcttacaaagatatgttttctatgtgatattccctataaacatttttggtaggaaaacgataaaaaacatctattccctacgaatttctgacacttttcgccgtaggaaaactgagtttttcttgtataagcttattctatgattagggctaacctcttgtataaatagttagccgtatatatctttgtaacacacaaaaatcaatatactctttgaaggtttctgacatctcatgatgcttatgttctttctttagaattgatacttgactatgtaatctaacttcttaaccgtaaattagaaaaacataaaactgcaaaagaaaaatgatcggtgaagtttttgtatgatatgtgagaaaatattatttgtcgacatggttatgaatattttctacttatgttgtcactttagagaaatatctcataagttaatgggttaaataaggatatttttctttaaggtttatgagattttagatatgtatattttattcgtctttgaaaattaatatatgattttgtgacctaacttcttaaatttcatgattaattatacgaatgtaatatccattgatcgtacataatgtacacatatacctaatttcataagtttaagacaatgaaaatagagctttttgtagttgattaataagaataagaatcttgatgttggtgtgcctttctatggcggcgaagttaatgtcttcggaagacctccttgggagcttaaagacctatttcccgagaaagcccccaactggctattttttaagacacctccaaaggcatatcgtgccatggatgatgactgtatgaagtggaagagtgaccgtcgctacagcgtggatatctgttggtgcaggaatcaacaatatccatgaaacacaactcttagactaatcaactgtgaaaaacacttgggatccgagtggaagctacaccttctggagtgcggacaacattccttgtactgtatgtcacatcgtggcaacgaaaaggcagctcccgagcccaaagttgtagttactcccagcaacaaaaataatgaaaacgacataccgtctcctttgaacataccgcctcctttgaataatgatgcatcatcctcaaaatcaccaacaattactagtgttacagaattggcatgctttcatgagagcatcaatgaaggagacacagtggaaagcttcaaaagtgtaatttctcccggtgtttttgtctctgaaatgcctcggcctagattctgtgtaatcatgatttcaaaggtataattaccaatcatcttactacttattccctgtcgtgcccttacctatttttgttttgtccaggagagcaaccccaactgtttggttaatcatgtagaaaagctcggagagagggttaacgtgacaaagatccagatcatgagaccaaactccatgagtaaatactgttctgtacttgacgaatttggcctagatagtagtatgcttaacaatctcatggagggttttgtctttacggtttccaaaggcaagacaatatgtgacttatatgcattagatagaattttgttggttaagtacttgcactctattgttttgcaggattctcccctaagtgtctggatcaacatgtgccgaatttgttgttgattgtggtgaagatagggatcgtgaatatggtgattcccctactcttgatgttaagaaaagaaagaagagccaggctctcgctgccagaagaaaggtatcacaaaatgacaatgattttgcactagtttatgagatattgatttgagcctgctaactatctctcactaaagcaggaaatttttgatgactctcacataccagatcaggctgtactacgccatagtgccagagcaacaacttgtagtcattgggccaatgtgaatcttctatccacagggtaaactatattacaagcttgcctttcagagttttcagatcacagttgatatgattttcttctgcttttccattgtagagatgaaaaagtagcagtaggaattctcaagcaggtgcagtcgatgcttccgagaaaagaaagaaaaccaaagacacacttttgctaccagatagaaggtataacaacaacaacaaaaaaaaaagacaataagtttatataatatgttgattttgagcatgcttatgaatctattgggatccataattgcaggagattattagagctgcaaagagtgaagctgaagctagatgaaacacaacccatgtatagctttcactattggtatcgttcaagccctgaaatactactttgctgtgttgacaactttagttgaaaaaaacttgaatatatctacaatcattggaggtaaaaatagctctttttatagctgccacaattagtcaagccgtgttgactctttacttggaaaagaaaacttagtataagtagaaccattggtcaagccgtgttgactctttatagactgctctttgtgtttcgaatcttcttgtctcttttacattactatgtacatgaaattggtctaattgctctttacctgtacaaggaaccatatagtattgaacttcgttacattctgtttctgaaagttatataatacgtatgggttttccttcttcctgtgatgctgtcagctggtggaatcttactcctctgttgccacaaaataaattggccttaatgtttctagtgacaatactattagttcgatcatgtatggacaactaactcaatttagttgtaccctccccaaagtatcaagtgaccattcgattagtttatggctaagagtttaatggaaatatacgttgtatattagtgtgtgttagcttttgctctgtgttagtattctggaataatatgtcttcacttgacttgttgctatttagccatgaacaagtgcataaatcgtatgtgttatcttccatgtgacgtattatttctttgagtaattttcaagaacccagaccaagtgagttgctatgattttgatattcctctgttatatggattggcactggaagaactgtaaacgacataaatcacaggagattgtggagtttctggtgtaaatttggtaacgagagggagggtatgtgctgatgaatctaagagagacatgaatttccaagcagaagaagagcaatgggaagcttttgaccttggtgattctttgcaaacgcaaatctccatcgaggtccctgcaaccgcccgcgcaacaacagaatccaaaggcatgttataatagtaacatgaatcattataagaagctt

SEQ ID NO: 1190 - DNA, 96221 bp, Arabidopsis thaliana
aagctttgatcggtctttttattttttcgtctgtatatgtcacatgtatctctcacgggtcgtgcttaacacttattactaaaaaggattgttgagtgatgatggcttgtggctcaacttaattccacgtggaagtatctccaaatcgcgacacgtgtttgttcgaaatctaaatgccgcaaactgtgaaagatcttccaagttacatcaaactttttgtgtgtacatttatgtgcctttgtgacagcacgtaaaaattatacacattgttttctttctcttataaatgttttgctggtaaccatattttctgctacaaaacataaagctaataatatatagcaacgatgatggcttcgaccatttcgtacgcattttgagtcttacatatgtatggttatggcattaatttggctattaataacgatggtggttttgtgtttattggagtttaaagatagaaatgttgttgtgtggacgactggacggtaaaccacgactaacattatccttttgtttacattttttttaaattacatacttgaccattagaagcattaagaaccaatggatcatataacaagataatcaccgaatgacgatcaaatggcctttatttccgagccaccaaacgttgtgaataaaagtagaaagttgttgcgtatagtttataaatttactagatctatgatagctcaaatgtcatggacgtatattatagtttacgaaaaactctatataacatagagaattagagattgtatatgacataaaataaaattgggaagatgttggatcgccacgtgtgcatggttcttaaaactcacgggcgtgtgaatgttgtttcagagaggcgtcacgggttggtggatttttaggttaatgatctattcataacgttgagatttgattcgatgctcagtaattaataacaagattcattatttttattgtgatttggacggcttgacgacaatgttcacgcaagacattgaaagaaacccgaatgttcttgtctgcttcgtggatgtttagctatttgcttcttacgtactaagatcacctccaatggagagagtttttccatgagttatttacattttttttatgattaaatttcaagaaaaattaataagagagttttgtgtttattttcttatttttcatactccaataagcttaataccatgcacacgaaattgatagataaaagattaaaactacaaaaaaaaatcatacctaaaccagaaaaaaatttgaattcatatccaaactttatatttagagcataattcagagtcgttgtgttattcaaccgttatttttgctaagtgagctgatacgtgtttgatgacatagcttaaaacgatgtatttttgcttattaaagttacaaatttataaaattttgcaaaagtcggatctcgacccacaacatttcagtcatttacaaaactcactacacagtcggactcaaaaaccttcttgtcatagccgccaaattcccaaccttctaaggagctgcctttgtaaaaaaaatcttgggctacttattaagaacaatagcaaattctcatttatgtgtttattgtctatttagagataacagactaatgatccaaataagattaaggttacgaatttcaatctgcaaaccgcataacgataaatcatttccgatattttagaaacaaaacaactatttacgttcattccgtaatttccatttcccaaagattaatgacaaagttgaaacagaattttgacatttcttcattcaaagtattacaatcattaaactacacctaatagatgtcaagataaataaaatatatttaaaacaagtgaaaatagagagaaaaacaaatctttaatttagtagatattgttaccttgtatgtataaactccactggtaatgtatccttcaagatcatccaggatgctatatttgcttctacgcaaaacaacggtggagaatggtgttagcaacttcatcattttctgcaatcatgaccttgacatagcaaaaaaacagattttttcttcatatattgtcaatgaaagacaaaatatattaacttaaaggatagaaaatgacttctacttaatgtcacaccatcaattttcgttattgatatcgaatcaacatatccaagatgctcaggtcttggcacacaaagcttcaattatttgaaacatttaaaatattaaaagctaaggtataactgacggtcatagagagtattccataaaggattgttacaacggtcatataataattatgaaatatatatatatacattgctaatctattgactttctatatctatcaataaccacccttagatactcattcagatcacactttagaaacacttacatgggaggcaactgccccagctgtccggacaaaactcgccagctcaatatctaaattaatttgcaagatcatgatcctgccataacagtggataaaaactccaccataaatttattaaccctttttgttttttttccaaaaagtatttgttatatataacaagcaactgcaacatccaaaatttggagaaaccaaggtggagaggcagacaagttacatagtacagagagacaagtagtatggttgcatcttgttcaccaccttcagtcattttcatcttagaagtaaaagtatccaaaaatgcattgagcataagcaaacagtgaatctagtccactgtgttgtaacgatctactagaaagcttcattgtggcaccaaaaagaatcccctccagccacaaagaaaaactgtaaaaggagcaggtattcctaagaaactgaaagcattacttaccccaaaaagaaaccatctcaagagtttaagggtaagttaaactcttgagttctttgttaaactaagatagatctatgggggttggtctgacacaggataaaacctaatcccctgatccttgcgacattgcctaacgttgcgaagtgcatcatcaacaacttgcttatcctttttacgtttagagcattcaccaatctccattttcgcttttcctttgcccttgaagtcagaagaagagctagaaaagtgattctgaggtataggtcttggattaacaagtctggaagcctcagatccagcaactaagtgaggttcatgagaagctaaagatgctggaggaagaggctgtgatatcagtgatgcagaggagatgtctgaactgtctgagctagtcatatgagtttgatcagtgatagtgttagaagcagcaccttcctcccaaacaggtacatcaagtacctccacctcatcatcatgaatcacaggtgcattaagaaagggacagttgtttacgtgatgagtgatacgacaacaattagtacatatccttcgaagcttctcatactcaaacccaatcatagcaccttctctagattcaaaacgaactctccgaaaaaaccgaaggcggtcagtgaatacaagtctgatcttaacacggataaaggcaacataagtggaagtgtcttgattaaaatccagttcaagaacaggcccttattaacccttataaataaggaaaataataaagaatatcctagaaaggccgacggccctaatccgtaagaaccatgataatacaagctgtgacttgtgagtcgcaagaactgggtaatactatattctcaaaatcactcattagagggaggaaagacagaaaattgttaaaatattacttattttggtttatattagctgcaagcatatttttctctcttggttttgcacccataaaatctaagtaggcatttgtagtatagctagagttagctcacattaactcagttagagtcctcatgcaatatttgttatgttaaactatttctcataattattaaccaatagtagttcatcaaattttaaaattctcaattaatgattcttgaaattcataattttataacatttattataaaaaagtatacagaaaatcaatctttttgatagaaaaaaccccttagaaaatcaatctttttaatacgtagggaatatatatttacttcatttataaataagtaatttaaaataacatcacttagttttagtttaattcaactctttttttttatagttatgttatgacttatgtttcataaaagagaaaaaaaacttgtatgtggttactataaattaagctgattttgtagctttgaaatttgaatgtagccttatgatttgagtattgatttttggatatcaagttatgaaacttcaaaaaactttctttgtgtattagctgttaggtttgcacaaaaagaagaagctattaggtcatcaatttgttgagttcttattgtttgtcagctgactcagctccaaagatttttaaggatgtttgtatcatgagaaccgaggtatttaccattgtaagtgaagtgtaataagactaaagagttttcttagagcatcattatttgtgctatcttagccaaattcttagagcacctttaatgggggggggggggtgggggggggggtttaaacaagtttcttaacaaagaacaaaaaaattatatgatttaaatattcataagtctcttaactttgatgaaacctaggcaattgtctcttagttaagagataattggtcttggtttcaccaaatttaagagacccataattaaaaatattatttatctatacttatactttaattttgtttaagagacttaggcttaaaaactaccattgaagatgtttttaggttaagatttgtgaaaaagaactcttatataagagcttttaggcttatataaaaccttttttttcacaaatcttaccctaagatttgggtaagataccaccaataatgttggtcttatatgctaattcatattaatggatcccatgtattttttttttctagattttattctagcataaaaatagtttataacctcttgtatatgtaatgtcaaattgtcaattaaatctattgaagttttggaacctcataattaggataacgaaaagattcgtagtaacatcatttgtctaaatatcttggaatcttacaaaatgatatgttgtttcgaagtggatatatttatgaccattaacaatagactcatgtaacaatcaatcacaaaaacaattcattatgttgttcaaaatctcaacaattctgaaagtacaaaaagtttatggataaatgtaaaatctttaagaaaaataggggtcaaaagtgttataattttgaatattaaaataaaattaaaaagtgtattttgaccggaaaaaagtagaaaaatacaaaatacaaatagcataggaccggcacgtatattacctgaaattcatccctgagtctcgttcttcttctctcacttcgtttcgttttctcacaaaccgtctctatctctctctcgagtctcttgcttcttctctaatcctctctctctcgctagatcgattactgagattcgacgaacctttgtttgatttgtaattttgagatcgtggtgcttctctctctttaatgttgaatcggttcgtttctcggatctcgatgatcctcgattttctcaaccaaacttgaagaaaaacctttccatttttcgctccgagcttaatttcttgtttccgccatgtttgaagctcatgtaagcctttttctctttgttaattttggggattgtgatgtcttctttaccggttatttttttctggtgtttctagttttagaagttatgtgtttggtttagttcgatgttgtgattctgggtgattgattagcttgtctcgtcgtatgttggaatttatctatggattatgaaaatgggtttttagtttagcatctatgagagcagcaatggtagctgttactggagaagtaattagttgaatagtgcattgactattagaataaaaatgaggaatagaacaaatttctaagttagcgacttggactgtttcagatatcaatttctgcagtttgtagtgatatgttttgcaggaaatctttgctcttatgtagaggtcttcatgtctccttaaataattgaatgaagtatctaataattgctgcgactcggtattcaggtactgcatctgcttcggaggtatttgggtgaatatgtgcatggactctccacagaggctctgagaattagtgtctggaaaggttggattttcatttttgttagtatttttatatagatgtatcttgagcgtattaaaaattcttgactgctcatggtttatgaacagtgatatatgtagagatgtaatcccttggctgtctagtcagttgttgttttgatgttggggtttttttttttttttttttttactttttaggtgatgttgttcttaaagatttgaagttaaaggcggaagctcttaattcactgaagcttccagtagctgtcaaatctggttttgttggaaccatcactttgaaggtaactttttttttttttttttttctcttggtagaattttgatgattttcctcaagatcactgttcccgttctgtactcttgatagatgaagtatatttcttctttctcaaaagtttacgtacttgagctgtgagaactttatgctggattggtaatcctttacagagttacttgcagcttctttcttcatatacatatactcatttcgatctatgttaaagttatttgaggatttagagagccgaaaaatcactttgtgattacatagctctgaatgctcacgtgaccagaactgtttgcatgtgtgacggtctcatgtattgatatacaatagcaatgttggaaattgatttcattttggattatgaagaacatgttagttggtaatagtgatcaaagtggaaaattttaggtcattgtttatgaattctgggatacaagttaaaatgtttaattggaatattggataaaaatgaaatatatatgcatgtgattctgtttgttgcatatattgaagcttttgatacgaagtcaaatgtcacggaggttgcaagtcagagtgatattctaatttttgaacttggacttgtgtttaatgccagcaaacgctacttttgtcaggaaactcttgtagttatggctaggtattaaatctaaaatttgaaagtgactcatataaacttttgtttcaggtcccttggaaaagtttaggcaaagagccagtcattgttctgatcgatcgtgtcttcgttcttgcttatcctgcccctgatgaccgaacacttaaggtattctgttgaaattgttatttatgtttgcttgtcttctctttaagtttttcactttggttggtactgaatttgcttacactaattacataccaggaggaagacagggaaaagcttctagaaaccaagcttcagcagatcgaggtacttcgtatttctggctgatggagcttcatggatacgtctatatatgaccgttacatgaaacttggattttcattttcatctacaaggtttgatgttattctgagttatcattctcgtgtcttttacataggaagcagaaacagcaactcttgaagcaagggcaaagtctaagctgggaagtgtacgtctctaaacttgatgactttatttttggctatcttcttatattcatttcaggggtatgtattttttgtgtgacgctggaactttcctaatctgattagaggataacttatgattttttacgaacgatatatgcactccttgctaactactagataaaataactctcacacgctaagcattttataactaatctttgatggttggttcttttcagcctccacaagggaattcatggctaggctcaattattgctacaattattggtaatctgaaagtatccatcagcaatgtacatataagatacgaggattctaccaggtttgtggctgtttgccttttttgtttctgttttcccttctgattttgtggccatatttagctattctgctcgcttttagtgtcttgttgttggtgtttattagagacagctcagaaatacttgctagctttttttcttatttcaacaatatttgctctagtaatccagggcacccctttgctgcgggcatcaccttggccaagctcgcagctgttacaatggatgaagaaggaaatgaaacctttgacacaagtggcgctttggataaactgcgtaaggtgagctttttatctcttttcttaactgggcgaagtagttgaaagttgacaaaaagcatcgtgtttcaaagtagatgtgtgtttggactataaacaactataattccattgggacgttggagttctcttgtggttcataaatggaaaacaaatctagtcttcccatttcttaagatatcccgttttgtaggctcttcatctatgaagttcaagggctcttctcccagaggtttcaagtacaataaaaacattgattgggcttttaaaatgaatgtttatttgttttttcctgccatgaacgacatggataaatgacaaagcagttttagaaatacttctaggctcttatgccagatttctttggagtttaaacaactctttatatctttgtttttgtttctttccaattagttattttctctactgctgtgtttccctattcttttgctgtgttcgttttgaatactagttataatttaagataattaatgaaatgctgagatttcaactgaaatatactttcttacgtggtctgttgattgaatatctgaagtgtgatgaataatgatgatgctacttattgacttgaaccaaaaattcatgttagcacatggtttctgtaacagtcgttgcagcttgagaggctcgctctgtatcatgattctaatagctttccctgggaaatagagaagcaatgggacaatattactcctgaggaatggattgaggtttgttcatacataccttttccttggggattatgttgtgttttttgcctggtttattagtcaaatgaaatgtttttgagtgatatgtatctaactttcgacagtcttccttcagatgtttgaagatggcataaaggagcagaccgagcataaaataaagtcaaaatgggccttgaatcgtcactatctattgtcccctatcaatggatctcttaaatatcaccggttaggaaatcaggagagaaataatccggagattccatttgaaagggcatcagttatccttaatgatgttaacgtgactatcacagaggtaccacttaaagtacttgatatagttggctatatttttttgggagtgttcctcattttccatcagggttagccgtaaatttttcttgtgggttctaatttcttctatctgtattccaaatttctgagacccattagagttcaggatttttttttcttgaggtggtaaacttaactctcttgtattttgtctttcccatttcttaacaggagcaatatcatgattggataaagctagtcgaagttgtctccagatacaaaacatatatagagatttcacatttaaggcctatggttcctgtttcagaagctccacgtctgtggtggcggtttgctgctcaagctagtttacaacaaaagagattatggtacacgtttgttttattctctctcatgtaggatttcactgacataataggaaaagacacagcatttatttggtaaagctgtttggtttttactcttgcgtagttttaagcttcttctggtaaagcatgactgtacttgatctgtggaataaatttatattttgatctgatttttgcatatgttcaccccatttcagctatcgattttcctgggatagcattcaccatctttgccagttacgtaggcgctatattcagctgtatgccaattttctgcagcagtcatcagatgttaattacccagagatgagagaaatcgaaaaggaccttgattccaaagtgattcttttgtggaggtaataatcaaattccaacattttgaacggaaggcatgtggtttcttaatatgatcaaatcccaccttctgatgcttactattgggattccatcccgctgactctttatctctgaatttatgtgagaggttcacatgaccatggttaagattctattatactgtaaaagatttcacttgtagacacctgccttatattttcctagtggttaagctagctgttgcctatgttaggggtagttaggctcgcatctatgtcgtgatgaagtttgtttggtagtgccctgtttgatagggtacgtttgtgatctttttcaggtgtataattaagaacaatttttcgttcagatgctattctacgatagtaacataattaaacataatatgattcattcttcaagtaatgctcaaactttgtgaatgacatactagctgatatctaattactacttctagtcatatcaataccactttttgctcataagaagttcatactcagccattcttcctttctatttttattgagattctcacagtcactgttctgtctctgtgattttttcttcttcggacttatcttatcatttattatgttgtatttccgtgataggttgcttgcacatgcaaaggtagaatctgtaaagtcaaaagaagcagctgagcagagaaagctgaaaaagggtggttggttctcattcaactggtcagtagggtttgctgcttccttctaaatacattttcttgcttttttggctgttcagttctttttcctgtcgcagtcatgatcacaaatagaaaccatttttttttttaaaacttttgtggctaccatatccatgaaggcggacagaagctgaagatgaccctgaggtagatagtgtggctggcggatcaaaattgatggaggaaagattgactaaagatgaatggaaggccataaataagttactgagtcatcagccagatgaagagatgaatttgtattcaggaaaagacatgcagaatatgactcactttcttgtaacggtatcaattggtcaaggtgcggctaggattgttgatataaatcagactgaggtgctgtgtggtaggtttgagcagctcgatgtgacgaccaagttcagacatcgaagtactcagtgtgatgtatcactgaggttctatggcttatctgcaccagaaggttctctagcgcaggtttgtttccaattttcaccatattaacagggtcagcagtctctttgattagataatatgcctgcctataaaatgaagtttgacctccccccttccctctctgtttcatgctggctttgcagagtgtatccagtgagagaaagaccaatgccttgatggctagttttgtgaacgcaccaattggagagaacattgattggaggctatcagccacgatatccccttgtcatgctacggtaatctcttcatatattatatgtatactcttgaagcatggtcgtttacgatctgcgtaatatttacatactttaagattcgtccagagtatagcagcttctatttattatctagctggtggcattggttttctgaaaatgggggattgtcaattgtctggaccttagaaagtgttattggaaattaaatctcctgcttcccttttggaaattatgaagggagaaggttgtatgttgttaaatttctttgaaattaagaattacttgtaactctcatggtcctatgtttttctaagttgggaaattcagttgtatatagttagagacaaaataaagtctatctagtatggaagtttaacacccaactacgaaaattataatgttaccaaatccagctgctaccaaggggtcactaacactcatccagaatagaaaattgtttttcagattagataacttggtgtgtgggaataggaagagtccgaaatacgtagtcacatatcaaagattgtttcttctaaaatatttgaattgacttagtccgatgcttttgatggccttaatgttatttcattttattctgtcttgataattttctgcgtaatagttccacgttgcaccctatttactttgttcttttgtctttctatctgataccactgctttgagcacaattgaaggttttacgtatttgcagatatggactgaaagttatgatcgtgtattagagtttgtgaagcgaagtaatgcagttagccctactgttgcgctggaaactgctgctgtgcttcaggtactggtctaatgcttagtggaaattttcctactcttaccctgtttcttacatagttttttttgcttatattgtcatggtgaaaataagacatgtatgatccttcaaggttgatcattcatagattattgtatgtttattttcctgcatacgtaccatagcatttaattttatttgcaccggtaattacagatgaaactagaggaagtgactcgacgggctcaagagcaacttcaaatagtattggaggagcaaagcaggttagaacagtttaactggactttatatatccttttttttttatctttgtccatatgatcagagttggaccatttggtagtgagtgactagagtggaatgtttgttgcatggaacacaatcttctgtccctgtagtctgttggggattagatctaattattttatcattgtttacaagttgcatcaccagctttcctttatactttgcctttggtttcttagatttgctctcgacattgatattgatgctccaaaggtgagaattcctttgagggcttcaggatcgtccaagtgcagtagccatttcctattggattttggtaattttacgttaaccaccatggtaagtttctagactagcccttcgagtttactagtttttcttttctgttttcttatatttcttgtactattgcaggatactcggtctgaggagcagaggcaaaacttatattcccggttctgcatttcgggaagagatattgctgctttctttacagactgtggatctgacaaccaaggttgcagtttagtcatggaagatttcactaatcagccaattctgtctcccattctagagaaagcggacaatgtttattcccttattgataggtgtggaatggcagttattgttgatcaggtattaccttgcgtgatattttatttttaagagtcaattgcgacaacaaggcatttctacttgacacggatctatttcttgttgaagatcaaagtacctcacccaagttacccatctactagaatatcgatccaagtgccaaatattggtgttcatttctctccaacaagatatatgaggatcatgcaattgttcgacatcttgtatggtgctatgaaaacctacagtcaagctcctgttgatcacatgccagatggaatccaaccttggagtcctacagatcttgctagtgatgctagaatcttagtttggaaggtatgcattataatatacaagtactttttaagtttggttgatctgtattagctttgattttttattttcacggaatctacttttttcagggaattggcaactctgttgctacttggcaatcttgtcgccttgttctatctggtttatatctgtatacatttgaatcagagaagtcacttgattatcaacgttatttatggtttgtgctaattttattaattattttcttttatgtactttctttctctcttttttttttgtcaagttcttttttctactacaaagacttttgcatatgttaagacgtttaaatataaagtttctgtgtgcagcatggctggtaggcaagtattcgaggttccacccgcaaatattggtggttctccatactgtcttgctgtcggtgtaaggggaacagatcttaaaaaggtacgctaagctgctttattttaaataataggagttagattagaaccgaaaaatctgtaagttgactagggaatacaatatacgctcttggtgacttgggtatgcttgctatgcttgctaaatcttggaatggcttcctacctgaacaataagatggtagtgttatgattctctggatcttacttttattgaagttgctttcgatgttatactggagaaaaaagccagctcacacatattcctttacaaccttgctttgtttgtggtattttcatttctgtttatctgatggatcttccgcattcttcaggccctggaatcttctagcacctggatcatagaatttcagggggaggagaaggcagcttggctgagaggactggtccaagccacctatcaagcttctgtatgtgtataaaatctctttcttcttttctctgggcttttactgcaatggtcgtcttcgcttaatgctgaaaatcttttccttttgtaggctcctttgtcgggggatgtacttggtcaaacgagtgatggtgatggtgacttccatgaacctcagaccaggaatatgaaagctgctgatcttgttattactggtgctttggttgagacgaagttgtacttgtatggaaaggttagctataatcagctatctacatgtttttataagcaggctatttttatgccataccgtgttgattaggaacgtgcgtaggttattgacaaaccattgacattctgtgaaagcaacttctccttttttttacttgacttcttaaatcctacatatcccgcagatcaagaatgaatgcgatgagcaggttgaagaggttctgcttcttaaagttcttgcttccggaggaaaggtttgtgtttgctgaacatatttcattgcgtttaagttttgaggtagtgagttatatgcgtgtgttttgtgtcgcgggtactaaggatagaaggggtaaaggttaaggcatgttgggtgtacaaaacttagacaatctaacctcatgaaatttggtttctggttaaagtgatatcagttcatttaagcctggctaagctattgatgatgagatggaaactggaaactaccaacagagccacattattatcatattttttttttgataatatcaaagccacagtatcgttgactaaggattagtaaatgataagttcttagtgtattgtttggtaaatcatgttgcatatcttagtgctccacttttctagatttcctttgcttagatttttgcctttctcgggttccctttcctgatatgtcttgtaattttttcataagctgtttttatcctttaagttctacacaacagactagtttgatagaggcagaattgtgtttgctttgcaggtgcacttgataagttccgagagtggcttaactgttagaacaaagttgcactctctgaaaatcaaagatgaactccagcagcagcagtcaggaagtgctcagtatttagcttactcggtcctgaagaacgaagacatacaagaatcattaggaacatgtgattctttcgacaaggagatgcctgtaggacatgcagatgatgaagatgcctacacagatgctttaccagagtttctgtcacctacagaaccaggtactccggatatggatatgattcaatgcagcatgatgatggactccgatgaacatgtgggactcgaggatactgaaggagggtttcatgaaaaagatacatctcagggaaaaagtctttgcgatgaggtattttatgaggtgcagggtggtgaattttctgattttgtgtcagttgttttcttgacgaggagctccagttcccacgattataatggaattgatacacaggtatgtagtgaaagaccatcggaagacatcttactgcctcacatatttcttatcagctttactaagctctgtttgaaatcaattccagatgagcattcgcatgtcaaaactggagttcttttgcagcagaccaactgttgttgctctaattggttttggatttgatttgagcactgcatcatatatcgaaaatgataaagatgccaacactttggtacctgagaaatctgatagtgagaaagaaacaaatgatgaaagtgggcgcattgaaggcttacttggatatggcaaggatcgtgtagtgttttacctgaacatgaatgttgataatgtgactgtgtttctcaacaaggaggatggttctcagcttgcgatgtttgtgcaggaacgatttgtgttggacattaaggtaagatattttggccgggggcatcttggtgtatttaatttcttataatgattttctcttaatattagccctatgcagtagtacaagaaaatcaaagttgttcatgatattatgtaattgggtttccaaaagttgcatttgtagttgatcctctagttaaatgatttcatcacagcatcattttaagttaactagtagtttggctaaatttgtttatttttcaaggttcacccgagctctctttcagtagaagggactctgggaaattttaaactctgtgacaagtcgttagactctggaaactgttggagttggctctgtgacatacgagatcctggtgttgagtctcttatcaaggtattgaatattatataaaaatttctgatggttttattcctgtttctgtgatattgttgattcttgtttgatgtggttgtgaatctgcttgattcttgttttacactgcagttcaaattcagttcatatagtgctggcgacgacgactatgaaggatatgattatagcttatctggtaaactatcggctgttcgcattgtatttctctacagatttgttcaagaggtaccatgatcactgaacctgcctcttacctaattgatttgaaatgcaaccgaaagttatacaaatactcttctttggacatcattttgttgtggaacaacccaatgaaatggttttcaggttacagcatatttcatgggacttgctactcctcattctgaagaagtcattaaacttgttgacaaagttggaggctttgagtggctaatccagaaagatgaaatggatggtgctactgcggtgaaactggacctttcgttagacactccaataattgttgtccctagagattctctgagcaaggagtaagtagaaatagagtgtggaaattattaatatgtgctatcctatcaaatatctattaggtttaggataacacataacttttcatggatctctagctcttttgacaccttggtatatcaattatcacagtgtttacttgacatcaaaatagttaaggcagattctggccttttggctgtaggtctaaagattctgaaagcttgaggcctgcaacatgtttttttttagctgaatctccaaaatatttagctcaactttttctctgaatcttcttggcacaatctcaacacatttgtatttcctgcagttacattcaacttgaccttggtcagctggaggtatcaaatgaaataagttggcatgggtgtccggagaaagatgccactgctgtacgtgtagatgttcttcatgcgaaggtacatatatattacgaaaagtatggaacacttgtatttatcgtgaggaatgaatactctttagcctgatgattatttctgttgttttttgttgtaaagattcttggactaaatatgtcggtaggcataaatggttcaattggtaaaccaatgatacgtgaaggacagggattggacatttttgtccggcgcagcctaagagatgtttttaagaaagtcccaacactttcggttgaggttaaggtacaagtctacttctctatatttgacgtacttcaatatttgcttttggtgtcaagaacctggaccttaaacaaagcattttttcttttttggtctttgattcttcatattgctaggttagggatgactatacttataaacgttattgtcttaaaaggatcgccttgctatgaaataatcacaatttttatattttatatttatcattgccttttaggcaagcttgaaactgggagtcatcttacagtgtctttgatttttgtttatcatccctaagtactatgtataaacttgttaccttctcctaactactggtatcagcagtcacttcttaggactaattattttcttaatatttgctgtgcagattgatttcttgcatgctgtgatgtctgacaaagaatatgatattattgtaagttgcacatccatgaatttgtttgaggagccaaagctacctccagatttccgtggtagcagttctggtcccaaagctaaaatgcgtctactggctgacaaagtcaacttgaatagtcagatgattatgtcacgtacagttaccatactggctgttgatatcaattatgctcttctcgagttacgtaatagtgttaatgaagagtcatcattagctcatgttgcggtacgtgcttctgagcctaattcttctatttcctggtacattttgtcatctaggaactataccatatatctaagataccaaatttccattcacagcttgaaggattatgggtatcctacaggatgacatcactatctgagacagacttgtatgtgtcagttcctaaagtttctgttcttgatatccgccctaacacaaagcctgaaatgcgactgatgctcggctcatcggtcgatgcttccaagcaggcttcttctgaatctcttcccttttcccttaataagggaagctttaagcgagccaactctagggctgttcttgattttgatgcaccatgttcaacgatgttgctgatggattatagatggcgagcatcctctcagtcatgtgttttgcgggtgcaacaacctcgtatccttgctgttcctgacttccttcttgcggttggtgaattttttgttccagctttgcgtgcaataacaggaagagatgaaacattagatccaacaaatgatcctatcaccagaagtagaggcatagttctctctgagccactctataaacagacagaagatgttgtgcacttgtccccacgtagacaattagtagcagattcactgggcattgatgagtatacctatgacggatgcggaaaggtaatctcgttgagtgagcaaggagagaaggatttaaacgtaggaagattagaacccatcataatcgttgggcatggaaagaagctgcgcttcgtcaatgtgaaaattaaggttgagactcttctctcttttaaacaatttaatatttaatacatacttatgtaatttgcatagtcacttagcttgctcagagtaaatttctacacatttgctaagcacttatagtgagaagaggagaaggaactttcttgttgtaatcattgctccacactcccctttttccaagattcttgatttatgctagctgcttgttttctgtttttccttttatgcatgtggcagaatggatcgcttctgagcaagtgcatttatttgagtaacgatagtagctgtttattttctccggaagatggtgttgacatctcaatgttagaaaatgcctcatctaatccggagaatgtgcttagcaatgcgcacaaatcatcagatgtttcagacacttgtcaatatgattcgaagtctggtcagagttttacctttgaagctcaggtaggtttacttctctttttgttatttcacgggtttatttaagttttgagtgcctaaattatgttatttttatcttctttgaatcatggtttctctttacttgttaccttactttttgagtcgttactccctgattttggtgtataattctttttctctttttactcataacctttggttatatagagatctcttcctcaaccttcttcgagtgatttaccacaaactctggattccaggcctatctgattaaggaaatccaaatattcttgttttgctggatttgtcaaattcatagcttatttttgtgcaggttgtatctcctgagttcacgttctttgacggtacaaagtcatctctggatgactcttctgctgtagaaaagcttttgcgagtgaaattggattttaattttatgtaagtgcagcgttctctaaaccactggatcagtgatttataccattttgtcatacatgacagttctggacatttgggtctgagcgtaacaacccaatatttcggcagacacaaatatgattgcttgattactttatctatatgcctgtataaagaaaggattgtactaaagtaacccctcatctgaccaccactacgtcctgctcgtgacattgaaaaccagtttttttctaaactagttgcatactggatcttaagtttcatgttacattgttgatgtaatttttgctcttgtttcaacaggtatgcctcaaaagaaaaagacatctgggttcgagccttgctaaagaacctggttgttgaaactgggtctggtcttatcattcttgatccagtcgatatctctgggggatacacttctgttaaagagaaaacaaatatgtccttaacctccactgacatatacatgcacctttctttgagtgctctttctctcctactgaatctgcagagccaagtaactggagctttacaatctggaaatgctattcctttagcttcatgcaccaactttgacaggatttgggtctcaccaaaaggtatgacatcagttaagttatgtggcacagtttaacctgaaagctgtctgattttttggtgatcatgtttcatctacttaagcaactgtctcagataattatactgttgattagaaagaatatttattctaaatcctttacattgattatttcgttttggggatggtcagcagaaaatggacctaggaacaacctcacaatttggaggccgcaggctccttcaaactatgtcatattgggagactgtgtgacgtcaaggtaatatataacaagttactcatctggttgcatgtgtatctcattgttatgtatcttttgctttaattttttcatccctacaacaaagaatactatggttatagtccttttatttgtatatttacaaaaaaagtatttaagggtcatgacttatctaatcagactcattaatagctttgaactgcgtccagaaaattcatatcgaaccgtttccgtaacagagattagcagctcttgttatattagagttgatagcttaacgcgtaattgggggtaacatgttggtgccagtgcttacaactgtttaacaagagtttggttcagtgtacagatgttttcttcttctaaaagttaaagctatattatctcattaattccttgaaagttttttcttacagggcaattcctcctacacaagctgtaatggcagtaagtaatacatatgggcgtgtgaggaagccgattgggtttaatcgtattggcctgttctctgttattcaaggtttagaaggggataatgttcagcattcccataatagcaatgagtgttccctctggatgcctgtagctcctgtagggtacactgctatgggttgtgttgcaaatataggaagtgagcaaccacctgatcacattgtttattgtctaaggtctgaccttgtatcttccagcagtttctctgagtgcatatacaccgttccctccagttcgttatttgagtctggattcagcatttggcgtgctgataatgttcttggagcattctatgctcacacttcaactgcagctccttccaaaaaatatagccctggcctcagtcattgtcttctttggaatccccttcagtccaagacatcttcatcctctgacccatcatcgacaagtgggtcccggagtgagcaatcaagtgatcagactggaaattcatcaggatgggacattctcaggtcaatttctaaggcaactagttatcatgtttcaactcctaattttgagagaatctggtgggacaaaggtggtgatcttcgaagacctgtctcaatatggaggcctgttccacgtcctggttttgcaatattgggtgatagcataactgaagggttagtaaatatttaacgtttactttgtctctatattagctaccgtgaaaggactgttttttatacaaatgttgtataatcttgagtttttcttcacattagattggagccacctgcactgggaatactcttcaaagcagatgactctgagattgctgcaaaacctgtacagttcaataaagtcgcacatattgtggggaaaggtttcgatgaagttttctgctggtttcctgttgcacctcctggttatgtttctctaggatgtgttctctctaaatttgatgaagcgcctcatgtcgattcgttttgttgtccaaggattgatcttgttaaccaggccaacatttatgaagcgtctgtcacgagatcttcaagttcaaagtcctctcaactctggagcatttggaaagttgacaatcaggttggacaacccatttaacgtttgatgatgtgtctcttttctttaaaggctctcaatagttatcattgaattgtaggaccttctgtttctgtgaaatagctactatccacttttagcttaactacccccatagtgaaaagtattttccaatcgtgatagcgctgctgattccttgtgtaggcatgtacttttcttgcacgttctgatcttaaaagacctccaagtcgaatggctttcgctgttggagaatctgtaaagccgaagacacaggaaaatgtaaatgcagaaattaagctgagatgcttctccctgacacttctagatggattacatggaatggtatgttatgttatatggttaaagttaatagccaattttttggaacctagtgtttacatcttgatcctattctgaattcttccagatgactcctctctttgacacaactgtcaccaatatcaagctagcaactcatggtcgtcctgaggccatgaatgcagtactcatttcctcaattgctgcttcaacatttaacccgcagttggaagcgtgggagccccttctggagccatttgatggaatattcaagtaaagacagtattgtttcttatttatgatatgacttaactagaaaataaaactatttgaaataatattttgattgctcactttcacgttgtaggttggaaacatatgatactgctttgaaccaatcgtcaaagccaggaaaacggctgcgaattgctgctactaacattttgaacataaatgttagtgctgcaaaccttgaaactcttggcgatgccgttgtttcctggagaaggcaattagaacttgaagaaagagcggccaaaatgaaagaagtacattatctttttctttttccgtgaaagtataaattttcataatgtgttacttactaatctgctctggtgcaggaatcagctgcctctcgtgagagtggggatctttcagctttttcagctcttgatgaagatgattttcagacgattgtggtagagaataaactcggccgtgacatttatctgaaaaagctggaggagaactcagatgtagttgtgaaattgtgtcacgatgaaaacacttctgtctgggttccccctccaaggttctccaatcggttaaatgttgcagacagttctagagaagcacgcaattacatgactgtacagattcttgaggctaaggtatctctatacaagagcatcatttgaagtacttatagtggcatgttagaatttgtatggttaagatgacaccttcacttttttgttcagggtttgcatattattgatgatggtaacagtcacagtttcttttgcaccctacgcctcgttgttgatagtcagggtgcagaaccacaaaagctttttcctcaaagtgctaggacaaagtgtgtcaagccttccactacaattgtcaacgacttgatggagtgcacttccaagtggaatgaactttttatttttgaaattccacggaaggtagttcataaggaaacagttaatctatgcttcctttattcatattctctgtttcttcaaatatgcggtatacataagcgcttaagcctagttgctatccctgtatacattatgatttagatggttagtggtacaagttagattggtatgtctgtctgcaatattcatttctaaactgaaaacagttgtcatgattttggaacttatctcatatgagtatctgtttttttcttttctatttgtttaattgttatagggagttgccagattggaggttgaggtcacaaaccttgctgctaaagctggaaaaggttcaatcctattaattcttggactcttttctttgacctgtttaactataccttatgtgtgtgattgtgttctttttgagattgattggtattgtttagttttcattgagtccttggattgtttgcacctgattcgtgaataaaagatgactggacatttttccaagagttttcacaatgagtcaagatggtacctatgttgcatgatagttagctattgactattacaggggaggtcgtcgggtcactttcgtttcctgttggacatggggaaagtacgcttagaaaggtagcttcagtaaggatgctacatcaatcaagtgatgccgagaatataagttcgtatacgcttcagagaaaggttagctgtttttcatttatactagggtgtgttaacgtatatctcaagattttataacatgcattttcaattctccattttatcatgaaataaagaatgctgaagataaacatgacaacgggtgcttgcttatctcaacatcttactttgagaagacgacaatcccgaacacactaagaaatatggaaagtaaggattttgttgacggagacactggtttctggatcggggttcgtcctgatgactcatggcatagcattcgctcactgcttccgctctgtattgctccgaaatcactacaaaatgattttattgcaatggaagtttctatgagaaatgggagaaagcacgcaacattcagatgtttagctacagttgtaaatgattcagatgtcaatttagagatatctatatcttccgatcagaatgtctcttctggagtaagcaatcataatgctgtgattgcctctagatcttcatatgttttgccatggggatgtttatcaaaggataatgaacagtgcctgcatatccggccaaaggttgaaaactctcatcattcttatgcatggggttattgcatcgcagtgagttctggttgcggaaaagatcaaccatttgttgatcaaggtttactgactcggcagaatacaatcaaacaaagcagcagggcatctacattttttttgagattaaaccagcttgagaagaaggatatgcttttctgctgccagccttctactgggagtaagccattatggctcagtgtaggagcagatgcgtcagttcttcatacagacctcaatacaccagtttatgattggaaaatttctattagttctcctttaaagctagaaaatagacttccatgtcctgtcaaattcacagtgtgggaaaagacaaaagaaggcacatatctcgagagacaacatggtgtagtatcctcaaggaagagtgctcatgtatattcagcagatattcagagacctgtatatcttacgttagctgtccatggcggttgggctttggaaaaggttggcttttatattctgcacaagaaactacctacacttgagaacattactgaatttcagtttgcttttgtaggatcctattcctgttttagatatatcttcaaacgacagcgtgtcatcattttggttcgtccatcaacagagcaaaaggttagtcttttatctgcttattacccaggtatttgattatatgcatatttgttgtttaaattgaatatatgattgttaagaagtggggttaaggttatggctatatcagtatctcttttcaaactaagcagtatccctcggaaaatcttgtctagctgaacattctttattgatggaacctactatgttgagagttatcaaatgaagattttttctttcttttacataaacctaatatcatattccatgaaatgatttttttccaactctattttttggagtttcaggagattgcgtgtaagtatagaacgtgatgtgggagaaacaggggctgcaccaaagactataaggttctttgtcccatactggattacaaacgattcctatcttccactaagctatagagtggtggagattgaaccttcagaaaatgtggaagctggctccccctgtctgactagggcttccaaatcttttaagaaaaatcctgttttttcgatggagagaagacaccagaagaaaaatgtccgagtgcttgagtctattgaggatactagtcctatgcctagcatgctttctccacaagaatcagctggccggagtggcgttgtactgtttccgtctcagaaggattcttatgtctctccacgaattggtattgctgtcgcagctagggattctgatagttacagtcctggaatttctctccttgagcttgagaagaaggtgactagctaaagcttaaatgatattctgaaaactaatggcttgaaaatttcatgggctgtgtttaaatacttaaaaccatttccaactcttttatgtatgaaagatttccctcctagtcctggctgagtcaccattttctttagttggttggcagaccaggcaatattcgttccttttactaaccacaaatcctattccaggaacgcatagatgtaaaggcattctgcaaagacgcctcatactacatgctctcggcagtattaaacatgacatctgacagaacaaaggtcagatatcactgttttatttttctaattgttctagcacatgaatgttaattacctgtctgaactcaaatgtgtgctcttgcaaagtgttcttgttggtgtttatttacgctatttggttgtggagactcctaatgatatacatgcaatactttgtttagcctccgctttatctctcctgtttctgtgaaaagtatacatgcggttgctatatattaggttattatccgtgttttattatatcaagttgatttatacgcagatcaatgcttacaagtaacttgacgcttagcatttttggggtcagaatattaagttaaacttgatattatccgactttcaatttaacagtagatgactatattttttgtttgcaggttattcatctccaaccacacaccttatttatcaacagggtgggcgtgagcatctgtcttcaacagtgcgattgtcagacagaagaatggattaatccttctgatcctccgaaactctttggatggcagtcttccacccggcttgagttactgaaagtatgttaaatatcttcaaattgtgtaacttttttttaatgatgattaatgtgcttacggcggatggacaatttcagttacgagtgaagggatatagatggagcacgccattcagcgtctttagcgaaggtacaatgcgtgttcctgttccaaaagaagatgggactgatcaattgcagctaagagtacaagtcagaagcgggacaaagaactcacgttatgaagttatcttcaggccgaactctatctctggcccttacaggtaaacattcagttatctaccagatgatatattttttctgacattactctttgcttggatttatttagatgatagattttccaactgcttgagcatgtttgcatttaagattaattaaatttctgccacatatgttcctcagaaactgttatcattttggtgaataaacttgttcctggaaaaacctgcatgacgtcatttttatacaatgatgcatcatgttagctgaatccaaatgtatattccctctcctataactatgtcttgtcactactttatctgactatatattttttgtattcacttaaatatgaatcaactctcctaggatcgaaaaccgttccatgtttcttcctattcgctatcgccaagtggaaggtgtcagcgagtcttggcaatttcttcctcctaatgcggctgcttcgttttattgggaaaatcttggtagacgacatctatttgaacttcttgttgatggaaacgatccttctaattcagaaaagttcgatattgataagataggtgattatccaccacgaagtgaaagtggacctaccagacccatacgagttactattttaaaggaagacaaaaagaatattgtcagaatcagtgactggatgccagcaattgagcctacttcaagcataagcagaagacttccagcatcatccctgtcagaattatctggaaatgagtctcagcaatctcatcttttggcctcagaagattctgagtttcatgttattgttgagcttgctgaacttggaatctccgtaatcgaccatgctcctgaggaaatactgtacatgtcagtgcaaaacctctttgtggcatattcaaccggcttgggctctggacttagcaggtgagtttatcaggttcttaaggtgtagctctattttacaaatgtaagggccaccatatatcaccaattcgccatactgattttctatcaaattcgataaatctgggtactgtctctatgcattcattagtgtcaaaagttcaaaacatctaaaaatgcagaaagggatttgattgagacttgcagggaatttttttttgctaagatcatgaatttccagttgcgcttatcagattttgttggctgctatacgaacaaagtactttgggctattgctaaacgcttattgttttacaggttcaaactaaggatgcaaggaatacaagttgataaccaattgccattggctccaatgccagttctgttcagaccacagcgaaccggagataaagctgattatattttgaagttttctgttactttgcaatcaaatgctggccttgatctccgtgtctacccgtatatagatttccaagtaagtttatacagtttctgttttcgacctgaacaattatttttggcatttaaaattttgctcacattgttatatctctttactagggacgtgaaaatactgcctttctgataaacatccatgaacctattatctggcgcattcatgagatgatccagcaagccaacttgagtagactatccgatcctaactcgacggctgtatcagttgatccattcattcaaatcgggtatgtacgggattttcttggtctatatatgctgtttactgaatgaatcttccattcaaaagacttaatcttggttacacccgtccaaaaatgcagagttcttaacttctcggaagttagatttagagtatccatggcgatgtcccccagtcaaaggccgaggggagtgcttggattttggtcatccctgatgactgctcttgggaatacagaaaacatgccagtaagtattccagagtaattcattggtttatgtccattggtttctacttggtactcgtaggacatcaattatagtcgacaagttttgtagtttttagaatttgttttgtcaatgtactacttgctacactttcagtccaacccagtatgtattttttttcttcttctaatttttcttatcttcaaataggtacgcataagtgagagatttcatgagaacatatccatgcgccaaagtactatgatcaataatgctattaggaacgtaaagaaagacctccttggccagcctcttcagttgctctcaggtgttgatattcttggcaatgcaagcagcgcgcttggacatatgagtcaaggcatagctgcattatcaatggataaaaaattcatccaaagtcgacagagacaggtttcttcctgactttgttttttctccttgtacatgttgctgtttcctgtggatacaacataaacaatccaagttgccttccattagcctaatatgtagaaaattttcctcttaacacttgaatttttgaatggcttctgatactaaacggatgtatgggcttgccagtgtttctttcctgtgctccattttgttagtacacgctaatgcgtttcttgatttggcaggaaaacaaaggtgttgaggactttggcgatattatcagagaaggaggtggagctctagcgaaaggcctgtttagaggagtcacaggcatattgacaaagcctctcgaaggtgcaaagtcttctggtgtcgaaggctttgtctctgggtttgggaaaggaatcattggtgctgctgcccagcctgtgagcggagttctggatcttctgtcaaagaccactgaaggtgcaaatgccatgaggatgaaaatagcagctgccatcacctcagatgaacaacttcttcgccggagacttccaagagcggttggtgctgatagcttgcttcgtccttacaatgattacagggcacaggggcaggtacaatttttacccgtaaatatgttcaaatttgtatttcgtggcttgcactagtcgttttgctcttggttagctgatgaggaatggatttactggtgcttataatatatttggtttggtttacgtagcatatgattattcttatacaaatttcaaacctccaatattttgcatttgcaggtcatattgcagttggcagaatctggatcattcctgggccaggttgatctgtttaaagtacgtgggaagtttgcattaacagatgcctacgaaagtcatttcatcctaccaaaaggaaaagttctgatgatcacacatcgaagagtgatattgctacaagtgagttagacaaaacctttttgctctctatgtttaattggtatagtgttcgtcttctgtatctatccaagaaattctattgaaatttccaaacttttaatgtttccagcaaccctccaacataatgggccaaagaaagtttattccggcaaaagatgcgtgttctatacagtgggatattctatggaatgatctggtaaccatggaactgagtgacgggaaaaaagacccacctaactctccaccttcgcggcttattctctatctgaaagcaaagccacatgacccgaaggaacaattccgtgttgtcaaatgcattcccaacagcaagcaggcctttgatgtttactcagctatcgatcaagccattaacttgtatgggcagaatgctttaaaggtgagaagagatctttatttcacttttaattacatagtgacaccccttttaacaattggccctaacatgttgttataagtgatattacagtggtggaaactatatgccaaattaatatgatgatttaattatcgtactcgttttagggaatggtgaaaaacaaagtgacaagaccatattccccaatttctgagagttcttgggctgaaggagcttctcaacaaatgccagcttcagttacaccatcttcaacctttggcactagccctacgaccagctcaagttaaagtctgaatctttgagctctcattccttccaatgtcccctctcgcctccccggtaaagactttttcctcttctccatttgcttgaacaaagctttatttcttttcttttttttttccttatataacccaactgcaattttagtatctaaacgcaactggttaatggttaatgatctctggtgttttgtattccctgaccaaaatctctgagcataacaaaaacacaaatatccgttattgtttggtacaagctatagtttcatggttttaacatccagccttttgcgtttgatatctaatggacatacttttcttctcaggttaggggagattaaacacagcattggtgaaaaaagaaagaacatttgattttgttcaaatttttcttgtgtagggttttggtaatcagatcgtagaaatattaagtgtgtatatatatgataacatctacaaatcgggtactgtacagactcatccaacattagactcgtgtatcgcatcacatgtatacgggtaccatatataattctattaattttttcatatatctccaaatagtcaagttttgaatcagccagtggcccaatgcataagctattatattcacagaatctgatgattttcaaacgaataaaaagggttttataaaaatacgtaacaaaagataacgcccaccgtggggctcgaacccacgaccacaaggttaagagccttgcgctctaccaactgagctagacgggcatgttgttcgacttctggtttacatcataattaatatgtatatttctaacaattttctcaattaaaaaatgtctcgattgaaagaaatctaaatctcaaagatcaggtacgatttttttctataaaaagcaaaaaaagaaaggagacgtcgccttctttctaacctgcagcaacaaatatggatggatcaaattagagataatgaaaaagtgcattttccttagctagacctagtcacttagaccaggagtgtaaaattttgttttcttgttattttaattctaatggtattccttgtaagtttttttagaactcaaggttgtcctctaaaatgtaataaaaatgtatagaaggtataattttattttaaaaaataaactttatctccaataaaaaatctagtatttcaaatttcaatgtttggattttttacaaaaaatattctaataatgttattaaaatacaacataacatgcaaccgttgacttttgatatgataaaagtatcatgaatttcacattaggagtagtaattaagtatggacagctaagttagtaaaaagagagatggtgttgattggtcattaatttatacattattgttcaattgtaaaaccatcaacctttttgatgcttataaaacgagacaacaaatcctgcagactacacattataagaaaacgagagaaaaagatatactatcgatcaattgagaaaaagggtctgtacggtttagtaatgctaatgtacttggtgggtagtggctttagtcaaggtataaataaccatcccatatatatatagattaaattactataatcttaatgaatattatctctttgattgatgattcattgattcaatgtgtgtacgtaggggaagtgacatggttgagtaacgaagttgaatggcgacttattctgaccacgactcaacttcctatcgtggttacggtaacatcctcgttgtgcgatgaccggtgcactatattggatgatcaactggcccgattgtctgaaacctatggtaacctaattatattacgtaaagccaatattttgacgaatccattctttgcaatactttacaatttggtcaatgccccgatcatcatagtcttccaaactggaaaagaaatagcacgtttagaaaatgatttatcttggggtgcaatcactgacataatcgacaatctttcactcttcgccccgcccccctcggattttgtgcagccgccctccgattccgccccagtcccctctctcggagagtaaatgatagtctcatctgaatcagtaacttcaaatatttgcctatgtattttgtgtttgctgcttccgctatcaaacatttgcctatattattgtattatatgatcatattgtatttaatgtgctaatataacaagtcaatgattaagtttatacatgattaacatcgtaagaaagatttcttatgatcagatatttaaccgtttttcataccaaaaaaaagaaagatatttcaattatgaattggtcatatgatcataaaaatagctaggaattatgatctgcacctttctcatttgtgaaataataacagtagtgtcttcgttcaatttaattattttataatgtttgaaagctactatacagattgttcccctaccattcaaaagaagtaaatgcttaatgttcccatgtacgcattcatgttttgttattgtttaccacaaaaagaatttctaattatatcaataaattaatcttttataaacaatttttttcctagaaaatcaatcaataatgaaaagatggagtatgattttgatacatttttggttttcaacataatattcatgtcaatattgcaagctagtactatatacattgttctcctaaaattcaaagatttatatatatgcataatcttcgattcatgttttgtaattgttttacgtatagttctatcacaaaagaacattgataatgaatagaatcataaaataataggtatcactaatgatggtgaattgatttacgtaccaaacacggtattcaaatcttttgatgttatatatatattgatccaataagaaacacgtttagaatagtcaaatacagaggagttgcagagaaaggttttagacaaacacagcattgttatcctaagaactaaagaaggtatatataattatatgcttaatattcacatgtgtattaattcatgttttgtaattataaatcataaaagaaacttggaaactgaaaaaaacggatatagtcagtcaaaaacttttaaaagcctgaagactacaacaaaatataatgacattattaaaaaacaaaatcataaagcctgcatagatgaaagtgtcattacaaaaataagaagaaaatcaagtaaaagaatcacaaagacagtagagtctcaacgtgattgggtgaatattgaatcccacgtaaaggtttatcttctccaagtccattgcgttgtctaaaacctttatctgcaactccttcgtatttgacaaggctaaacgtctttcttattggatcaatgtatataacttcaaatgttttgaataccgtgtttggtacgtaaatcaattcaccatcattggtgatacctattagcttgaaatggaactctaaacgccgatcatagtgagaaagaggtaaaaaattataagttgaccattcgcccttcttttcaccctctaaaacccacatgggaagactattcttcacattggaatgaccgagaaaagcgaacttccctttataagatatcatcatctttggctcacaaccacatggtaatctaatcgcttggaacttttcagattttacttcaaaagtcattataaaccgatgagtcgatgacgatcaatctcggctagataatatagaacaccgttgatgcatctgcatggtccataattgtttttgcgattgccacggctagggtgatgcttataattggttttgactgttctccatgattcttgatctgctgaacccaatgttaaaatcctacactcatcagaagctttatcacacggcatggccactactttgtgcgtccgttcgagtggatcataccctaaaaagactgttaaactctcccagctcttgtccggtttgcgtaaaggtttgaactttctcatagtagggttccaaactataggctttgtacctctctggaagcagatcaaaccgtggaccgactcggttttaatggtgaagcagctatgttttggatagggtgtttggtaactatcaagaatctgagaagaagtatgagaaacggactcgttcggtctccgattaggtttaggaaccgtgacaacaaagaacctgtcagcttctttgaagaagaacaaaagattaggtcgagtttcgaacgagttggtgaaatatggagcggtggtgattgatgaccaatgcttcgccacacaactaaaccttacgacagacttcgcaggaagccttaagaatatatctgtggctatatcgagaggtatggacaacgacgatgatgatttacttcttttcctcgccatattttcgttcttctcttcttcttcttgtggcttcatctttttcgtcgaaaccctaattcgtttcacgatttcgtttctctctgtataaggatctgatctctcgacttcttttgcctcccctaaatatatatatataaggatttttagttcttgaaatctttggaacggtctattccttgatatgataggaaaataattatttactattttaaatatttcaaagttatataattagttactaatttaaaaataaaattgcttaataaaattatctaaagcctaagaccatcaccatcagaaaattcttaaaaaaaatatatattaatattttaatcaaaacagatatattaattattatttaatagttgaactacagtaaaaactctataaattaatactcgataaattaataaacacgataacttaataaattttgccggtcctaagtcgggccaatgtaaaaattaaccaaaatcgataagataataagataataatttttttgaaatccctatgtaaaattatagtcccaataatattataaattaataatcatagatcttaagtatatattttaagactaatttttatatgaagtttttgtttaaactacaattataactctttttaaaatacaactggtatgatctatgttgtactcacataactatttgcgtatttgatccgtaatagttgattttgtaaaaaacattatttgaaaaaacattgctaagatttgtgtaaagaaaaattggattaagcttcatgtttacgtttacgttcacgttaatatcgtagatataaagacacaatatattgccaaaaaataaattaaagaagtcaaagaaaaataaaaacctaacataattatatatgcaaacaacaaagcatataaaaaattaaattaagaaatattttaaaagaaatatagtattgtattttaagtaaatatttctataaattaatatttattaacttataggataaattaataaatattaatttataggataaattaatatcactataaattaataaaattttatggtcccaacattattaatttatagagtttctactgtaatagtattgtgacagctgtccaaattggatgagaatagtttttcaaagtttctagcagaaaaaaacttaattctccttctctcatactttttattttttaattattatttttttgattggggatctcattgagatactccaatgaagatgctctaagggaaatctcatgtcaaattgttttttctttttaaattagttttcctataaaacttctggttatcgaacaaaaagggttgtttctgaaactagttatggaaggtaaaaaatttccctgagcgttcttgatatcaaaagtgaaaacggtaccgttttggacaacacagttacaatatcagttatagcgaagactttgttagctctcgagcattgactcttgtttaacgatgaaatccccagcgttctcgtctactatatcactggttaaagcaatgaccaacaaaaacattcatcagaccaatttagttattaaacagaagatggtttatataactaacctgtccgctgcttcggatttgggaatcaaagtgatcttctttgacatgaaatgttcgagaagatgagataagtttctttcttggcataacttgaatagatggttcaagaactcattgaattgctttggctcctgctcacatatttaagaagactccatgaaaaagttttgagagaaaatgcacaaagtcgagatagagaaaatagaagagacctgctccaagacgcagcctttacgaagagcgagtacacattccaatgctttgtcaccctcgtcggtacaattttctacaagcttcattattaggtttttcatttgtgtgattgctttctcggtccagtcagttttatctctgcgggatatcatggcttcaaaatcttgaattgggtttgcatctccgactatatcaattttgttctctttggcgtcataagtaatcatgcgattgtcttcatcatctgaacccgatggtttatcccgcaacaatctcttagaagccttcttcaactgcaatgaaagtcatgtcaaagagttatgaatgagatcattcaggttcctttctgaaagctgatgattcaggggaacacacctttggattctccttgacttcaaaacttccacgaaacgtgtccattatggatttattgttggaagagagttcagggtcctgctccataagtctcttgaaagttccatccattggaggtaaagtagcatccgtggatttcgatttcaactcaaggtattcataaaagcgctgataaaaatatttcatcagtatgagttgacaaattacctgcaacaattatacaaagcagaataaaactggtattacctgcaaaaccgggttaggagtaagatcaggctttagtacttcctcttccgcagaaggtgcaaggtcaagcatcttaaccaaattatctgctactgcttgttgttgttcatctggcttccatgatgaaggaagcttgttgaaagaaggaaatggaaactcgcggacatcctcggcgaaaggtagcacattgaagtaaaacgaatcaggctgcgaaaaaggtaaatgatcatcaaatagtcagattcggatagaaattttcctttcagaagataacactattaacttacagtatcatctctttcagacacatttggagtcaggaccccaacaaccacattgccttgtccatttctccagacacatcgtacaattgctaccttgtttgtttctttcatttctcttgcaatagcagatacggcaagtacagatttttctttgcttggatcaggaacaactatattcacgtctttcatgtaataatgtcttcattgacatgcagagaaaaacacaaaacagcattctctcaaactttaacaaccaagagtttacaggcaaacatagatatatgtctttatgtttaccgcagtatatttgacgcctcagtaaatcccagaagcttcatgcctttgtcagttttaaacttgagtgtttctatctgatctggtgatataggaataacctgaggtccatagcgaaagcccttgatcctttcttctggagcaataacctcagtagattctgcagtaactttgtaatcataatcaacttttacttcatgtttggcaaacttgtcagttggaggcgctttgtcagaatacatttttagagtgggaagtctctcctcagccactttcttataaacccacacctacaaaatttcacattcttattttcagaaaaaatttcacgaacaattatataaacgtgaatgaacttaagtactgaataacaacaaagaacagcaagttcgatgatatctataaactctgcacaacaagcaaaagacacaaccaaaaaagcgttaccttaatcttcattgttgggttaatttcaaggtcacccctgaacaaagtaactggagccaccctccgggtctttaaggaaccaagcagtgagagtggactatcaacattcactgttttggcaatcgcgttgctggagaataaagtcaacagatgatcattctcctctattactctctcatgagcatcaccacttaaattagacctcataacaatgctctccatcttaattccctccgcagccattttcatagcaatagtgctgacttgatcatctttcgtcccttcaaatggatctttggtaggacaagctgcgttcgtgatgagacacatccgttttttccccttgtgtgcattaccatacatctttataagcatatccatcccaacaattaaagcatcaagaactgaagccagttaaagaaccaagaaaatggtagcgaaacagtaaaaataagcggtaaactagctagcaggatacagtctccagctacagttcctcgaggaagctgcttcacatgctctgccgctaattcatcaacaactctgatattccttaaaactgtaacattctcatatccacctatctccctagcaagctcgtttccagtttctgcagaggtcacatgaaacattattatcaaagtacatcaacaagccgataatactccaagaaagaaccattgcagtactaaagaggatagattcctaacttcctactttaatcagtaataagaatagatagagagaccttcagttccaaagacaacaattccaacttcatcatacttgttgtaaatcaactgcaacaacaaaccaaaaccaataaggaaagatccaaaattcatgaacaataatttcagaagaaaaagatcgtataccttcttctgaagtagcattgaacatgccttttcaacatcagggagaacactacgcatcgcaggacctacatcgagcaccaaaaccaaaccctcctgcttccgatgaacacacacacacacatcgaattaaaagtaaaatcgagcaggactaatttctctcaaatgaaatgacaaattaaaaccctaaattactccaagaacagttccaaaaatgaatcaatgagatatccagaacataattgagcataaaacgaagtcaaaatcagcataaacagaattatcaaagaagaaatggtatgcagcaatgtagaataacatgcacgaaactaagtagaaaaagaaacatcgatggaaaacaaacagaagctgaagaaggtattaatttcattgaattgatttctgaagaaacctataagaaaaaaaaacgaaggttaatatgtaacgaagtaagattagaagaaattatacccgatttcgtgccattgaggagttgtgctggaagaagaaggtgaagaagaagaagaagaagaagaagaagaagaagaatgatgagaaaaagagagatggtgaaacgaagaagacgaagaatttttattttatttttttgaaaataggctgactgactctaacgtggccttaaaatgagataggcccattgggctaaactatctaagaaaaagtccatatgtccaacttccaatatggactctgtagatttaacaaaaatgggtattttaataaagtatgtaatgaatcatatcttatatagtatatatccctctgaatctaaacataacaattaaattttactttttatttaaagtttagaaatacagttacaaaaaattattttcactatattaattatttttccattttaaaacctcataaacacattatcatattttaatttttttcagtaggcatcctatattttttttagtaggatcccaaacttgaatttttccatgtaccgatcggtaggcatcctatattaattatgtcgcaaagatgtggtaagacccgaccttgagatcgtcgaggataaagggagaacaaagagcattttgagaaagaaagtcaacccacatttagaagaacgaacaagattcaattattcacaaaggatatcaaatcatcaacttcagtgaagtcacgcccaatgctcaaaatcatcaacctcgcgtcaccacacacatatttgtatacacttgtcttgtttcttaaccaagaatacacgtatgtaatttatttcgccgtcaaataatgatttttcttcaaaaatgcaaaacacatacaaatagttaaaaatgttgttgcgaactttcaacgttaaaaaaaaacagttagattatatattatatgtttactactttgtttactcatattattatttaatttggtataatttctgcattttaaaaacaatagatatgtaacaacaattaaatattttctttttgtaagatcaatttcaatttattaaaacatcaaatagtcttatgtttaccgtttatatatgtttcggttggatttttagaatcttctaagccattgaatttgttcgtcataggcagttcggttggaactttgaatttcagatatacaaaaaaaaatagattaaaaaaaaaagaactaaaatcacaaaaaatgtataagaacttattacatattctcaaataaaactggacctttcccttttttttttgtgagtcccatatggaagttgggcttagaaaattaaaagttgaaaaaaactttttaatttaaactaaatatttaaaaacagtctttttatagtttatatatgttccagttagatttttggaatcttctgaatcattgaatttgtaagtaacatttgcggttatgtgggaaatatgtgaatttaaatatacaaaaaaaagtagataagaaaactagagatcacaaagaatatataagaatctattacactttcttgtccaatatggtatatggaagttgggcttaaaaaattaactcttttttagtaaaataaatatttttaaaacagtattttaatacattaaaatttataaattatattaaatataggcatgggtcaattaagaaatatgcaaataaacaaccaacacagaaaccaaaccctaattccccattccctgtcttctttattcttttaggcgaatttcaattgcgtccaagcaaagcaccacctcttaccccgttgatttattcgtcgatttgcctttcggtgaaattcgcaatcggatctactccatttgattattaaccaagtcatgattttgagtcaaacaatggttgctgaagctgagatcagggttcttgacgttaagtgccatatctccgctcctaaagatcagaagaattttcagatcgacgaagttcgtgtttctgagtctgtccgtgctgagatttcgggttccgctgaaacgcctcgattcggatcggtatgtgtttttggtttcttgttctaaaaatcgctcatttttattaattgggtttcttagaaatttcccttagaaattagatcatgtggattcttctttctcgtaattgagtttgttggtttagattaggagttataatttgattttgagattagaccgttgcttgaaattctgataatgatccgattctgcatcagggcttatattagttttgggtttctttttgttctctattgcataataatgttgaatcctacataccctcttcgattaggttcgtgtagacaatggaaaatgataagattagtgttgtgctttggaaagtttatacctttgcatgaagaattagtttaggtgttcatgaatcaattttacattgttagcggaacgactctgatgctctgttctggctgttctgtttctttaattgtgccaagttcaggaatcttaaacaaaccttcttatgtacatttgttgtaacagggcatgagttgtgtaactactaccattggagaatccgccagtgactttatcccaactatacgttcagggagctttgctgacattcgaagtcgagaaaccatggaggatgaacacatttgcatagatgatttgtcagctcaccttggatcctacaacttctcggtaccaagtgctttttatggtgtgtttgatggtcatggtgggcctgaggcagcaattttcatgaaggagaacttgactagattgtttttccaagatgctgtgtttccagagatgccctccattgtggacgcgtttttcttagaagaactggagaattctcaccgaaaggcttttgctttggctgatcttgccatggctgatgaaaccattgtcagtggttcatgcgggacaaccgctttgaccgctctcataatcggacgacatcttcttgttgctaatgctggagattgtcgtgcagtgctatgtaggagaggagtggctgttgatatgtctttcgatcacagatcaacatatgagccagaaagaaggcggattgaagatttaggaggatactttgaggatggatacctcaacggagtcctagctgtcacgcgtgccattggagattgggaactgaagaatcctttcactgactcctcttcaccactgatttcagacccagagattggacagatcattctaacagaggacgacgagttcttgattttggcatgtgatggtatatgggatgtgttgtcaagccagaatgcagtgagtaatgtaaggcaaggattgaggaggcatggtgacccgagacaatgtgcgatggaactaggaaaagaagcagcgaggcttcagtcatcagataatatgacggttatagtgatctgcttctcctcagttccgtcttcacctaaacaaccgcaaagaagaagattaagattctgtgtttctgacgaagcccgagctcggttacaagcaatgcttgcaggcgagtgaaagcagtgtttttggcagtatgtacaaacaacagggatcgggtgttaccgatcaaaccattatttctctaatttgagattcgattcgatgagataaaataagagacgtagagagtgatagagagttaaggtcttgtttgtaatgtggtttctcatttttgattgatctgtttttttggtttgtttcagagagagatagagagaaaaaccagcctgaagttttggtaggattattgaaactgattaagaggatttcatttttgttcttgaggattagtgatgttgtacccattattgattgttttaaggaattttaattttaactattttgaatctagattttggaggttggtttaagaatctctctcccatatatgtggaattcagagagtttctttctgactgtgaaaggttttggaggtttatctcaaaagcctcaaatcctgtccttacttgcttctcatcatctctatctttatctctttatcttcttctcctccaacaatcttcatgtccatatatttctgatgagtatattttttgataatttttacaatacagtatttttcattacatatacataaatattttttggtgtatttctttacatatgaattagaagtctagaacttataaaagtaattcaaatgttgacaagaaaataataataaatcaagtgtgcattaaggtaactttgtaatcaatttcaaatatttagtgtacataattgagattagaaattcaagtattcattcatataaatgatttatttacttatctatatttttggtcaattaaggaaatattaaaatatttgtgattaaaaagagaaaaagggttctaagagagcctctcctctttacatttgccggctctgttcatctctacaaggagccaagtctctctttctctctaaaacaacaatggcgatggcgagtttagctaggaggaaggcgtattttctcaccagaaacttatcaaactctcccactgacgctctcagattctccttttccctctcccgtggcttcgcctcatcaggatctgatgaaaacgacgtcgtcatcatcggcggcggtcccggtggttacgtagccgcgatcaaagcctctcagcttggtctcaaaaccacttgtatcgagaaacgcggcgctctcggtggtacttgtctcaacgtcggttgcattccttccaaggtcaaatttcgaatcatctctcgtttcttcaatcaatttgttgatcatagttgacgattttgatctgttccttttgtggatgattcttttgagagttaattactgtcttttgtgatgattatcatttgcttaagcacagttattccataattactaaattcttggttgtgtttattgatgtattaggctctgcttcactcttcacatatgtaccatgaggcgaagcattccttcgctaaccatggtattaaggtctcttctgttgaggtagatcttcctgctatgttggctcagaaagataatgcggttaagaacctcactcgtggtattgagggtttgttcaagaaaaataaggtgacttatgtcaaaggatatggtaagtttatttccccaaatgaagtctcggtggagactattgatggaggaaacactattgtgaaaggtaaacatatcattgttgctactggctcggatgttaagtccttgcctggtattacgattgatgaaaagaagattgtttcgtcgactggagcgttgtctctatcggaagttccgaagaaattgattgttattggtgcggggtatattgggcttgagatgggttctgtttggggtaggcttggatctgaggttacggttgttgagtttgctggagatattgttccttcgatggatggtgaaattcgtaagcagtttcaacgttctcttgagaagcagaagatgaagttcatgctcaagactaaagttgtttctgtggattcctcctctgatggtgtgaagcttacagtggaaccggcagaaggaggagagcagtctattctggaagctgatgtggtacttgtctcagcgggaagaacaccgttcacttctggacttgatctggagaaaatcggagtggaaactgacaaagccgggaggattctggtgaatgatagattcttgagtaatgtcccaggcgtgtatgctattggagatgtgattccaggaccaatgcttgctcacaaagccgaagaagacggtgttgcttgtgtggagttcatagcaggcaaacacggtcatgttgattatgacaaggttcctggtgttgtttacactcatcctgaggttgcttcggttggtaaaaccgaagaacagctgaagaaagaaggtgtgagttaccgggttgggaaattcccgtttatggcgaatagcagagctaaggctattgataatgcagaaggattggttaagattctggccgataaggagactgataagatcttgggcgttcacattatggcgccaaacgctggagagctgattcatgaggctgttcttgcgattaactacgatgcatcaagtgaagacattgctcgagtctgccatgctcatcccactatgagcgaggctcttaaggaagctgccatggccacctatgacaagcctattcacatctaaaagggaacaaggtatgtcacactttggtctgatttggttttgttcggttttggtttagatttttgatttgcggttttgatttcttatgtatctaatcacatcccacactaggaagaccttaaaggagtgagccacctatgacaagccaaatcgatatcttaacctggttggattttggttcggttttctgtggtttagccttcaatttgtcctttatactgtgtttttattcgttaatgttcagatacgtgttaagcctgatctttaataaaatattcaacattcactcaacactttttattgcttccggcttgctttctagtttttggtttacactaaacccaaaaattgattagtcagttcatacgttaataattaggggatatacattatgcattcactaagagaccaaaattaattcaattagctccatgattagataagtacatacaatttgatgttatcatctaatgataactgtatactatatttgcaattcttctaacaatggtaaaaacttttttcatcgttcatgtcaacttctattcttgattctgtttttgactaatgcgttgtacgtaaattactctaatataaatactcattgctttgaatattattttctaccacaaacttggaaaaactaaaattactagagaaaacaagaatggctgcgaatctaaggaacaatgcgttcttgtcttctctcatgtttcttctcttgatcggttcatcatacgcaatcacaagttcagaaatgagcacaatctgtgacaaaaccttaaatccatctttctgtcttaagttcctcaatacgaaattcgcatcgcctaatcttcaagccttggcaaaaaccacacttgattctacacaagcgagagctacacaaacgttaaagaaactccaatctattatcgatggaggagtcgaccctcgatctaagttagcttacaggtcatgcgtagatgaatacgagagcgcgattggaaacctcgaggaagcttttgagcatttagcttcaggagatggtatggggatgaacatgaaagtttctgctgcattggatggagctgatacatgtttagatgatgtgaagagattgagatcagtagattcttcggttgtgaataacagtaaaacaattaagaatctttgtggtattgctcttgttatctctaacatgttaccacgtaattaatttgaaaatcttcatcatgtgtttgctctgattaattgtaattgtttgcaagaagacaaactaaattaatatacttctattataatgaagctttagtttgataatatccaacgtaacccatgccaatacaaaaaggcttcaaaaaatgtaatgattgataattaagtaattttgtttttgtagtattgtatgaaatattgtttaaatctttcaatttgtaatgtaattttttatgagatttaaaaaccttaatttgggaaaagttaactagatatataaactgatcttagttttcgatgtgcaagaagtagataactaattattttatttgtaatcaagtctaatccgtgatcattgttgtttcaaactgttttttttttttttaatcatatatcgtttgttttcttattataatttttttatttgtagattccaataattctaatgtattggtagaattatattgtagtaaatatgtcccaaaagaatataattcatcatatttttctgaatctttcatcgcaagtcgcatagtaactaccaaaaatgttttccaacatgaagtttggcagtaagattagtgccatcatcaggcctaaactttgtttgcgtaaaataattattcaaaatatgattggtcggatcaaaagagaagtcttggtatattggtcttctacaagtgcagtattgatggctaccaagataatttatattcggtcatgaagaaatgcaatcattcatatgctattctactcgtgcgattgtggtaaaattggcggttggaaacaaagtgctgttggcccagtggtaaattttaaaggtggaggtgttgggttcgaggcacgttgagagaaatctcttgttcaaaagagatgaatttaaccttgtgtaaatcccgcctctaaaagatatagggtttttgaatctaaacttctagatattcaaaaaaaaaaaaaaatattggcggttggagtgaaatgtaaaatgagccttcaaacttgcattgatagaaaacggatcgatagacatggattttagagcaactgcactcgaaatattgtaagacgtctaggcgaaatttggaattttgtaaaatttggctaattaaaacttgccaacttgcaaaaaacttatatcattttacggtttatcaatcagattctatgttgtgatgtcaatgatattgtaaattattgagtaactaatagtggaggattacgcacacttcaaaatatcgcatgaaacatgataaatttgcgttgactaactactaatgacttcagtctgttatacaattgtacggaattttgaaagtttgccatcactgtcaccagcctcatcaccatcaccatcaccacttcatatctcatcttgttttctcgtcatctattcttaccaaaattcagaagctctctttttcttctctctttctataacatatgagagaacaaaatcagtagctcacaatctctcactcgcacgtccatccacaaactgaaataactatgaatgagtatttagacatcccatctctcaaaatcagtgctatattctgaaacaaccgacccatttttttaaaaaaaaatataattaaatattcccataaatatctaattaaaccaaccaataacataataattaaaccgcaagtcagaaatactattttatgaataaataaataaataattcgatcaacaaaaccaagaataactgacaatcctaaccgggttccaataacaaaaaacaccaaacataaaacaaacgagttcctagatcatcctctcttccttgtcatgattccacaatcacactttatctttacctgcatcaacaacacaatgagatgcgtaagtattatcataaatacttagtgaggcgatcctcacatctacgagctatacacacaagcaaataaaaatgtataatcacgaatacaatacaaacaaaccagtcattgaacaattcacccaaaacacattcaccacacctacatatcatcactcaaaacaaatcacacaacccaatcgctcagataaactcatggtcacgcactcaccttaacaaattgattctaatagcaattaaacccaggagagactctccttgcgtctgaaacagttcagaaacgtcctacaccaagtccacaaccaaaagcaaccttgaagcaaactggacaggaaaaaccagaaacaagcagtctcaaagacaaaaccctaaaatacaaactaaccgttaactattcaatcgttacggtgaaatcctagccgcagacgtcacaaagttgcccacaaaatctcgtgccgatcggaaaacagacgagaccacgatctcagtttcaatctccgctgatcctaattcgcgtctgagaaaatgtgtctcacgaaactgcgaataactcaaccaattttaatccaaatccaattctgtaaactggagaataacgataaaggacttgggaataactataccaacttttgttaccttttaccacgatttgatatgacgaaactgatttctcccaaaccctaacgattctgctccttctccttttctctttttttcttctttataaaacgaaaagtggctaactaaagccctaatttcgagtttccttattttataggcacactctagggtttccaattaacccaaccaattaaaccggatgatttaaaaacaaatcctaaccgattttccggttcacgggcgttacatattcttaaatattttatccaaactcgtaagttttgcaaaataccctatttcttgtacccagataaagaaaatggctctcaatttctttctctattttaatttataattaaaattaaaaatcttgccatttgataaaatagacgtgcggaagaagtcgaaactgcaaacaaaatggttatgatgagatgtcgtgacaatgatggtttgtgtggtggtcagaagcaagtacaaaaagatacttacaagattgcgagtctcgacttatgaacggcatgatattgagcatgatggtcgattgatggcctctaaaagtttcaatcgcctcatttggacaacttgaccgaacatcgacagttcatggtatatgaaatccattatgttctttgagattttagtcgcgaatttcttgagaatttgccaatcacaaacatgtaaatttcaaatttattttattcgaaaataaatttgaaatattttgttttgctttgtaacagtaacatctaaaaatttagtttgggttatttcttttgaggaaaaatataaattttagttgatttgaccaatgtctagaattggagtcgttaagttcactatacgttatatcggtggcagagatgttttgatcaatgtaaatatctaaaatttcttgagaatttgccaataacaaacatgtaaatttcaaatttattttagatttgaaaataaattcgaaatattttgttttgctttgtaacagtaacatctaaaattttagtttgggttatgtcttttgagaaaaaaaattatatttttaattgatttgatcaatatctaaaattggagtcattaagttcactatacattatcttggtggtagagatgtttggaattgaaggcgaaagaggtggtattgatagaattgaaaatgacagcgttgatagaattgatggagatggtgctaaaaaagcgagcacggtagtgagaagcgagcataagacgacaatgatgatggagttttcagcagtaagggaaagcaagggtaaaaacatcatttgtccctctccggaaatgccaaattttgtaaagacggaaagaaatactcttttcaaagattgagtccaaagtatgagtaaaagctttatttgtactttccaagaatgcccaattttataaggtgtgaagattaaaaaagagctcacaaaaggcccaaaccaacaataatcccattactttgcatataacttattttttataaaaatatatgcagactttaaatgacatctttaatttttaaaattaactaccatatagattagccaaaaatagaacaatataaaaaaaatatttgacataatcttattaatttgcatcatcttatattgagaagaaaaaattctataaatctactaattgaacctatataactctatctctcacacaagaattccatcatttgggattctcttcttgaaactaaagatatataaaatggttagatacccaaaagacaacctttctttttctcttctaaaagtgtttgttcttcttgttttatttacagttatacaattaagcctcgcagttacacaaagtgaagtccatactatttgctcatctccaacatcaaatcctttattttgctacaagtttttcaagttagatcctaaaattggaaaacttgatcttcctggcgttgccaaatgtttgattcattatgctcaacaaaatgccttagatacacataatcagttacaattacttgctaatagcacgactgataaccgtaccaaagaatcttacatctcatgctcaaagtattacgacaaggctctttactcttttgatgaggccctaaaagatttaaaggtcaataatcctgattatttaaatattgagattacagctgctcggcaaaatgcaaatgattgcaaaactttggatctgaaagatgtcttcaaacctgatccaaaactcattatgaagatagattttcttgagaatgtatgtggaattcttttatccatttctgatatattaccaaagtattagtagagattggaaaccaataatatattaccaactacagacctaaaatatgttttatcgttctgtcgtgatataataatctaaaattaaattaaatagtgcatactaaaatgattgctgaattttgatgttaattggatatttgattagcggtttgttttgcagcttgcattacatgaacacaatgttattgactctctatatatagcataatgacattgacgtaaccaccatatcgttaaaaaaaaaacggtttcatttgggttgctgcataattccccctatactagttgcatttttagctttcatccacgtatttgttgggtctaaaagccatcaaaaaaccttataactacgtctccaataaaacaacatgatttttccaagatatatattaggcattttttccaaaacaaaccgcaccaaatcttacgggttgaaactggtcgttaaggtctcatgaggaactatattggtatttgatgtgtttaaattctctcaactttaaacttttttagtctcctccgttcatagcttggttctctgtgttctatctttcgattgtagcaacagtcttatcgagagcgatcgattcttatttgagtttgatgttctcatcacttccaccatcgtcacccatatacaaactccacctaccatgcttcttcatcgccacatcattccaacacctgcaaatttaaaaaactttgggtttgggtaggagtgtcaaaatgggtaacccaactcaactcaactcataatcaaatgagtttagggttaaatgagttatgggttgacccaactcattttgttaaatgggttggatcaacccataactcatttaatttaatgggtgaaattgttaaatgggttaacccaattaaataataatttaattaattattattataaaacaataataaataattatcattattaataattattaattcattattatcaaacttaaaatatttacagattctaccgtttacggatttacgtttttggcgggaaaattacggattacattgttggcgggaaaatcacgggtttacgtttttggcgaaaaaattacaagtttacgtttttggtggaaaaatcacgggtttacgtttttggcgggaaaatcacgggttttcgtttttggcgggaaaatcacgggttttcgtttttggcgggaaaataacgggtttacgtttttggcgggaaaatcacggattttcgtttttggcgggaaaatcacgggttttcgtttttggcggcaaaatcacgggttttcgtttttggcgggaaaattacatgtttttcgtttttggcaggaaaatcacgggtttacgtttttggcgggaaaatcacgggtattcgtttttggcgggaaaattacatgtttttcgtttttggcgggaaaatcacgggcttacgtttttggcgggaaaatcacgggtttttgtttttggtgggaaaatcatggggtttcgtttttggcgtgaaaatcacgggtttacgtttttttcagaaaaatcacggatttacgtttttggcgggaaaatcacgggtttatgtttgttggtggaaaaattacgagtttactttttctcaattcatcgcttgtatatttaagaaatttggaaaaatattaattttattagattggtttagatgtgttggttaaacttaaattagcattggtttagagattttagttggtttaattcaattttacaaattttgatgggttaattaggtaaatcattgaaaccattaaccattacaatccaactcatttactcatcaaaccaattgacccgataactcatttgacccatcaactcatttgagtcaaaaattttcaactcattaaggttcatgggttgagttgagttgagttgacccatgaattttgacccattttgacactcctagatttgggtgttaaaaatttatttattacattacaaaactggatatctatttaaatatatatatataaagtgctaattaaaagatatatattaaatgatccgacattattgctctagattaaatagaaacaaaataaaatgctttgacattgtaatgcagttgatgtttctttttttttggcaacataattatgttgttattgatttaacgaccatggaaaaataatcaccttattgtcaaaaaagaaattaccttactatagtacataattaaacaagtttgaccaaaaatcaatatgttgatatttactttcaagtgtagatatggttaaatgtggtccatataaatctcacaacaattctcatgtaacaagaaacataatcttcatattaaaatcataaaataaatttggttgttatgtaaaaacaattatttattggttctgttagtaatgcttttactataaaatttcagaaagtaaggttagtaataattcttcattctgttttatgttctttaagtcgactcctaaaactaaaaaacttaatcttcttggtgtaacaaagtttttgatcaactatgcgtcacgaaatttcttaaacataagcatgcaattcaaatcactcgttaaaagcacgactgatcctcattcataaaaaattataccgaatattcagaactttctattattgcacttaccaattttgatgccgccctcaaagctttggcaacaaaggacaatgtcaccttaaatgttaagagtctcagcagcgataaccgatgaagacacatgtaaagacgatttgtcaagtgttatatctagtccacaattttaaaagaagatttctaatatgaaaatctgtcggccatagttttggttatttctaaaatattacctaaacataataaaatattataaatcgatatattgttttatggattaaagaaaaaaaaaacaaatttccttttcattattttgtcaaaactgtataacatggcaaaaggtatggcaaagaaaactatcaaaaacgataaaaccatggcaaatactccactaataacatatcaatcataggtaatgcaattttgttttctcttttttttttaactacgtataatggtgttaaaactttttttgttttttttttttggaaaacttttgacctagtgtaaagtttggcaaaaatggtttgatctaaaactagtttcatcgagattttacattttgtagaactctgattcggctttaatgagtttatggttagagacatgggttaggttaagctttactcgatttagagttttgaggttcgctgcatcttgctttcatgctatcaaagcatttttatattgttacattctcttgagtcttttttttgttttgtaatccttttctatttctaattaaaaaaactaaaatttatagctaaaaccattaaaaaaaagtaaccaagagttccgaaactaaagaaaacccaaaaaagttagtaacttcaaaaaatttaactagtttctttcatcaatctgtatttatatatgttctaactttttttatcaaaaccaaaccgaatctaaaccgtaagtcaaaataaattaaaccaaaattgcatcaaattgaaatcatgactaaaaattactccttttgtccctttttattgattttctagaaacaatcacagattaagtaaacatattgatttaatttttgtgatttaattttttaataattctaaactaatgatattcaattatttgtcttgaagtttaaaattcatcaataataactaataaatagtgcatagaaacctaaaaaatcaatctttttgaaacaattttgtttctctaaaaatcaattaataaagaatagggggagtattatttttgaagtatactttaaaaaacacctttattttgataaatattaacagagaatgtcattacttatattcatgtattcaaataactttactattaatttttattatccgtataaccaaatcaattgattgtttttaacattaactataaaatttgaaatatacatataatgttccaaaattagtaatacatattaaaagattgtgttaagaattaaaataatgattcgcaatcatctttgtttgattttgttttctatttgttttgaatcatcatataaagttaataataaactattttctacctatattctgattcaaaattttagaattagacatatatattacttaaataataaaaaagtgtgttcaacgtctcaatttcacatgggctaaaatgtttagaaaatgattaagagtcatgttataaataaatctaaatctaaataaacaagaagtttaacttaacaagtatctaaatttaaaagtttgtatatggtttaattctgtttttaattgaactgtttaattttactggatatagtaaattttaagctttgaaagttttgaaatattataattgatatatttaaactcagtataaagtttaaaataaaatgaatatatataaaagtctaaaataacgcagtacatgttatattttgagactgggtatatgaaaaatgagtttaaatcgacattaaaaaaattaaaagtatcattaaccgacattataatacggtgaaattctcattttattatttgattaacatcactaatattaaatatgtagaattacactaatttagttaagattatgtgaaaacaaaattgtcccgtgttatattgagggttaaattctagtttggtttaataaaaggaaacctgaatcaaaactaaacaaaattatatactacagaaaaaagggtttgttgcatcaactaaattatatcgataaataaatgatgttaatttaaattacttcttcggttacttttacttacttgatagcttatccaactcttaactatagcatgtgcttaaggagaaactaagaactcttatactattacttagaaattattattttgcgaaaattccactaatatcttcgggtaataatttatctattaacatgccgatttcaaatgcttggtatttatttataatatatacaaaacaaaacaaaaaaaaatctataaaacccaccctgaaaactcgatcactttatgtccattccgagaactctctccctcattaattaaaatctttctcagagcaatcttctcacaagtttctaagaatctcaaagcatgaatataagtagaacagaattcgcaaactgtaaaacccttataaatcataaagaagaagtcgaagaagtcgagaaaaagatggaaatagaaataaggagaggtccatggactgtggaagaagacatgaagctcgtcagttacatttctcttcacggtgaaggaagatggaactccctctctcgttctgctggtaacttcttaagccttttgcatatatatatacagaatatgtgatcatgcatgatatataatatgtaatgcgtaaatcgatcgattcagatcaattgaagtcatcataacaaatccttatatgcccatatcatatctctagagtgattgttaaactatcattgatttgaatggttaaagtttggtattgaaggattctttatatgtcaaacaagtagtccgtttttgttttttaaacatttagactgaaacttttttttttcttattagaaattcgttttggattttgtggattttaatatgatcatgtgaagtttagtttagagtttatttataactaactgaaattaaatggagtagatataaaaactcgtccacatcttatcaatatgttattcaatttctatcacatcatatgtgagtgatatacatatatgaatgtgatttttcgtaactatgagaatacttttcttatggctgtgacttctccatgtcggcataatttaaattcctctgtagaattggtaaagtaagaaagaacaagttgacatattcatagttcattattatcattaaaagtgtactttcgtatgaaacagtttggtcggtccaaatttatttattttttcctttggagttcttttcatattagccttttgagtgtggaactcaaacacctttcccaaccatccaattccatacagcctcatggaattgttatctttattgatttgggaaattgtactagtgtccatatactattgactagtgtacattccagttaattcatgtttttatactaattgtatttatattgaaatcatttactattgagacaggactgaatagaacggggaaaagttgcagattgcggtggctaaattatctccggccggatatccgccgtggagacatatcccttcaagaacaatttatcatccttgaactccattctcgttggggaaatcggtatgaaacctttatttatatcgacatagacatagtcatattgtcgatacattacttaaaatagaaaaagggacacatatcgttgaagagagcaaatttggaacgtctctatgaaataaataactcgttattcaatattgtattagtagataattgacaaaatcaatttgatgcgtatttgaaatttcttggttgaattgtggttactatatgaaacttgtatcatagttgaaattaaggtacacatcaacgtctttttttatcagagtaacactaaaaaaactgattaatctagtactacaatagaacttataaataattaaaccctccgattcattataaataatatttttagcaagagtcggttttaacaaaaacaattaatatacgtacaaaaagtatattagaaatttaatatattttttgtatgtataaatgattctaataaaaaacggaatgagagtttaattacgatgttctataaaattaatcgtgtttttaataatggagttagttttgatattttttctattgtgaaggtggtcaaagattgctcaacatttaccgggaagaacagataacgagataaagaattattggagaacacgtgttcaaaagcatgcaaaacttctaaaatgtgacgtgaacagcaagcaattcaaagacaccatcaaacatctctggatgcctcgtctcatcgagagaatcgccgccactcaaagtgtccaatttacctctaaccactactcgcctgagaactccagcgtcgccaccgccacgtcatcaacgtcgtcgtctgaggctgtgagatcgagtttctacggtggtgatcaggtggaatttggaacgttggatcatatgacaaatggtggttattggttcaacggcggagatacgtttgaaactttgtgtagttttgacgagctcaacaagtggctcatacagtaggcatttcatgggtttattaatgaatgtaatgtataataaacataaactaatcattcaaaacaaaattaaaggttttccgggtttttttccatttttttattggtttaattttattgtgatgtatgattttacaaaacaaaaaaaaaactgcttaattaataatatcaaaaacatatatattgttacacagaagcatgatttagataagactataagagcaaagaagagaaaaacaacaacatgagtttagcaaaaagtttatgtggttcctggttcatttaataactcccatacgatcacttataatctaccatatatgatcatcaattaagttttataatatcaccgcattattaaaaacattatgagtatttgataacatatcccaaagaaattcattacatacttatttaactaatgggttgaaatagagattgatgcatgatgtgtatatgaagtgaacatcaaataattattttactctaaataaattattaatttggatttggccctctcatctaaactcagagttgaagtgttcatgaaatcttgcatgctcgagacaatgagacatattgcttagagcacttaaagatggtatcaactcttaaaaatatgcaagtaaaatttcgtcgtctcaaatatcattttttaaaaataaaaaaaaaactttagttacatacatgttgaattctctaaatcggttatgtagtttgtggtgctattattgttttggaaatttctagtttgtagggcctatattttcttgtttggctaaccaataatatcgttagtttcatttaaaatcacatattaatttagtttgtataatcattaatagtttaactaaaagaaaaggacgtgaatgatgtctccaattcctaatcatgattaagatactattagttactccaactcatgtaacactttatcgagattatatacgtccagaggggacgaacccaaataagttactctagttaaacttttaaataaattatttctcagtgtttttttccactacgtcgagtaaggaggatcacagattcacccgaaccctattttataatcaaagtattaattgttttatttgttagaatatattaaattaatcatcgaacacgtctatagactaaatggaaacaatccaaaaatatcaaacaatgcatggtcgatttttattctaaacttatcttttcaatattctctttataagaaaaaagcagaacaatagtaattgaattggagtgaaaaaaggaatgaattggcattacaattttgtaaatggaatactggcctttcacacacgaatatctttgctttgttggattatagaatcattgattttggctttgataactatattatatattgacgttgattgttgtatgttgattgttgagaacagattgttaattttagataataatttagatatctacgagaaaagataaggacacgtgtgaacatttaacacgtgcgcttgttgcttttagaaggccgggaaagagagaagtggcaatggcggctgtaatgggaatccgagagaaggtggcgcatgagaagcaacccgaaagtggtcccagttcgacacatgtacgctccatctgtcacgtgtcttttcttttttatttctttagcatcctctagaaaataggagtatctttttttatagtggctctcgtttcttcgattattggttactaacatcgatttatcatttatccggtttctgttttggtaattgactgaagtggtggactttgtcgatcctcaaactaaattcatttatatcgactactaactaatttggtttgctacatctgttgtatatcttttctgtgtcatttttttaagtgaaatttaagatttttacatacaaattaagaaaacatatcaattttttgtctagtatttttctttatgtaaaacatagctaagtaaaataaattcaaccaataaaaaaacagaatgcaaaatataatgagtaaaaaaaaattgcatagaaatttataattatcacttaacatgaaacagaaggaatcttaaaacattgcttacaatggtaccaaatgaataaaaatttacatcttcttcttttttattgcaaagataatcacttccttatgtcattattatatgtatcctctctattttcttgtgtgcttctagagagattccatagggaatgttagtgcagaaaacaagtatatgttttttggactttcatttcaataaaattattgcagatagataaagcgacaaaattaaacacaaataaagtgatcactccatgatagagaacaatttgattttgtattagtataaacttttcttcctcataatccctgttttagggacataattgcatcttcgggaccaaccattgcgttataatccactagggcctagactaatcgatctcaaaacattagtaataaaaatatctagaaaataaagtaacaaaacgaaagtctttgcttaggaacttgttctaatataaagtagaaaagggaaccctacatgcactgatgcacgagttaatggggttttatgaaaattaaaagaaacttaatcaattagtctaatctataaaaggttacaaaggttaattatgcagttagaactttataaagaactaaagttagacaaatgtcaaaagctgtatgtaaattatgattagagtgtatgcaaagcaacctcaagaaataaaccattcgtggacattgtcatgtttacttattgacattttcaaagtgtatttctgtcttgacaaagttgaatttacgcactcactcgcaaaatagtaataatgattactataaaatccatttagtcattatatagataaaatgtaaaagattggatctcaaatatctaaaaacgttgcaagcacatgaactatataagatggttgattgtacaactgattttaaaaaggaaaattaagattatccaaattcaataggcccaaaaggccgttgtacctaataacaacccaatactaaacgactaatagtctaatacatgatacatgtatgtacccatgataaataatcaaggagatggagaagaagaagatttgaaattcgagtaagaaaatataaagatgattttacaagtaaaatggttataggtaaaacggttaacaggtaatgtatattcatcctcatccctactttaacagttcaataattaaaagaatcttatacttcataattgaatcgttttatctaatatcacttccttaatatagtggggtatcacatttcacctcaacaaagttaaggtaacacattacaaaactttcaactcctagttctaggtacacagatctaacatgtctacgtttagcttaaacttttttaagggaacatagttagacgaaaacatttcatagatattactaaaaagctttgccataaacctgaatactagtccttacatgtacgaaacatgtctaaacggctatcctcaagtcgtagagagtacgcacgtttcttgtactcgccccaagtaaatgtttggtacaaccgtggctgattcatcgtcataaccatcgccgaaagaggcccaatcttcgcctgaagcggtggtccggcaaagtacgccgtggatagccggctttcttctccgtaggtcaatgctctatgccttacacttataaatctcccgttcgtcatcaccttaaaatccaagaaccaattaatataaggtccacaacattgataaatgacagaaaaaatgttaaagtaatatcttgtgaccaaaagaaagataaaaacatgtttaatgtttagtttaggtttggcttttatggtttcttgtttgatgattttataaataaatggttatagtttagtatatgttcgatttttacggtttctgatttcgtttaggactaacaattttttttttaattacgatctttaatcaccacaaataaaaatgatgtaataaaaaaaatgtaatcaagaaagaaagaaaaaagaagacattgacctgtaacaagtctcctacattgacgcagaaagctgaagggtcaggggagacagaaacccacatgccatctgaattggacacttggagccctcctacaccgttagatctaagaactgttaaaatctgagggtcggtgtgttctccgaagccaactcttgtcagtgacacagattggtcagaaagattggcttcaccaaagaattgatcggacggtggataatgattcactctcagaacggagtcactatcgacggagctgattaacctactgaaactgtgaggtgggacatgaagtccctcagccgtcagatctaagatctcacgagccaactgcttaactgcttctatgtaacaattcactgccgagctgtcaaacatatacgtcacacatcagcacgagattcatttatttttggttacttatagaaatatacgaaatatatccacgtaaccttaatatttctactttcagaaagaagttgggtttttttctatcaaagaaaaaaaaagatagacaaaaatgaatcattattgagccattattgagttaagtacaaaaaaaaactgttgaaacattagtacgaacaattatacaacttcgtaagagttagtatatttgagaacaaagactagcagattgtagtatatataagtttttctaaaagctcaaatataaaatagtacatgtcatgtatcatgtagattagtagatacacaattcttatccatacactgttattgagagagactattacatttttttagtttactacatgtctggtacgtttggtttctccagactctagtattgtttaaaagcttccaaaataaatgaaaaacaagcctatatctatttaaatacataaaaggtgaactgtttgtatttagtatcaataattaatgcttccatgagctataactgtctccttttacataaatgtagacctacaagttaacacttaattaaattatatatactgttatgctgacatattagcatgcattaaaaaataattaacataaacatgcactttgcctacatataataatcatgtgcatttatcacattaatatttttgaagtttggtagatatatagtataagcttttgaacgtatccaagctatacatgcagttgtatattttacatgcaactatatataaactatttcaatataatttcattaaaatattaataatgattaggttaaaatgagaccaaacccgaaccgtatatatctagaaatacagttactatacgtctacctgaaggagagctgagagcgaaaggcagggtcgttagtgtgaaacagcaaatactcgacctcaccagagtcaccgttgagtccaatgtctctaaaaccataccggaaaggctggttaactggtcggacagatttcttctcgtgagccggtttagcaaagaagtttatagactcttgctccattcttgagatggtggtttggtcaacgccatggttgatgactttgaagaagccgagactctcgcaggctttgactatctgcatcgacacttgtgatctctcctgcgacatgtctattattggtatgtcttgatctacggccacgattttctgggaccctttcaccatttttagagaaagggagagagggattttatgagagaagatgataaggaagaaattttcaacattagtgtatgtatgtgtggctatatttatatacacactgcacacaagagagagaattgttggcaaattaaaattggttatcacgtgcatgtattaggcaccaacgggtattcgggtaatactatgtttggtggagtactcttataaatttataaggactaaaggtagataattaacgaaaaagagtattgcatgatgctttgttacgattaaagttttctaaacgcatcagaattaagacttcaattagctttttggtttttcctttttcactgaaattttgctttcttcttttcttacacaaatcattttaactgatgatgaattttttagcaatacaactacgaccactttacagaataaaattaagaagttactaactgatagaatttcatcttcttctttttttgtgaattttttttatctattgttaagatgaatttgttaaaatcctttatactttcaagtgtaggtacatatatattaaacataaatagtcaaaatgcgtgttctctatgtattatctcatatgtaaatgcttaatatgaacccatcattcaacatctaactcaaaactcaatttcgtgttagatcattgcacctaatattattttttgtcaccccatcatgtaatatacttcccctacttttaggtaagaatgcatagtactattcttccaaatattcgtcgtaaacctctttcacatatattaatttgtattcctcgggatattcagctgatcaaagacttctggctaaagtagaacccgcaaattcccaatttgcaaaagaagtttgacctctttatactattcaacatccacaatacaattttattgttttctttttggaatcttgctttcctctagttgaataaaataaaagataatatatgtgagatagtattataataaccgaccggccgatataatattctagataattcccaacaaaatacttgaatgatttacaactaaaaaaaagtagatattggcggagatatattgtgacgagtttattcgcttatgataattttttattccgtgggtttcttgaaactgcaaagagatggttactctttcaataaaccagaattcttttaaaagaaagtcaaatctttattagataaaaataacatgggtttgaatttggtcgggtcaagtttaatggaaccagtggtacattcatatatatggaacatggttttctatatatatatacaaatttattgaccaccaactgccgcattttatatttatacatttgttctgctttgtagccagacttttatggttagcttcattgactcgaatttatattagtttaaaaatatagtccatttattcgtgttcgaatgtatgtagtgggtttaacgatgagatcggcggggatttaatgtgatcagtatgtggtaaacgcatttagaatactaaatgatacttataaaaaatgactgaaaataaaagaaagaaagaacaacaatataaacggattttagattctgcaataatctatccaataatccaacctgtatctaatcattcaatgcccgagttctaattctctgcaaaactttatccaattatccgacttatttttcttaccattaaatgtacaagtttcaaattctatgaatgtatgtatattgaatgtgttgtaacttgcaagtcattggactgtgtcagttgattcatatagcatataaatagtctctttaccattattaatttgtaaggttaatagaaataaattattggggtttctagaaaatttattcgaatttctaaaatataagaaataactataattactaatttggagcacctaaaattccatactaaaaatagaaaatgcttataaacaaagaatgaaacatgagagtctaaatctgtaggaggttaggtgttgaaatcacaattacacttcactttctccctacaataattcgaattactactctcaggtcaaatccacaaatttatttacaaaagaacatagacacgtgacacgtggcagttgcacatggagttgcaatagtttatttgtagtaaaaatgagattttgactagtcaaagaaactgaatagttgagtgtatcataactgtaaacaacaacgactctacggtttaaaagaaggtgcatataagtatacaactctaaaacaaattaaagactattggtaactcgttttatcaaaacgggcacaaattgttccgcaatttgaaagaaggtaattgaaaataaggtggttaaaacgaggtagggtctcgatagaataaattaagctggcggttgaaatagtatttactttagccacaatatacatttttttttaatacaattagatagccacaatatacaattagatagcataagttacaataattggtgatggatctctttaatgtacagtttatataaatattgcccacctacctaaaagctatacatattaagatttaatattgaagatattaacatgtttaaaaaaaaaatgaaaaagttacttttctacatatagtaattcacaacgaaggtggtgggttaaaaaactaaatgaaaaaaaaaaacagcgtcgaacaagaaatattaataaaaacacaattgggattatatgtcgagtttgtccaagagcaaactacgagtcgactgcatcaaatttaaaagatgcgaggaagtttagtcatacgagaggatatatagttttttttgttttttttgataatttagggtaaatctccgaatttatggaggagttcaagattaatccctcgggagagggtatcccatgggtaggattctcaccgggttttcaaatgggccttaagcagtaggcctatacccatgtggccaaagggatgttgctaagcaattctgcgtttggggagagtcgatccctgacctagaccaacagggccactcttccaccagactagaaccactagcccaccacctctggttaagagagaatatatagttgggaaccgtttcttaaattactagaaatatccccgtcgaagtataagccgttgataacttcttcctcagttccttgcgttctttaaaaatgttaagcggatgaaatcttatcaaatatgtctttgaaaatttgagtgagatgggccatcgccagagtcgttccgacatttttcatatgtgagatgtccaatgtaaaaaaaaacatatacacatcttttgtcgtgtttagggtttttttttattaaacaaaaaaaatcaactacgaaaatcatattgttttaacaacgtaacgtacttaattaacggtgtttaataaaagcccacatgcaaaaaaaacaaacaatcttgcttttgtataagaaagggaatatatacatgatcaatagcaaaggcttaacaaaaaaaaaaaaaaaaaaggcttaacatttttttggtcatttttggtcaaaaaatggttcttaaatttagatgtcctaaatccatagtttcactagtttatcatgttaaccgagcctgaccatcatatccaaccattctagaataagatgggatcccataatactgcaaggtatttgtgctcatactgtgaagtgtgaacaattatatgcaatcaaagtggtaatgctcacttttaatattccatcctcgtatgtcagagaagtaatttgcgttccaagaactttttactttgtaattgtcatatgtagaggctccaaaaaagggcttcacatttcaaacaactctatagtactatgaaattcaaaacataatttaatatgtgttactgtaaaaatctaaacaaaaacggagtcgaagtttactaagccctaattgatttgtgctacaataatatatatttacatagtgataaacaggcccaaaccagcccaatttaagatcaatcgacccaaccgaagtccatgtgaaatgccgaaattggtttcgtgcattctaattttacaaaaataaaataaaagtatgaacaaagaagaattgcatgtacagatataaccggccaatgcatttataatgaaacacgcaaagaaacccaaatttgctttacgagagatccttggcatcagataaagattgtttaactgttcgaaaaacttgggaaaagatttatatcaatatgaattttaacttttagattggttttttttttatttaaaacatttatcaaatatatttgcgaagatttattttcttgcagatctaatttaactcatccaatatccttttattgttctacctaacccttatcaaataaactcaagaagacaaaaacacttctccgttcatttctcataatcaggagatgtgtcctaaaaaataaccactcaaatttctcgatatttcaagcaatataaatatttgaatctattaaaaagcaaaagtatgatttttttataacaattatcatttgattttcaacaattaataaatactatttaaaaaaaacaattaataggtactaaaaacaaagaataagcaacctaacccttatcaaataaactcaaaaagacaagaagacttttccgttcacttcgcgtaatcctaagatgtgtcctaagaatagtaactgaaagcgtcaaatatccacatggaactcatctaccagtgaaaaagccacgtggcactatccacgaaatcctctccggagtaaataagccggcaaaagaggagacttcttttgctattcactgaagtcctaaaccctataaataaatcaccttcaaacccaaaacaaaatcagatcataaagaaccaaaaataaaagccaaaacgtttttagacatggcactcacaaaagagagaagaagcttgttggtttcaatggtgttggtgttcttcttcttcaactttcaccatcttcaagtcacgagttgtccagatcaggcgacgacaaactgtacggaccaggacaggaaattattggagtttccattgaatttggagtaccttgaagctgagtttttcttgttcggagcgttagggcttggtcttgataaagtcgcaccaaatctaacaatgggagggccaagtcctattggagctcagaaagccaatctcgatcctttgacaagagatattattttgcagtttgcttggcaagaggttggccacttgaggtaaaatgtttcttttaattcatatatagtatgtatagttgagatcgaattgtgattatattacctgtctaggaggtatggattagtgtctttagaaaaatataagaaatttgttttccttattatttagttagactaggaaactttttttttttttttttttttttgttgttgttgtcttggagaagtaatttgtctctcagacgaaatgtctttaatatattatttataaccgaaaaacttgaaggatatttgtcacatttgcatcgcaaaatttaaactgtcaaaaatccatccaaattaatattaaatgattggtttggtctttggtgtattattatgtatatatagcgagaaaatatcatttagccttgttaatggacacataaaaattgctatttatgtcgtatctttgagattctttaatctgattttcgtatgtatatcgcattaacataagtttcaagaaataatgatagggcaatcaagaaaacggtgaaaggatttgcaaggccacaacttgatttgagtaagaaagcatttgctaaagtgatggataaagcatttggagtaaaatttgtgccgccgttcaatccttatgccaattcttacaattacctcattgcatcgtatttggtcccttatgttggtctcaccggatacgttggcgctaaccctaaactgcaatgtccagcctcaagaaaggtaacaaattaatctaaactattattttatgggattgttatagtctcatcttataaccactgcaggttatggtttaaagtatatatatttaaaattccatttaaaaatatattgtctcattagttattatcaaactcattaattatttttcatttacattaatgtgttaagatgatatttcattgattcattaggtaaaaataacataaaatacacactctttacgagttatgtctaaaacttcacctaattacaaagaatatttgatatatttcaaaacttttattggaaaagtaaactattttaaacaaggcttacaagagagataagtttgttctcaattgttatatattttttttgaatacccccattatatttacatgatattatgcaaacatttttttcagttagtagcaggacttttgggagtagaatcgggtcaagacgcggtgattagaggtatgttatatgctcgagcggcacacatagtctatccttatggtgtcacggttgcggctttcacggataagatttcggatctaaggaacaaattgggaaaagcgggtgtgaaagatgagggattgatcgtacctaaattcatgggtgcagaaggacaagtgattgggaatgtattggtcggtaatgagctctcgctttcgtttgatagaacacctgaggagattctacggattgtgtatggaagtggaaatgaaagtgttcccggtggattttaccctaaaggagcggatggagaaatcgctaagtcttatttggttactgtcgggagtgagtgaggtttagttttgctttggagtttaatttcctttgtagttcttaggtttttggttatataggagactaatgaaaataattgtcgtattattgtaataaatgttgtgagagtgacatttccataatcgataaaaagtttgaaaaatttataatagttctttcgcctaaattatgaaagaatattattactttggcaatacataatcacgaacacaatctggttacaaatgaggtaaaaatgaaccaactgaatagtgtgaggcaaattgttgaacaacaaataccttagtttttaaattgcaaatcaatcccttaaatttaataaaaaatgtttttgtacccaaacaaaattatttgcttgctattgtctcatacgtaaatctagaaatgattatgttaattatgtagttaactaatattttaaaatacaacaaaaaaaacattacatacaattagaaaatacaaagaaaaaaatacacaataacataactaatgataaaattcaaaattcataatgagtacttggattaaagagtttttaaaataatgtaataaatgttgtaagaatgaacttttctctgctctggttagctcggtagagtggcaggcgaaatccgtcacaatacagaaaaagtttgaaaaattattattagttatttcgcctaagttttgaaatattttacgataactttggcaatcaccctttacataatctagtaaccaaagaggaatgaatgtatgaataatttgaatagctcaggtcacaaaaattcaagagcttgtcagtgacaacatatgaactaatatggctaatcaaaatttcgcatgaaatgcatgttcctttagtaaaacctacgcttatgttttgtgacaactctattcacattgctaacaaagaagcttgtcatactgttcggttcgtgaaaggttgcttccagatttgttcaaattactctacatgaggtagaatcttcaacttgttaattcaccaagcaattctaccccactccatttcagcatttgttatgcaagatgggttatttgcctcatcttgaaggagattgttaattatacataatttacatgtttgtatatagtattgtacatatgagtatgtttaagtggtatagtataaacaactttatatttccggatcgagaccgtgactttggccaaagtaaatttatatataaacctaggataacactttttatttattaatgagaatgtgtttttttttttggtcaaagagaatgaggttatttactaataggggatcctttactaatatagtttattcatgaaatgcaacttggtgttaaagaaagggaaaattacatcctatgccatattttttgaaatctttatgcaatgtgccatattttcttttgccttacaactcatgccacatttggatgggaaatgtcaattttgtcctcaccatttcttctctattttatctctctttcctcgaaatccgtgcattttgccaatacaccattatcttcctgaggaaaaaacgaaacgcttttgtctctctatcacttctcctgacaacctgcacagattctctacatataactttcaattaaatttgtctcccaattttattcatcataaattctctgttgtatctagatcttgtccccgatttcatcatctttcaaaattatcatataagatggcgaaaatagatggcaaaaaatagatggtttcagcatctctgtgaagacaataacgctcaactaatctgtggaccaaaatagatggcgaaaatctaaataaaattcaaaattcttaaatgagaacaattgcatataagatgtatgattcataataatagagcaagatgatgaaatcgaggacaaaacgtagatgcaacagagaatttctattcggggacaagatctggagactaaaacaaaagtcttgctccaattgttctctgctaacaggtaatcatgtcccctaatgcgttatatattacgttgtcccccggtatcaggtaatcatgtctcctaatgtattatatattacgttgtcccccgcagaattttagataaccaatttgtttaaacaagtcatttttaaatacccaataacaacagtagaaaccagctgttctccactattctgtcccctaatcctttatgcttccaccatgatttttcgtcctgtatcatcacatcagccaaaagctgttatgtcaccattttcgtcagagcgctgacccatcttaagggtaatttcatccactgaattccacgtggaccaaaatgtggcagattttgaaaggagtttcagaatatgacagagattgaaagaaatagagtggaatatggcagattttgcaagattcccttaaagaaacgtagaaaacatccaatttctgtttttcaaataaaataatgtttatagttgtttagaatatgtttttcttaatacgttaaattttctagtactttttaatagtattaatgtatgatcgcatattatttcagtgatgtgaacttaatctgcaatcgaaatttaagaatcaattatacataaagaggagaaaaagaatttcgacagaaataagtgtggcaagaatctatatgatatccaaatgcgaacaagacttttgatctatattaaagtcaagacaacaacaaaaaacaaatcatgccactttgagtatttgtgttatcttgcaaactttgtgtagtaactttgtgatttacttgagtcttcgtcagtactcagtactaatgcatttaggcttttgcgtttacatgacaatttgataaggatttgtacttgttgcgttttctatgttccaaacgcaataccattactgaaataggactcatacgatcttattttttcaaatatatttcaaattgtcagcaatttatcaacaatttttcctcttctgatttcaatcatattgcctatacgacctacatgtaaggggtagttatcgtagaagactagagggtttcacgttagtgtttttccattcttttggaatttcaatctctttaaaaatagttgccaacttcagaccgatcaaatctagatcagtttgatataactttcgacttcatacttcagcgaaaacttggtaaaaataaagaaaacaagactagagtttagaactataatctaaaattgaaaagatacagaataacttagaaagctaggtaaattgttggagaaactttcattggttattgactcactacaaagaaaaaaaaaaagaaatagcaatgcataaaaaaaaaagagcccctacttaaacttaaaactactacttagttgctccataataaacttacataaaccccaaccaatgattcaaatctcacaacaccaaattttttttagaaaaaaaaacataaaaagctctctggtctcattgtgttgttgtcagatccaaaaactacctctttggaggtctgtcatcatcttcatcaccactatcctcttcatcttcttcaggagctctcttcctcttcggcggagcctctgacttcccagcaccacccgagttatcattctcatcgtcttctccttcgtctatatcctcttccacaccattctcttccggctcaaaatcacttgcatcctcctcatcttcagctctaccaactggcctcactaagtactctgtcccaagatccccctacaaaccaaaaataactatctcagtttcatagcttaaaccaagtattcaaacaacagagtcaaagaagactatgataactcctttttctattaccatctgcaagaacccttttcagacaaggaccacaaaggtatataaactttgaaagaagaacacgagaacccaaaatctaaagactctgatctaactggatcactcatagaaccaaaacagtactacaaaggtataaactttgaaagaggaacatgagaattcaaaatcttaaacactttctaatcttattggttcactcaaaagaaacaaaacagagacacaaacaaaacccacttgtttatttaggggaagaaagtataaaccctgaattggagataaaacagaacgatttctagtaacagtaagcaaattttttccagaaaagttcatagattctgtttaggttaaacagatccagtctttctttagcacagactcacactttaactatcattatcagtagaatttaaaccaaattgagacacataaaatcatagatctacaatctcagagactaaaccctaaattaagtgaacaattcaaccaataaaagaacgaaaattgataaattcagaaaattttttttacctcatcttcaacatcctcatcctcatcatcatcgtcgtcatcatcatcatctccatcatcatcatcgtcatcaccgttcccatcttcatcaccttcttcatcttcatcttccgctgattgtacaggaggaccacctaaagactgcaaaacctgaacatcatcatcgtcatcgtcatcttcttcttcttcctcatcatcatcatcatctccttcacttccatcatcatcgtcttcgtcgctaacttcttcacctacgtctttaacttgttcttcatcactatcgtcgtcgcttaaaacttgaatctctggttcttctttgaagttcttatcatcatcatcattaacaccagtcatgtttcttcgaaaagcaaaaagtttaaagattttcccgagaaaagttttcgattttcctggagaatttttagaggaagagagaagggttagaaggttcgactattgagctgaagcagtaccgtctttgagattagatctgaaccgttgaaatttaatttgacgaggataggtgacgtggcgttagatcggacggtttagaggatagaacaatgtggttttgatgagtaagggttaaaagatgccgcaagctccacagcggcgggccaaagctgaataataattaaatgttatttgtactttttttgttttttcatgagaatcacacgtgcggcttgtgcgaataattaaaaaccgttcaagtttttttccttttttaaaaattcgatttttatacacccaatatggcatatttaaggcccaatagattgtaagttggtaatatagctcaatatacccaataatgccattgttaggcccaaacacgaaaataaaacaaataatgtgtggttggttctatttgtgaaagatgcattaagttctctcagtgaggtagtttttctttgtgaaaggaagagttgctctccgttgtggtggatttactagtttctgtccgttaaccactttgtcaagctgttctctcgtgtggtttggtggtaggtgagttggcttgtgtttgattctggttatattgcttgatgatggttcattgttcaatagatttttcaagaacaaaaaaaggaaagcgtaatagaaagtgatttgcatgcaactttagtacgaaagattttgtattataaaaatcatataaatgaaagttggtcaactctctcatatgaatgacacgtcatcacacaataaaatgacatgtgtcattttatattttttaaattaaaatttaataaaattaaataatcaaattaaatgaatcaacaatactaattttaattgatttcttcaaaataaaataaaaaataaaaaattatgttaataaattaagcactacttacattatattctttttattttactaatttttaatcattaataatcactattctaatgactaattttttttgtgttgtaattgtttgctacctaaccttttattagtttagtaattttattttgagtctttgataacattaacattcaagttttttcaaataataaacctttaaaacattagacctaccaaataatttaatacacgattatttctcttatatggatatatgcaatgagagaagatctaaaagtattgacttaaatgatactttaatttttgctttctttttattttttcatatgaatattcttgaaatcttgttcagtttatatcaattctatatatttaatcatgagtctataacaatgttattggagtattatatcaagagaatacataaaaccagaaatagtttgtttgtaatcaagttagacaattttcaaatcatccaagacacgatcattttctaatattgatatatgcaatgacagaaaatccaaaagtgttgacttaaatgatattcaatttttgccatctttttatttttacatatgaatatttttcagatcttattcagttgatgtcaatccaaactttaatcatgagtctatcacaatgtcgttgaagtacataaaacaaggaattgatttatttataatcgagttaagcaaattttaaaccacacaagtaacatagttatacatcattttatcagaatatcatatattgtttttatatgtattcatgaagtgaaaatactaaaattttataaataatcagctttataaataaaccagtcacaaatgaatctaaccataaaaattgtaactacatattatggatttaattttattaacaatagaaaaataaacaagaataaacataaattagcaaaaataacaatcaaagtaaatattgtttttaacaattttcaaaataaacccatctagatgataaattactcatctagtacgctttaattttaattttaggatgcatttataaagttcttttctttttttttttgataaaatataaaggtcttgttaatcatagacttcaatacagtataatatgtttcatagatttaatcaaatgtatgtttattggatagattcggatattttgcaactatttggtatttggtactgcatgtggaacagtttagaacagatatgttacggacaatagattttgttacgagttaattgtcgggcagtgagtattcccgaaaattccggacaccaaatacatacctcgatttaacaaagttaaaatattttaacggagattcaggaaaataagcatcttcatttacataaaccaattcgggattgaaagtttactcgaacctctatgtaagattcaaaaccataaacagatttatacaatccctactaacaatatttacttgcttatcgtaaaagagtttagatattttatttacatatttatccaacaaaaaacgtgtaatttggttatattcgacgattgtatcatttattgttcttagtttcgtacaatgattgagttgaatgattggattaggcaatgtgtatcaacatatgaaaaagacttcttggattcaacttatctttcctcgtttggcccaaaaagcaacaaaaataaattaggatgtataactttaaggaggataggattattgaaatgaacttaagcagcaacaacaacaacaaaaaaaagcaatcgtttgctttattttgtatgtttaaaataacgaaataattgtttgcttttatttactttaaaatttatcctagtttttaaagatgatgtaatgtgtatgtttgaaataacgaaataatggtttgctttaatctactttaatttatcctagttttaaagatgatgttaatgtttccaccattaccataaccaattgataatggcaaaactacggcggagcaaaagttagccccttgataaagttcggatgaattgaattagcttaattactacgcaatgtcacacgttaacttcaactattggatccacctggcgatgtttcacacaatcggttcgtcggaaagttatagaaactttaaatacttggcccaacattaatgacaaatactacatacatgtctcttgttttatctactgcttagatcttaaaatatttggaaaaagaagccgtttattacacatacaaaaaagtatcattgatgcgttgaagtaagtgaaaggatgagattgtgtttgggtaaagagttttgaagtaacattggtatagcatagttgaacacttgtatattttgttgtaaagttgtgattttttagtgacggttatgttactgattttaaagttaaaaatgaagttttcaacttttaagataataaagaaacatagatcgaaaatttgaagtcaaaattaagaaatagtcttaggcataaatatctttaccatatcatgatcatttgactaatggcatatttatcatttaatagtaacaaatatttcagtcataacattagacctatatttagtgttttaccaatattgttcttggatactataaaaacatacaaagtaaaattttgattgcacaatattcaatatagcttttggtatatatatttaaattaaaataaataaagaaaatgaaactttttatcctaaggaattttggtaaaggtaccatcatcaattcgattatatatattggagacgtgcactacacagacaaattactacacgcagagctagacacacacttatatcaactgatcttctcccaaagcctgagaataaagaaaaacctccatctttttacatatatagataatcatcaaagaagatgaagatgatgaaggtgatgatgttgatcgtgatgatgatgatggtgatggtgatggtgagtgaaggaagtataatagagccaacatgtaaagagacaccagacttcaatctttgtgtgtctctccttaactccgatccacgtggttcctctgccgacacttctggcctcgctctcatcctcattgataaaatcaaggtcctataacattatattttgatctggtttctttcatatatatccaattatcttcaagtatcttataagaatcagatctttaacaaaggtttccttaatttcagtatagtataaggtttgattactataccactaattgtgaacctttagacgtttttgtgtgggacatgagtagtttaataaatcaaaactttgatgctctttctgtaaaaatcacaaacttacgtgcttgtttcataaatttataattttttctcattgtgatgtggatttaaatttttatcacttttatcagccaaaagaaaatgtgagcatattttgtatattatgtaacatgggtgcttttttgatacataagaattttgggttgtttttgtttaaaccaaaaaaccaagggcttattttataaattttaccaatttcagtatagtgtatgagcttctttactatacaaccaattatatatataacttttcttaaaaaatttctctgaaattaggggagggtttttctatctatcaaaatgtgagaggttttttctgtataaaacataaacttatggggttattttataaatatatgattctgtagggcctggcaacaaaaactttgaacgagatcaacggtctatataagaagagaccagaactaaaacgggctttggatgaatgtagtcgaagatacaaaacgatcttaaacgctgatgttcccgaagccattgaagctatctctaaaggagtccccaaattcggcgaagacggtgtgatcgacgccggtgtcgaagcttctgtttgtcaaggagggtttaatgggagttctccgttgactagtttgactaaatcaatgcaaaaaatctctaatgtgactagagccattgtgagaatgttgctttgatttaatcgtatgtttttatacaagcatgtgtttatcgatgtttaatgggattttaccattcataaaaatttataaaatttgaagataaagcatagatctgttagtttatttctcattcataaaaatgtgattttccctttttaaatttgtaaacaattgtttattttgggcaaattataaattagaatatttgttttcccaaaagtcctattttattttattttattttatggttttagttttatagtaattccatcgtcaaagaagaagcttgtggatcttcgtggccttctctggcgttgtaagtttgtcttctgtgtttctcttcctgaattaccatcgccttcgatataaaggattcatatttgattctgtgtttttttcgtttattgctttagaaatatagattcgaaggcttgtgttgtttcattgcaaaacattcaattcaatagaggaagaacttgttggtaatttatggcaatgagaagtgctcctcgggattcgataagcagtttgccagatgagatacttggcaaaatcctgtctttgattccgacaagtggctgcttcgacatcggttctgtccaagaggtggaagaatctgctatgtcttgtagacaacctttgttttgatgagtcgatggttgtttatcccaacgatgaagaagcaagacgcggttcacatcgcttccttgagttcgtagacaagacacttgctttgctaagcaattctcacatgaagaagttctctctgtctcgtctgtataaatatgtcaatttccctgaggcatacgatcatgggaaccgttgtctcagccggttgatttgtactgcattggaacgcggtttactggaactacacttgcacgccaacccccgctctagtgttaatatagagacagagttgttaactagcaagacactggttaagctcacactatcaggcgcatattctcttgaagtcgagcgtatgtttttccctgagctcaaatcactttctctattatcagtttcagggcttgatcatcccaaatattgtcggtgtaaggaacaaacaccaaacatgcccaataacaaataaggaatcaggcccaacaaagtccagtcaacagaagagtcaacagaaggagacaaaagatcctccagctcaaaaacagagcatcaaacgtacagaggaggagcgtcgatcctttgatgatgactcaccagctacactagcttattctagattgttccaaatttgtctatataaaggaaatgtaaaaccctaatgtaaatcagtgtgaataaaatcattttacagaaactctcaaattctctcttaacttacatggtatcagagccattaaaccttaacaggtgaaacaatggcaacctcctatcctttcccggataatgtttatgttactagctctgtcactctcaagctgacagacagtaactatctcttgtggaaaacacagtttgagtctctgttgtccagtcagaaactcattggttttgtgaacggcgtcgtcaatgctccgtctccgactcgccttgtcgtcaacggtgaagtcacctgtgaagaaccaaatcctctgtatgaagcttggttctgtaccgatcagctaattcggtcatggctctttggcacgttgtctgaagaagtccttggtcatgtccacaatctgagcacctctcgtcagatctgggtgtctctagctgaaaatttcaacaagagcagcgttgcacgggagttctcacttcgtcggagtctccagcttctctccaaaaaggagaaacctttttctgtctactgccgagagttcaagaccatctgcgatgctctgagctccattggaaaaccagttgatgaacagatgaagatctttggttttctcaacggtcttggtcgtgactatgaccccatcaccaccgtcattcaaagctccctcaacaaacttccgtccccaaccttcaatgacgttgtctcggaagtttaaggctttgacactaagttgcagtcatatgaagaaacaacgtccgttacccctcaccttgccttcaacactgaaagatctacgtctggagctcctcaatacaacccaaatcagaaaggacaagggcgttcaggtcagaacaaaggcagaggaggctactcatctcgtggacgaggattttctcaacaccaatcctctccacaggcttcaggacctcgatcggtttgtcagatctgtggccgcacaggtcacacaactctcaaatgttacaatcgctttgataacaattatcaagctgaagttcaagccttttctgcgcttcgagtctctgatgaaaacagaaaagaatggaaccctgattcagcggcgactgctcacgtgacagcttcaccaaatgctcttcagtcagcaacagattatgacagggatgatgcagttctggttggtgatggaacctatctcccaataactcacgttggctctaccactatcaactcctcaaaaggtaaaattcctttaaaagaagttttagtctgtcctaatatacagaaatctcttctctcggtctcaaagttgtgtgatgactacccatgcggtgtgtattttgatgctaacaaggtttgcataatcgatttacaaacacagaaagtggtaacaacgggtcctcgtagaaatgggctctatgtgttggagaatcaagaatttgtggctctttactcaaatcgtcagtgtgcagcaacagaggaaatttggcatcaccgacttggacacacaaattcaaaggttcttcaacaacttcaacacagcaaggcgattcaatttaataagagcagaacctctccagtttgtgaaccttgccagatggggaaaagttcaagattaccttttttagcttctgattcccgtgttttacaccctctagatcggattcattgtgatctatggggtccttcaccagttgtatcaaaccaaggattcaaatattatgccatttttgttgatgactactcaagatactcttggttttatcccttgcgcaacaaatcagattttgaatcagtgtttatttcttttcaaaagatggtagagaatcagctcaacactaagattaaagtgtttcagagtgatggaggtggagaatttgtaagcaacagtctaaaagctcacttcagtaagcatggaattcatcatcggatctcatgcccatacactcctcaacagaatggcttggcagaacgaaaacatcgacatcttgtggaacttggactttgtatgctctttcacagtcatacaccacagaagttctgggttgaatccttctttactgccaactacatcattaacctcttaccctcctctgtcttgaagaatgtaagtccctctgaaaccttatttggtcaaaaacctgattcttcatctctgcgtgtctttggttcagcctgttatccatgcctcagacctcttgctcagaataagtttgatccacgctccctgcaatgtatttttctgggatataacagtcagtataagggttatcgctacctatatcctccaacatgaaaagtttacatctcaagaagtgttattttcaatgagtcagaattacctttcaaggataagtatcagtcattagtgccacactataaatctcctctgcttcaggcttgacaacataaaaggatgagtaatgttgttcccacacctgcagctcctattcagttgcttcctaaaccagctgatgttgcaacaaaaccagatttaacagaaacaggcccaacaacaactcctgaagtaagctcagatgatggagaaaatgatgatgaggaagatattaatccggaaccagaggaaatcattgcagattcagaaccggaagcagaagaaatcattgcagacgcataaccaacagccaacacacatgctatgaccacaagagccaaggctggaatacaaaaaccaaacaaaaggtatgctctcattaccactcacgtgaatacttctgagcctaaaactcttgcatcagctatgaacatccgggctggaatgaagcagtccatgaggagattaaccgtgttcatatgctccacacttggtcattggttcctccaactgacgatatgaacattttaagctccaaatgggtttttcgaacaaaacttaacccggatggctcagtggataaactcaaagcctgacttgttgcaaaagggtttgatcaggaggaaggagtggattaccttgaaacattcagtcctgtggttcgtacaacaaccattcgccttgttcttgatgtcgcaacaactaaaagttggcctttgaagcagctcgacgtatccaacgcattcttacacggtgaactacatgagccagtgttcatgtatcaaccaacgagttttgtggactctcagaagcctaatcatgtttgtcgcctcaccaaagccctctacggtttaaaacaagctccgcgggcatggtttgatactttcagtaattttcttcttgactttggctttgtttgcagtaaatcagacccgtctttgtttgtgtgtcttcaagatgggaaaacactctacttgctactatacgttgatgacatccttctgactggtagtgatcaatcactccttgaagaccttctcaaagctcttaacaacagattttcaatgaaagatcttggtcctcctcgatacttcttgggaattcaaattgaagattactctgatggtctctttctacatcagacagcctatgcatcagagattctacaccatgcaggtatgagtgactgcaatccgatgccaactccactaccgcaacaattgaccaatctcaactcagaaccatttgaagaaccaacctatttcagaagtctccccggcaaactgcaatacctcactattacacgcccggatattcagtacgcagtcaattttatctgccaaagaatgcatctcccaactgtctctaacttcgggcttctcaagcgaatattgcggtatatcaaaggtacacttggtatgggcttacctatcaaaaggaactctgagcttgcagtctctggatactcagatagtgactgggcaggctgcaagagcaccagacgatctactactggattctgcatcttattgggctccaacttgatttcatggtctgctaaacgtcaaccaacggtctccaactcctcaacagaagctgagtatagagcccttacgtatgcagccagagaaatcacttggatatctcttttacttcgagaccttggtgtttcgcagtaccgtcctacacaagtcttctatgacaacctctctgcagtttacctctcttccaatccagcactacacaatcgctcgaaacacttcgacaccgactatcactacatcagagaacaggttgctctaggacttatcgagacaaaccacatctcagcgacaacacagctcgccgatatcttcacaaagccacttccacgacgagcttttattgatctcagaaccaaactcggtgtgtctggttcactcacaccaagtttgagggacggtgtaaggaacaaacaccaaacaggcccaataaaaaataaggaatcaggcccaacaaagtccagtcaacagaagagtcaacagaagtagacaaaagatcctccagctcaaaaacagagcatcaaacgtacagaggaggagcgtcgatcctttgatgatgactcaccatagccagctacactagcttattctagattgttccaaatttgtctatataaaggaaatgtaaaaccctaatgtaaatcagtgtgaataaaatcattttacagaaactctcaaattctctcttaacttacagtcggctcatcaatggctgctctgtgcttgaagaattatacaaacgtgatagtgatcattgcggtttggacgtgcaaagtgcatccatcaagcgacttgtggtttttaccaatcttccagattttcaagaggatcacgatcttatttattttgaaacaccaaatcttgtgtaccttgactattctagttatgtctccgaagattatcagtttactcatttggattctcttgttgaagtcagcctgagtctcaggttgtgggagtcaacttacgattatgattatgctgctgctgatgatgatgatgataatgatgatgatgatgatgatgatgatgatgatgatgatgatgatgatgaagataatggtggttattcgtctgatgatagcgatcctggttattcttctgatgatgaaccaaggacagctatatttggtgacgttacaaatctagttgcgggtataagccacattacgactctccacttgtctctcgattcccttgaggtcagtttttgctactgacttgttttttttttggtcatcagtttactgctagctaacaaagtctctcacttaatatataaatcaggcttttcatttctgctataaatccatgccaatgttcaacaacctccttactttatgtattgagagtaacaaggataaaggttggcaagtaatgccacttctcctcaagagttgtccaaatctacatactttagtcttaaaggtatcatcaatgtccttactacgattcttttctcttgatattaatttatacatgtcaattggtctgtggtttcagggtcttgtgcacagagtaacaaatagacgtggagatgcatgcgcttgcatccctaagaagcagaggaagattgtagagaatgaggaggcattatgttgtttatggacatgccaagtgaaggtgctagagattttagactatggaggttcatttcaagagctgcaacagataagacatttcttaggcaagttggaatgtcttgaaactgtgaaagttgttgttgacgacgcggataactacaagggtgcgtttttgcgagctagtctgctgactctccccagagtttcatcaaactgcagagtccaattcatctgaccttttcttctcttatctttctcgctttgatgtggcaatgtgaaagttacttgtaacatgaatatggttatatcattaaaatttatacaaaaaaggaagaaggaagcatccgctgtgttattgaatttatactgcaaataaggatcctaagaattggtcttctcagtctttgaatttgggtttacacgaggagaatctttccattttacatatgagaaaggagtgggtcttagaattgttaagtttggctaagactatagtggaatgacaatgactttgtgttcttgtaattgatcttattattctctgttcttttggacttaaaatgttgttttaagggctgttaaatagttggtgtcgaaacataggctgaatatggatgatatattatcttcaagttacaaatcgatggtaacatattttctcctatcaaaataagatgattttaactctagggagttagaactatgttatgtggctccttgtaagtcaccatgtagggtgtctagagagcaacaacaccagacatagaaaagagcaattagatcaaagactatatggttccttatacaggtaaagagcaattagaccaatttcgtgtacatagtaatgtaaaagagacaagaagatacgaaatacaaagagcaatctagctccaatggttctacttatactaagtttttttccaagtaaagagtcaacacggcttggccaattctgaaagctatacaaagagcaattttattttgaactgcaaaagtcattgtatggttaacatttgtccactgaccattgtgaatggtcttcgagcatttcccttccaatagatactcttgcttacggcggtatatggaaaaaataaccagtttaaatagaggatgagtaactttgaacatgtcgggctgaaaatataatgaaaatattttcatcctccaaggtaaagtttgcaactataaactacaaaaagctctattttcattgtcttagacttatgaaattaggtatacagtatcaactctataaattaataatgttgggacaataaaattttattaatttatagtgatattaatttattctataaaataatatttattaatttatcttataaattaatatttattaatttatcgcttaagttaataaatattaatttatagaaatatttacgtaaaatacaatgctatattctttttaaaatgtttcttaatttaattttctatatgctatattctgtatatctatgacattaacgtgaacataaacgtaaacatgaagcttaatccaatttctctttacacaaatcttagcaatgctttctcaaataaaagattttacaaaatcaactatgacagatcaaatacgcaaatagttatgtgagtaaaacagagatcatactcgttgtattttgaaaagagttgtaattgtagtttaaacaaaaatttcatacaaaaattagtcttaaaatatatacataagatctaggattattaatttataatattattaggactataaatttacatagggatttcaaaaaaatattattatattatcttatcgattttggttattttttacattggtccgatctgggaccagcaaaatttattaatttatcgtatttattaatttatcgagtattgagttatagagtttttactgtatgtgcacattatgtacgatcaatggatattacattcgtatgattaatcatgaaatttaagaagtatcgttcatcgtgttaagctctacatttgattcgtctgcttcttcttcgttagtcgccatgcctgaatcgtctacttcctcgttaatcatgatgtctgcttttgtgtttgtcgccgtgcctgactcatctacttccttgttcaccaccaagttttcgtcgtcaatgtccatcgaatttggaggaagaatgtgaaatcggagaaggaatgtgaaagaatcgcaagaaaatgagagagatttctcaaagaaaaagtagatttgagcagagagaagatgacgattacaggttgcttctcggcgattatggggttttaatttcgacgggaaatgacccgcccaatctttttagaatttacactttaaggccctcaagttttcttttgtttttaggtttgaacccccaagttttgttaaccccctaattcttagtttgattattgtgtgagagaagagaggacgtggagaatttgatacagattctgttacccccccccccccccatttgattaggacgtggagaatttgatacagattctgttccccccccccccatttgattactctgtccaacaactttactacaatattatctacctacatgcttgtgattttttctatcgaacttatatgtttgctttgagtaatgccatatatttcgtcaagattgtgtgtttttgccttgtaacatttgtggtgaaagaaagtctttgatacatgctgttgttttgtatatatgaaatttctgatgatgcggatgttgccataagagcattgcacagtaagctcactcttcatattatgtattttcagatcagaggagtgtaatttcactgtcaacaagtacaccaacgcatacacattatgtattctcatgaacaaagttgctcaacacaaggttgtgttgacgctggttatgcaactttaagggacatgggagtgttgttgcctcaggaaggcgtgtgatcaggtatttatagatggttgatcaggtgtttggagaccgaaattgctagagttggtttaaggttccgtgggagacattcacaaggaattcttcaagcttcaatcaagagatgttaactaaaatgcttgtccaaagtctagcaatggtgtaggcaagtacttgccaaattgaaggtacttgtgacccgacttgccttgtacaagtaattgaatttttggcttgttacttggcttgtcaaaacgagtacttggtctagcaagtacttttctagaatttgattacttgcaatttacttgacccgccttattacttgtctgaacctaaaatatttggaataaaaaaacctattttatacataatatttaaggttaatgagttttttaggagaaattttgaatttttagcttttatgggccaaatcaaaattataaatatattataataatttaagcattagtattttagtaacaagtatgaagtgctcaacaattaatgaggtaagtaatagaaaaaagttatatctagacctaattgttagtgatctcacaagtcacatgtacaaataaacgagtaattaacggggcaaatatcaaaacgaggcaagtaacgagtcatgtatcaaaaactattatgatacttgacttgtacttgcaagtaataaaataaacctacttgttacctggcttgcttatgacgcgtacttgaattttcaaggccagtacgagccgagtagcgagtaattgcctagtaccgagtacttgtgcctaggcctctatcaacggaaaatgatggactgtcgcaaaaggtggagatttgttggataatggccaaatcctggagtgcctctagataggagagagacttcaagtgtaaacgcaaagagagagactctgatacgctgggaaggctttgtttttcagtgaattaagttagtcttgtgtgaacggaaatctcactaattttaatacgatgatatcatcatgtctttaaggaacatggtgcagtagataaagaagagagaacaaagaatatgaaggtcaaaatttgcaaatggacaattcatgaatctgtaactgctttacattctatttcactgacctctatctggaaaagtggaattgttccaacatcataacagagccaaactgtcacttttagtcaaaacggaaatatagttgcttggagttgttccaacatcaaagaaatacaaactgccactttacgactgagatttggggatcatgttttcccaagagtttccgctccattctaacatcacagtgattctttatcacacccttttttggacagaaggttcttcactctgctggattgatttctacatcattaagcgcttcactgctttctttaccattttgtctgagaatgttttttctgtgagaccaagttaaaggtttgagtttctcgatcaaactgtgaaaatacaatatataatcaccattaccattcacaggaacatgattcgtggacactcgtttcagaatcgttctgcttctataaacaggagtatccctttgtcataacctgtacaagtaggtgaaatagcaacaaatttggtgaagataatttttaagaatattccacctttctctccacaaacacagagcaatagcaaacacataccagcagactgatatagaatgcatatttccaatgtactagaagtctggtacagctagattgagtaggtgtgtaccagtagcattttcaccatttctctacaaacctacaaaatacatttaagtcgaaaaaaataaaaaggcaatttgacaatgttcgcatgtcaaaccacaaatttcaacttctagagaaaggctctaccttcactttgaatgtaataatcagacgagacccgtacaaaaatccttgtcttcccagttaggctcattgaatgatcttggatcctaattcatctttctgtgtattgcaacttgaaaaattcctgcaggtcctggtattaacatgagtgtataactgtcctcaagaaaatgatccagcaaggagtagaggtgaagcttcttataatgattcatgttactattataacatgcctttggattctgttgttgcgcgggcggttgcagggacctcgatggagatttgcgtttgcaaagaatcaccaaggtcaaaagcttcccattgctcttcttctgcttggaaattcatgtctctcttagattcatcagcacataccctccctctcgttaccaaatttacaccagaaactccacaatctcctgtgatttatgtcgtttacagttcttccagtgccaatccatataacagaggaatatcaaaatcatagcaactcacttggtctgggttcttgaaaattactcaaagaaataatacgtcacatggaagataacacatacgatttatgcacttgttcatggctaaatagcaacaagtcaagtgaagacatattattccagaatactaacacagagcaaaagctaacacacactaatatacaacgtatatttccattaaactcttagccataaactaatcgaatggtcacttgatactttggggagggtacaactaaattgagttagttgtccatacatgatcgaactaatagtattgtcactagaaacattaaggccaatttattttgtggcaacagaggagtaagattccaccagctgacagcatcacaggaagaaggaaaacccatacgtattatataactttcagaaacagaatgtaacgaagttcaatactatatggttccttgtacaggtaaagagcaattagaccaatttcatgtacatagtaatgtaaaagagacaagaagattcgaaacacaaagagcagtctataaagagtcaacacggcttgaccaatggttctacttatactaagttttcttttccaagtaaagagtcaacacggcttgactaattgtggcagctataaaaagagctatttttacctccaatgattgtagatatattcaagtttttttcaactaaagttgtcaacacagcaaagtagtatttcagggcttgaacgataccaatagtgaaagctatacatgggttgtgtttcatctagcttcagcttcactctttgcagctctaataatctcctgcaattatggatcccaatagattcataagcatgctcaaaatcaacatattatataaacttattgtcttttttttttgttgttgttgttataccttctatctggtagcaaaagtgtgtctttggttttctttcttttctcggaagcatcgactgcacctgcttgagaattcctactgctactttttcatctctacaatggaaaagcagaagaaaatcatatcaactgtgatctgaaaactctgaaaggcaagcttgtaatatagtttaccctgtggatagaagattcacattggcccaatgactacaagttgttgctctggcactatggcgtagtacagcctgatctggtatgtgagagtcatcaaaaatttcctgctttagtgagagatagttagcaggctcaaatcaatatctcataaactagtgcaaaatcattgtcattttgtgatacctttcttctggcagcgagagcctggctcttctttcttttcttaacatcaagagtaggggaatcaccatattcacgatccctatcttcaccacaatcaacaacaaattcggcacatgttgatccagacacttaggggagaatcctgcaaaacaatagagtgcaagtacttaaccaacaaaattctatctaatgcatataagtcacatattgtcttgcctttggaaaccgtaaagacaaaaccctccatgagattgttaagcatactactatctaggccaaattcgtcaagtacagaacagtatttactcatggagtttggtctcatgatctggatctttgtcacgttaaccctctctccgagcttttctacatgattaaccaaacagttggggttgctctcctggacaaaacaaaaataggtaagggcacgacagggaataagtagtaagatgattggtaattatacctttgaaatcatgattacacagaatctaggccgaggcatttcagagacaaaaacaccgggagaaattacacttttgaagctttccactgtgtctccttcattgatgctctcatgaaagcatgccaattctgtaacactagtaattgttggtgattttgaggatgatgcatcattattcaaaggaggcggtatgttcaaaggagacggtatgtcgttttcattatttttgttgctgggagtaactacaactttgggctcgggagctgccttttcgttgccacgatgtgacatacagtacaaggaatgttgtccgcactccagaaggtgtagcttccactcggatcccaagtgtttttcacagttgattagtctaagagttgtgtttcatggatattgttgattcctgcaccaacagatatccacgctgtagcgacggtcactcttccacttcatacagtcatcatccatggcacgatatgcctttggaggtgtcttaaaaaatagccagttgggggctttctcgggaaataggtctttaagctcccaaggaggtcttccgaagacattaacttcgccgccatagaaaggcacaccaacatcaagattcttattcttattaatcaactacaaaaagctctattttcattgtcttaaacttatgaaattaggtatatgtgtacattatgtacgatcaatggatattacattcgtataattaatcatgaaatttaagaagttaggtcacaaaatcatatattaattttcaaagacgaataaaatatacatatctaaaatctcataaaccttaaagaaaaatatccttatttaacccattaacttatgagatatttctctaaagtgacaacataagtagaaaatattcataaccatgtcgacaaataatattttctcacatatcatacaaaaacttcaccgatcatttttcttttgcagttttatgtttttctaatttacggttaagaagttagattacatagtcaagtatcaattctaaagaaagaacataagcatcatgagatgtcagaaaccttcaaagagtatattgatttttgtgtgttacaaagatatatacggctaactatttatacaagaggttagccctaatcatagaataagctt

SEQ ID NO: 1191 - DNA, 109367 bp, Arabidopsis thaliana
gaattcgacgacaaataaatggttacttgaattccctttagtgtcattgttgagcaaacccaaaaactatctccggttatgatactatttggggtgagagagagaattttaaggtactgcatgcgttggcttgagcttgtagagattataaaaaaaaaaaaaaaaaactaaaagatataaccattaaataaatggaaaaaactagattaacccaaataatgagattaattactagaatgtcttaaaaaatattggagttaaattggttattttttttttgtctaaatacccttttcttacgtgttgaaaataaaataaatgcaaaaataccctttaaaaataataccagcaattttataaaagtctatcgtttagttacgacagatttatttttattccgcagacttgtttaactgcgacagatttttttatggcatacttttttggtcgacagacattttataagatagtcatgacagatttataaattataacagatttaatttgactgacaaattttttatttatttaaccacagactttcatataaattgaaagatttatatttttgtggatgtttttttacgataagtgatgacagttttataattgttaaaaaaaaaattcatattgtaacagatttgttgtcaaaaaattaattactagaatgacgcctaacgataaccgatttttttaaggttatgatagacttattttatgttataacagatttttgtacttttataaaatatttgtcgtttgatggctaatttgttttctaaaatataatgttttgtgttatgacagacttgttttatgttgtgatagagaaatttattttacaataaatctgttgtttgatggctgatttaataaagaagaaaataaattgctggaatgaccttaaatatattttatgctacgacagatttgtaatttgaaatccttatggtgaccgatttttatttttctttttctatgattttttgtaatagaataatactaactgttataacagtttttgtttctttttagcttgttatgacagatttactaaaacaagttaccatatatttaattcgtagagaaataaatatcgagataccattagggtttttgttaaaaaaacgtagcctctctacaaaaaaccgtggcctcctttctcttttgtttaacgtgaaacttttttttaatttcttttttttgggttttttctcttgttcatctttttcttttgggataatctcttttagggttttggagcaatagaagtcatatgttattatgttgtcagattttgtttcttcttattgtgtgggcctcatttttttattttatttttgggtctcacgtttttttattttatttgtttttattttatttttacaaaataaaattaattttaaatgctaaaaatatcagaaaaaatcagaccaagggtttttggttactatacacaaaatttgtgtcaatctagttctctaatcaaatagagagttattctagttgttattaactacatttgtgtcaatttaggtaattttctgttaaataaatggtagaatttctgtcattcaccgtaatctaacaagttttctgtaaacttttatattttagtaattaaaaattataagaaaaattaaagaaaagttatactcaaagatgcgatcgtatatattaattactaaaattgcagtggttagtcaaataaactaaaaattacaacggtttataaaacaaaaccaaatgatttgtcaaataagccaaatattggaacggttcagttaaacagttgtaattttattgaaatatatattagtaactaaaaattataatttataaaattttcgccaagagacgtgactatagataattaaatgttataaagttttatagaataaaccaaagttacaatagtttgtccagtaaagtaaatattgcaataattcaactaaatggttataatagttcgtttatgaaaagttacgataaaaagttgcagccatagaaaaaatttattttggattgcaattttctaaaaaaactcaattgtaatatatttttgtagtttatatatattttcatcgaaagacggtgatataaagacacaatacacaatacaaatatatttattgagattgttatattatatagattttctttctatttagatttgagtgatatatcttacatctagaaaatggccaaaatcaacctcaactctatctatagagtctttttagaaccctaactcttatttcttttattcacacaattttaattacaaacctcaattatgtaactgttagccaacctcccttcaccgcctcgtgacttccttggattctcgatctgatatttacaatgatccctctgatagccctttcgtcgtgtcaatttcaacgtctttgctttgaattagctgaagatatatattgttttttgccctaaggctttaatttgtttattgttaggtcggggcggtcgatgaagcaaacaattatggaaaaatgtagatgttagatctctcgaatcctaacagagagaatctgctaacaagaaaggcaaaatatctcttatatatagacagatgctacaccaagagcttgaagtcaatatgatcgaactgatgaaactaaggaagcagaataaacaagcattaaagatatgtcaaagaagtggaaattgtgtcatgtttctcataaattattggggttgaatccccactccttcaccttaattatcacttcttaagtttcttaaacgtagatgtacagtactccctccgttttatttcgaatgtcgttttaattttcaaattttattttaaaataagtcgttttgtatttttaatgtagatatttggtaagattttcagttttatccttactatttcaatgtattgtccaatgaaaaaaatagtatgatatatatattaatcaaaagtaaagcaataatttaattgttttcttaatatgcttgaagaaatcttaaactacatttataatgaaagggaggagtagctactttctagtttcatactatttaagtatcaacaataatggatgtgatcccccaaaaaagtatcatcaataatagaacgaatgatagagggaaaattgcattataaaagtcttgttttcttattgatttgggattctattattttactatcaaaagcattgtatttttcatttttttaatcgagagtgaaacatgcatccatcttggagtgtttttaatgggactctggctctgtcgtttatcacttccaaacttaaaaacaaaaataaagaattaacacaaaaatccttttctatgggtagttacaactatctttcatcttttatgtttgtttcgacaaaattcctttgtttcataaaaagtgttgttttggtatttcttttttcacacatttttttatgaaacacagggacaaaactgaaatttagtataaaatctgtatcaaaaaaacctaaacgacatttttgtcaattgaaaaatacaatgcatttaatatacaaacctttatatagattttttcttatttaaaaatgtgggatatttaattttggtaagtttagttaataaggataagtatatagaattaaaagtgtttgacaagatggatagtagaatttaataaatgaaaacaataaaaaagatgagaataattgtaggcttgatatacataagcatcaaaactctcttttaatatataagaggatacattatgagtcggaaataaaagtgaaataaaatgtttaatatcactaaattaagatatcaaaggaaaaaaaaaacatgatgaaatagctattttgatcatatttctagaaataaaaagacatatatctgttcataataatcatatggactatatatgggataaataattttaaactaaaaacatagataacgttttatctgtttctaaaaattgttaaggaaggttcttttcattttgttaattatggaaatttcgttatccaaaacaaaaaaaatcaatcaatctagaaaataataagtagagaagaagggagaaggaggaagcaaagagatagtggcgtgttcccctctccatattcagccgccactttttctcttcttctcctctaatctcgttcttgtatatatatatatatatatataaacacattaccataaacttatactctcttttgatccatctattgattttgattctctgttttatccggaagtctaaattggatggtgataaagggaatgcgtgttggtaagtacgagcttgggaggacactcggagagggaaattccgcaaaagttaaatttgctatagatactcttaccggcgaatcattcgccatcaaaatcatcgagaagtcgtgtatcacacgtcttaacgtctcttttcaggtttccattttcgatctttatttctctttttggttaacggtggattttaactcttacctactcttgatttttttttgtgatttttatagattaagagagagattcgaacactcaaagttttgaagcatccaaacattgtccgattacatgaggtaataatactacttgtaatgcttcattttatgtagaaactcaattactgctcgaggcaatatgaattcgattcaaattttggtatcagatttttgagatatactttgattaaacgataataatgttttgatgaaagaccaaacattaaacctatgaaagtttttttgttagcttgcgtagaacggtagaagtatattaaaaagttaaccgtcattttggtaaattaatatattatttttcgttttgtttttttgtaactagttttattcgtgaccacgcaattgcctcttcacgttgcttattagccctacgtaacgtatacaataattattttcaaatactttgtcctcctgactaattcattggcagtcgacaatagatgtgatgaccatgacctattcaattatgaggtaggtcccaaaaaatcgacccatttggggtaatgaccatggcaatgcaatcatcatcacaatttccttatcgttgggattaaattccaatctttttcatgcttacctcataagcgataactgttaaatcttactcaaaactcgttttctacatttcaattacgtgaacacactttaatattttcaaatggtatttgctggaatgatagtggttgacttcaaaaaatttcaaaatcagaatgtctacattgacgattacttatcttgcaagcaaccaataaggtttggattttgaattaacggagacttggtcctcgtttttttttttgacaatggaattttattttttagtgtagatatatcacgtttgttcttcctaatttaggattctcctatctctttcaaaaacatccctaaaggcctaagcagattataatatccttgatatgcacaattctttattgttcacttgtaggtcttggctagcaaaaccaagatttacatggttctggaatgtgtcactggaggagacttatttgacagaattgtaagattcctattagctccggtgacggttttgttagttagcaagaggttggtttttatataccaatctttatagtctaaaaatatgctctgatgtcttattaggtctcgaaaggaaagctttcggaaacacaaggacgaaaaatgtttcagcagttgattgatggagtcagctattgtcataacaagggcgtttttcacagggatctcaaggtttatgtttacaagttttcttgacccattaaagctttaaactttttctgtagtgattggccacatgttctgatatcattgtttcctgttttgcagctagagaatgttcttcttgatgcaaagggtcacattaagatcactgattttggccttagtgctctgtctcaacattatagggttcttaccatatattcaaaaccttgtatatacatcagcaaaacgtgtttcaaacttttgtttggttttgacatgataggaagatgggttgctacatacaacttgtggtagtcctaactatgtcgcgcctgaggttctagctaatgagggctatgatggtgcagcatcagatatatggtcatgtggagtaatcttgtatgttattcttacgggatgtctcccttttgatgatgcaaaccttgcagttatttgccggaaggtaccactcttttttctttccttttttcgattgtttagtttctgtttgaagaaacatactcaaaggttcttttcagatattcaaaggggatcccccaatacctagatggatatcactgggagctaaaactatgatcaagagaatgcttgatcctaatccagtcacgagggtgacaatcgcaggtataaaggctcatgattggtttaaacatgactacactccttcaaactacgatgacgacgatgatgtatacttgatccaagaagatgtaagaatctatttctatctcatcatgttggttcctatgaatttggatcaagatcgagcattagccttactcgaaaagtcttgtctttataggtttttatgatgaaggaatatgaagaagagaagagccctgattctccaaccattatcaacgcttttcagttgattggaatgtcctcgtttctcgacctctcaggtttctttgagacagaggtaacctaaccatacattcttgtccacgtttactctgtttcaagattgtcctttgctctcaataaacgtttgttactttgttcactgatcagaaattatcagagaggcagataagattcacgtcaaatagtttagctaaagatttgttggagaacatcgaaacgattttcacggagatgggcttttgtttacagaagaaacatgcaaaggtgagatcttttgaatcttttgctctcttctttctcttgtatgctacatagcttgaggttttgtagttaagtaatttaagtgtttcttgaactgatgttgcttcagttaaaagcaatcaaagaagaaagcactcaaaaaaggcaatgcggtttatcggtaacggctgaggttttcgagataagtccgtccctgaatgtggttgaactaagaaaatcacatggcgattcgtctctatataaacaggtaatgatgcactcttgtaacattagttgatctttttattcaatcttgacccaaaataacttatggttttcggttgatgcagttgtacgagcgattattgaatgagctgggctcatcatcacaagtacaggagcttttagcgtagccaatagcagaaattatgtcagcctattctaaaatatttgaatccgggatgctagagacattttcaatgttcttgatcactggatctatgtacaaaaaactatatttttttgtgtatatttttagttagttcattagcttagttcaggaccggtcctgctcttgtaacacagcttctttaaattcatgtacctggctccttatgaagatgctcatagcagcaattcattttttaaggtggtaattacatcagtatactccctccgtttcataatataagttgttttagatcaaattttttgttttactttataagttgttttcaagtttctataaaaattatagggaaaaatgttatttaatacctcaacttacaaaaaatggccaaattaaccgtgaactcgtgaaatggccgttttaactctcaacaaaaagttgacttctgttttaacctttaagtttgcgttgactcggcctaattaaccaccgttaaaaatccttctaacagcgtaattgacagccgttttagtccgttaagcatctgttactatagtcttacgacgccgttttcgtgctaaagagaaatcaaaatcgagaatataatttctcaaaacaaaatcaattaccctaaacccaaatcgaaacctaatcctgcccccaaaatcaaaatcgaaaccctaattgcttcaattcgttttctgaaatgccattagttagaaagaatggcgtcgttatgatgattggatctccaatgcttcacgaatcagagaatttggtgggagatggagttgaagcactaccgcgaggagaaagagatgaaattggagaagaagttgtgggtgaaacgaatgtggtatctgagtcttgtggcggagaagagggagcacaagatgcagctaaagcaacgccggaaggagaagcagatcgaattggagaagaagctcgaggtcaagcgaatgtagtatcaaatgttgatgtggcagatgtggccgaagttcgttctccacttaggcgaagtaaacgaaggcaaatcagattggaagaagaagctcacgatgcagttgaaccaatgccggaaggagaagcaaatcaaattggagaagaagctcgaggtcagtccgttgatgtgggaaatgcaaccgcagtttgttctccacttaggcgaagtaaacgaaggcaaaatagattggaagaggaagctgatgttgcagttgaagaatcaactcgtcgtgaaattggacaagaggaagaggaagctttaggtgaaacgtcttgtggcggagaagaggaagctcacgaggaagctcacattgaatcaggcgttgaagttcgtgctccacttagacgaagtaaacgaaggagaatcagagatgaagaagaggaggatttagaggctgaagttcctgctcttgatgaagacgatgactgtgcagtccaaggagatgaagactgcgatgaggttgatgatgcagtagatactaatagagaagaagatgatactgctggattaggtgtcgaagaagatggtaacttagacatggaaagagattttccagaggctaatggagaagaagaagctagtgacaatgacggcggagatgatatatgggatgaagacaagattccagatcctttgtcctctgacgatgaagatgatgatagagtagaggcagctcgaaatgatcgtcgtatcaccttaacggatgttctattgatagcacaaaacgtcgtcgtattgatagcacaaaacgtcgtcgtatcaccttaacggatgttctataacggctgtcaattacgctgttagaaggatttttaacggtggttaattaggccgagtcaacgcaaacttaaaggttaaaacagaagtcaactttttgttgagagttaaaacggccatttcacgagttcacggttaatttggccattttttgttagttgaggtattaaataacatttttcccaaaaattatatattattttaatattttatttaatatttatattctgtagtctttattatgattggttgaactttttaaaaataaatatttttaatctgcttgtttttaactgtcatatatatattaagatgtcaaaaataaccggaaatatttgaaatatggcttatagaaaagttgcgtaggtcctatagggacagagtgtagcacaatgtggacgacattttcagtttttttcttcaaacggctatatatgatctaaaacatggtggagcttcgctgtcaaatctctctgttttttttaataatcaaactaatattatactttttcaaataagcaaataattacgagattagcctcgcactgaacttcaattctctctttccttttttccgttcgatgagagcttaagctctgccgcgttttcgttctccgatctttttccatttttatcagtttcttctcttccaaattagggtttttcttttcagtctttgggaatgattttgatgcggtgaaaaagttttttttttttgagggggaaggatttctgggtttgctcttagggttttgtcttttcaatcgccggagcctgaaataatccggcagatatggcgtctgaattgccgatgagccctcatttggagcagattcacggagaaatccgtgaccatttccgagccctcgcgtatgctttctcttaactatctcttcaatttttcattcgagtgtacgttatcgacaagactatagattttttgggaactagatttgttaggagattgaatttgagtttcacagacgagaaaataagagttgggatagtgaatctgaggcacaagtcttatgatttttttctttaaaagtgagattcaacattgatatgcaggaatggcttccagaggttggataagatcaaggattctagtagacaaagcaagcaactcgaagaacttgctgagaagatgagagactgtaaaaggtattcactttctccaagatatcagtttttttactactcgaactttccggtgttagatgagggattgaatttttcatgagaactaaaatgttgtaagtctattggtgattatgtttttgcattgtgggaaaatgtattatttgagatggatgagatgtgtaatcatgagtaggaaagagttttttttggtgatcaacgatttttaaatctctgcgcttcacgttaggttggttaaggagtttgatcgtgaactcaaagatggggaagctcgaaattctcctcaagtaaataagcaattgaatgatgagaaacaatctatggtgagtttacttcttattacttataataatctgtgtgttgatgaaatctatggaggacatgatactttttaagcttcgtgttagtgtgatatttctgaagttagtattggaatataaagttcagctttctcgcctcacttgagttttgggtcaccatcgaaaagcatgttgattcagtggtatatcaatgtagattctgagtgtttttgtgtgaatctctcgatttatctaccttaatttctcgctagcatctggttgttatgtcttttcaaaatctgcttgttgatatttccagtgatttatgtgacagattaaggaactcaactcttatgttgcactaagaaaaacgtaagtacgtctacttccaaggagcttcattgtctgtccctatatttgattttctcatataccaatccttttagcaaatgtatgtttttttatatagagatatagatcggtatgtgttaatacattcccatttgttgtgtgacttcaggtacttgaatacactcggcaacaagaaagttgaactttttgatactggagctggagtcagcggtgaacccacagctgaagaaaacgtccaaatggcttcaagtgagtctgtctaaatatgtcatctattcagttgattttcttctgcaaccagaaaaagtccaaaatttgacacattggaagcttaaactgttttctatatatcagaatgggtaggatagttagtcctgcacttttggctaatggtttggtatcatttgatgtgtttcagtaagtttctagtggagagacatatatgacagtaactgtttacctactttaccttttaatgtgtttatgttggtggtttgatgttagtaaatttctagtggaggatcatatgtggctggatttctaatatctacatgtgttccaagaataattgtccttgaactatcctgtggaaaaagtgtggaactttatgttgactcttgttttatcgtttatatatatgtagcaatgtcaaaccaagagcttgtcgatgctggaatgaaaaggatggacgagactgaccaggctattgaacgttctaaacaggtaagttacagaaagaagtatatctcactcagtctttgatgctatgtctctagtaacatccagtgtttctttccaggttgtgcatcagacactcgaagttggcactcaaactgcatctaacttaaagggacaggtaacacaaagcattcaccatctcttctcgatattcttatcaggtgtagttccaaatatgctgacctaaatattttcagacggatcaaatgggccgcgttgtaaacgacctagacacaattcagttctctcttaagaaagcttcgcagctggtgaaagagataggaagacaggtttgtatgatctctcacaggacataagattctaagacactgcaaaagctaaaattgtgtctaactattatcaccgtttcctttcaacctcaattctttcttgtcacaggtagctacagataaatgcataatggcgttcctgtttctgattgtctgtggtgttatagctataatcattgtgaaggtaaccattgcactctccaacttttctcattacggcccaaataaagctatgattccttaagcaagttttaacactgcttaaataaaaacacagatcgtgaacccaaacaacaaagacatcagagacatccctggactagctcctccagcgcaatcgagaaagctcttgtacttcagagaatagccttttggcagggccgagagggaaggtttggtgcatattacacttgctgttgcgtgtgtgttcattctttcatgaaagagggcttgtttatgtcatttaaatttgagctttcattagagttttgtatcatatatcatcattctttaacttatgaccacatgttgtataattttataccaagttcaatatattttataagatccgttttattgtccaagacatctaaggagccagtggtaatcatattatagtaatagatatgttctacccttagttttttgaacattataatgatccacaaatttgtaaaatcagttaaacaaaatttatagtatttccagctaatatagaaagggaaaatatcaaatacagggccacacactcagaagtcagaactgtttggatcataaagagtagaccaaggccgggtccggagctacgctgtctagtgaaaacatttataactttcagagaccctacaaataattttgcgtttcttttttttgtagaactaacaatgttaagtaatccgaggtaaattctatttaaaactgtttgggttccaaaagagataaaagacattttcacctgagaagtgaaacaacataacggtcattctcagactgccgtgtggtttccaagctgagtccggccaatatgcgacaaccgcgacgttatcagaggggcttcttcatcgttaagctccaatcctctggggctccccccatctgacgaattcttctccttccagtcctgctcaattatttggaccaaatccttatataaatatacataggtgatgcaacataagattaggttttactttggtgactacaattccaggaacgacaaaccgagttggacctggattgaacacccttttctactctccagagctagtgaatgaacaagtaaaattcagtaaacagattaatggcctgtaccttcgtgattcgatctgggaggctgtcagtggttggttgaatcgcttttacatccttgatttttatgtaattgtacattacaacaccacagagcgctgcaccaaacacatatgataaggagaagatagttaacaatgcacaacttttagagctcatccaattactttttgtgatagaagaaacaaacctatagcatatccagttatattcagcccagtgattgtggactcaggaaatatgacagtggagagggctatgagaatccagtctttgagaaccccagcaacccggattgttacagcgcctgttcttccgattactaagaatatggagaagtttaaggcaagtgcgcagagagcgtttgagaaaaagatccagaagttgaattggatctgcgagacatctatatttggtttctccagcacataccaaggcaaggacaggaaaacaaagctgcacaaaatcaagaaagattcctaagtttaatgtgcactagagtagattctttgcatctagctagaaataatacatggtcttaataagcatgcagtgatgcaacttagtaaaatataagacaacacgaacacgaggtcacatcaagtcaacgaactgacgaagtattaggacaagtattcatcttaagctgaaatttaaataagaaaggtttgagctgtgtcaggactgcgtacctgcatggagctatatagtataagctggtgactgggttcaacgtcaagccctttttctgaagaagaacttgagttagcaccagtctaagtgcttcagcaaatattcccatgacctggtagaccgtgccgattacattgaaattaatttccccataggaggatactacaactccaacactcaccagcaccatgttcatgaacacgtcacaccttgctttgtccgtgccacaaacaacggccataagaaatgttgctaccggcactgtcattccatattcatgtgttaaaaagctttgcaacatgatcagagttcagaaactaatataggttttgagccaaaaaagaatttgtgttttcacatacttagtgctttgagcatctgtatgaaagcaactgaaatgtgcaaatatgcagtatttccaaacctgtaaaaaggagtaaaagaatactcaagaaacaattcagacagcaggtatgacgcaatgtcaaaactcagaatatgaaatttacagtactaggagtccaggacagagagcatctataaacctaatatgtggcacaagtatatggaccaaagacttaccagagactggatgcaaagaatgcgcttataggcaccacacatgtcacatatctggagtccagaaaacatgttaagaaaagaaagagattatgaaaagtacagatgccaaaaaaatgaagtaaagaatacagtaagctggcttacatttcgaaagtcattttaacaggagagacaacctacatcacaaaaaagatacttattacctacctattataaggagtactcagcataagacgagcatgtagcatactccaaacaagtggacaaatgtaacattcacttaaatggaagtgtaatcgctgtaccttgaatacccgaataagaaggaaagccacgaatccagaaaatcccatatggatcattgtcaatgttataggaagtggaaaattgaagtatttcggagatagaacccactgcaagagaaatccaaaaaacgatagatactaattaaactcagcctctataatcagtaacaaagtctatgaaatagtactactctacagcacaaagatcttcctctatggtttcatttcatatacacaacattcgtatctaaactcaaatcctagtttatacaagctacaacatgcaaaaaatccacaaactatatgaagatctagataaacaaataaagtagaatctgcaatcaccttgttgtatagtataactccagaagaaagaataatgtagattagtaagtagatatatgtaagtacaagcgtcttgtttatcatcttcgccatttttttctcctctccgcaatcaccgtagatgcagttttctttcgatagttacaatatagggaagtataatcccacacacaacataagatccagagattccataaacgaaatctgaaatccaaaacaaaatcaatcggaaacttcagatttaagtttacacacacaaaaacccccaaaaatcctaaaatcactaaaggagaaatcgatagatcacaaatcagatccagagaaaccattacctcgaaatgagaagccgaaatgcgaatctcggctttgggaacaaacgttcgaatctagtttaacatagcgagagggatcagatacttcaaccaccgttgatgaagaaacttttccgataactccaagaagttttgccgatgataaatgcgtaagagcttcaatggcgaatcgatgaagcaggtgaagtgagtcagaaacttggagagagctttgctactgtgtgcatataatgctctctgcatatcggaagaagagagagatttattattaagaaaagaatattaaataagagaaataatgaaattggtgaaactaacgacggtggagatgaatttgcaggacgtaaatctttgatctaacggttatggttttatgtccttgacgggggacttacttcagcatatttttaaattagttatgaaataattagaattaatgggcccattatgttccaaaactatatatctcaacttttcaaaatcaaaattatatacgtatttaatacgaaatattattagataataccgtataatacaaatttgatgcgtgcattgacgaggacttaaatgttatttttaaaaagtatcaaacaaaaaattgaaaaaaaaaaaaaatcattttattgatgtttcaatttggattagattctgttataataaattttttgttgtctcgcacagtaaattctgtttcaatttggagtaaattctgttactttttatttagtttgatgtgtattgcaaattcctattataatctcactaacaacagtgagtaaattctgttaatttttatatatcttgatgtgtattgcaaattcctattataatctctgaattaaaatgtagtatcagaatttagaaacgagttttttttttttttaactcatgactttaccttgaacaaacaaaatttggtgcttatttattttgatgtgtattgcaaactacatcacaaaatacataaaacataataatgataaaatatagacatacacaaatgtcgaaaagtgggtcttaaaatgaagatttaatgagataaggtcccaaaaaattacataaatatacttcaaagtgaataatacactttgataatcatcatgaagtagtcgtagatgagatatgggggattgaatatttggtcaataaggattccaatgtggagtctgaggagaggaacgagaagagtttaaaagaggttgaagtgccttcaccacaatgctcatgtctggtctaaaatctggatcataatgcacacagcgtgcagacaccgcagctagctgatcattgtatcagaccatatgcatatagcaaatgaaatcaggctcatgaaatgtttcagttgtcagagagatgaatgcggacaacaaatatcgctactttgattctaatgccagcagataaactagtcttctaagttaaatcatttttgctgcaatgaaacaatgtgaggaaaacaatgttatgcgattaataccttggcaacagctttgggagggtactctccaagtagtcttgcatcaacgcattgcttcactttgtctttgcttagtttaggggttgcctgagacaacacacaacatgtttatcattgagcagcaatatttcacttttatgataaaagttttatccatttgcacaaattccagctactttcttgttaactttaacgtcctaagttacatttctatatgcctaagaagggttttaatttactccaagatttcttgaagttttttttacttatttttacagactgatcttaaaagcttctcttgtcattgcaagcaaaccattatcagaaacaaagaagattacgcttaacaatacccatgtcactaaattttgttgtccacgcggtaaggtacgatctactggtttacgacccgtaaggagctccaacagaacaacgccaaaactgtagacatcgctctttgtggtcaatattcctgtcattgcatgtctgaaataaataactcaaaatgttcaaagaagacgtctatatatagcctctagattaatctgaatcaaacaaactgttcaagatagagaacatatttaaaaggaattactctggacagtgagaacgagatgctcctagtgccatacgacatgagtgaaggcgaccagccatgttaggggcttgatcatacaaatcaaaatcaccaattttggcaatatcatcatcaaacagaagtatgttgctagctttgatatctcggtggataacctgagggttcaccttcttatgcaagtactcaagtcctctggctgcaccaagagctattttgactcttcgttgccacgtcataacaggaccttgtagtgctcctatgacacctgtttgacctgcaccaaagaaacaccacattgcatagttttttccctcttgtatgttagtttttattgagtgagtgatccggtatccgagcaatggtttacgttaaccacactcaccgtgaagaacatcatgaagagttccataagtggcaaattcataagcaagaacacggagagggccatcaacacaataggccataagtgctacaacattttcgtggtgcagtcttgaaaccattgatacctgttaaagttttctatatcataaaacagaacattttccaaaggagtggttttgatgctggaccatttaaacaaatgatccatatatacggtctaagctaaggttagtaaaaactgaaatgatgtactttaattttagtatctacctgggaaagaaattcttgatctggctgcttagtagggtaaagtttcttgatggcagcttctttaccgcttttaagaacaccgtaaaacactcttccatatgaacctttaccgactaatacctctgaactaaagttctcggttatatcttccagttcatccactggaatggctggtacagcgataggctgcatgttaactactggttggttcattggtggatcagctctttgatggtggcgtccattgtaacctttacaacgattcaattcctattaacttacttagaagccaaaaactggacaatataagaaaaacaaagacaagtggtgcagttgaaatatgtgagctacctattgagttatgtgcttgacttggtccggtgtcagcaggattacgaacatcctcactcccacaccagccaaaacagctcattatattacacccttttctcacacgagctaacttaactgtaatagtacagaagacaaaatgtgacaaaaggtataaaaaaagggtttgatagcaccttaagcttctatctcctacttatgaaagtgtaagataatatagacaacaaacagttttgaaaacaagatttgcctatctaagacaaagagaagagagtaaaatggtaagatcaatgatcttatctctctttattactcaagcaattaaattgtcaaacacgaacaactgagacattatgttccctaaacctagaattttcataagtcaacgagatataacatagggatacggatttcaaacatgaaaagttagaaacaatcaactcctttctaaccctcgaaaggaagatcctttttgaaaaggttgtttgatatttaagcaaagtaccaaaagggaaactcgcaacagaggaagaagaagcataaggtttaccttttgctacaagaaaaaactaggaaaggagagaaagagaaagagagaacttgaaactctctattgggagtcgaatctttcatggttgtttaccattttagatgagaattttgaaaatgtcttaatgatcgtcaaccactttttaaataactagatgaccattgttgccttgttgctattttacttggaacaagtctaatatgagtcaaatacttaaaatacagcttcagtgaatcacattcaaattcccccaggcagccaaagcactgaaacagaggagatctctagatttctctaggcgccgtcgcatcgcatagcaacatgtattgcaaattcctatgatctgtagcaaaaacatcatctcaatgaaaatgtagtatcagaatttagtaatgagttttctgaattcacaggaaaacataaaatatattgatatagaggagagacatacacatgtcttgaaaagtgggacttgagaatgaagagttaatgagataaggtcccataaatttacacaatacagaaccaaaatgaataatacacatttgatgaatcatcatgatcagaagatgagatatgggggattgaatatttgatcagtaggggttcctatgtggagtctgcggagcagaacgaggagggtttaaaagaggttgaagtgccttcaccacaatgctcatgtttggtctgaaatttgcctcatattgcacacagagtgcagccactgcagctagctgatcattatatcacaccatatggcaaataaaatcagactcatgaaatgtttcaatcatgtagatgaatgcgcttatcacttgttttgtttcgctacgttggttctaatgtcagcactcacaagataaactggtcttttaagttatacacttaagttaaatcttttacgcattattgaaacaatgagaggaaagcaattttgagattaataccttgccaacagctttgggagggtactctccgagtagtcttgcatcaacgcattgcttcactttgtcttcacttagtttaggggttgcctgagacgacaacacacaacatctttattactgagcaaccgtattatctcatttctaggaaacatttagagtcacattaatctattcgtacaaaattctggctttttccagcgtcttcagttgttataacatcccaagtttcaattctataggcctaattatggagggctttttcttccaagttcttttgaggttttgacccaatttttgtaattttcaacagactaaatgagtttattataaatttggtcttcttaaaagcctctcttatcgatgcggcaaaccagaattagaagcagagaagatcgcactaaacatacccatgtcactagactttgttgtccacgcggtaaggtatgatcgactggtttacgaccagttaggagctccagcagaacaacgccaaaactgtacacatcgctctttgagctcaacgttcctgtcattgcatatctgaaatacattacacaaaaaggtgtaagcatagattcgtcaaagatgcaatagacacataagggtaattaaaaagtgataagaggaacgaaatccatgtgaatgaaaaagtgactcataacattagagcatgagaaccaaacatttttgaatgaagacatgtaacccatggtttagtctgaatgaaagaaactgaaaaaaatcttttcaaggtaaagaaaatcttgaaaaagacgttactctggagcgtggtagccaaaggttcctagcacacgagttgagtgaaggcgagcagccatgtcaggggcttgatcagacagatcaaaatcaccaattttggcaacatcatcatcaaacagaagtacgttgctggatttgatgtctcggtggataacctgagggctcaccttctcatgcaagtactcaagtcctctggccgcaccaacggcgattttgactctctgttgccacgtcataacaggacctctaagtgctcctttggcaccttttttgcctgcaccaaagagtcaccacgtttcattagtttcttcctcctgtatcttactttctagatagttaagtattgagtgactaatccatatctaagcaacggttcacatttaatcactcaccatgaagagtatcatgaagagatcctttaggagcaaattcataagcaagaacacggagagggccatcaacacaatagcccataagtgcagtaacattgtcatgtcgcaatctcgaaaccattgatatctgttaaaagcttctacgtcagtaacaaaacaaaagtagacagaacattcccaagggagtggtttgatgctggactatttgcacataggacataagaactaggttaagctgtttttggcgatattgtacaagataaaaaatgcagtgatatactttatagtatctacctgggaaagaaattcttgatctggctgcttactagagtcaagtttcttgatggcagctgcaccaccgcttttaagaacaccataaaacactcttccataagaaccctcgccgatcaaggtctttgaaccatagttatcagttatatctctcagctcatccactggaatggctggtacagaaataggctgcatgggaataacaggctggttcatgggtggatcagctctttggtagtggcctccattgtaacctttataacaattaaaaatcccattaacttggatgccaaaggatggaaactaacagaaacactgacaagtaatacagttgaaataggaactgagctacctgctgggttatgcgctggccttgggccagtgtcagtagcgttgcgaaaatcctcactcccacaccaaccaaaacagctcattacacccttctctcacacgagctaactaaacttctaaaagagaaaagacaaaatgtcaacaaaacagtggtaagaaacaaggtttgagcagcttctgaaacttattgataacaaagagattgttcagacacagacctctaataaacagtttgcaccaaactataggcatgaagaatagacacagaaaaatgaacagctttgcagagtaagattctagtatctcctgtttatgaaactatatatataaacaaggtaaaatacaagcacaataaacagttttgcaaacacgattcggctatctaagcttaatattacaaggtaaaggcacttatgttaccaacaaaagctagcaaatagtttccaaaaagaaaagattggaagaatttctctaagatgtgcaaatgagtaagcttgtgcatttggctaatcatgccgtgtgcacgaacatgaacatattcagacacaaattttcagtaaatggtgttgcaaaacaagattttctcatagtaataaccaaaaagaagaaaactttcagagaacttcacagagtagttatcagtaaaaacaaaaataagaatagttataaggataaggtttttgagcatttacaaaaacagaattatgaaaaatcaaaaaaaattcacataaataaagccaaatatcagaagaagtacatagttcattgttcatctacatgatgaaccgatcaaaatctcaaacaccaacaacaagaaagagacattttatgttccgtagacctagacttttcacaagtcaacgaggttttaacctaggatacagatttcaaacttgaaaaacatgaaatcaattacgatattccctttaatcatcaaaatcaacctgaaattcgaaaccctcggttcttaaaaaagggtttttgacatttaaggaaagtaccaaaaagagaaactcgtaacagaggaagaagaaaaagcttttatttacctttttcgcttacaagaaaaactacggaagaaattctctgtccgattcgaattctctctgtcaagacttcgatggtggttttagagactttagacgacaatttgaaaaagtgttagtgttgatgatgaatgatcgtctttaacacttttaaaacaaatatcttaatgatcactgttgcgtactttacttacttggcaaaagtgttgaaatacctaaatacccctaacattgttttagaattacagtcatatccccaaaacaacctttagtattggaacggaagcgatttctctctcgtcgccgtcgtatcaaacctcgccgccgtagccgtcaacgcatctttcatttcgggtgagcctttcttcgttcttaaacttcgttactcattccgatttagcctcccagattccttgtttttcttgcttcaatttcattatttgtttcctggattcgttgtttagcttattgatcgatctgattgatctctaattgtaaaatcagcatcaccatctccacataatatagagtatgtagccaaaatgacaccatttgttatcgattccaacaaaatttggtgatttcatcatttaactaatgtttgaatgttcttagatacaacaatctctgtgttcatattcagctttacctgagtttgttgtgctcacagtgcatggttttggttgatagttgctaatatgtattcctttgactgatggatttgactacacaggaatggcgaacaagattgcaatgtttctctcggaagcaatgaacaacaatgctgtgataaacacgtgtctaggagtatcgtttgtggttttgggattgagatctgataaacagcagaagtatgttgaggccttagcagagcagaaggagtcactcttcaagtctaataaggcaatgaaactcaccatgtgggagtggaaacagcagctctttgctgaagctgcctctgcgggtaatgccgcggttgttcctttgtcgacgcttaaggccatctatggtgaagttaccaccacaaccaatcaatctggtgattactctcagccctctcttttgcttgtatcagcaattatctgtatagaattgttctcttagatgtttgtttattacatatctatacaaactagagtagtcatgtttgtctatatgtcacttgtagaacaaacaaatactttccctagatttaacaacagaagagggcttactggtttgagaatgtgtggttaggtatcactgtttgatacatcaatttacatctgtgcaagtacaaactaggctagattggtggggttgataaagaaaacctgacgcacgtattgaattcaaagagaaatggggttagaatcgatatgatttagagtgtaacatgaagggaaatagatatgaacatgattagaagccgcctttcggagattagctgtgtgttcactaactggttttatgttctttcttccaggtgacacagccaaggaagattctaaagtgtccactcccaagatcatgatatgagaggttgttaaatttttggtaggttcatttcacttcaaattattcactcggctaaagtaaagattagcatttagtctcatcatttgcataaattgcacttgtaaactagtttggcatctattgtctgttgttgtgatcttttttttttgtacctcctggtatggacaaagctcctaaaataaggtaagaccctcctttgggttgattcttaaggctttcactatgtaccattagtccaaaatttggagacgacaaagccttgtttgttgggtaaacttgaaaagaaaaatccaattttgttacatgaaatgaaaatttgataccatggtgattaacttgatccttagattaataacatcctttcatacatataaagagtaaataaaacatagatattagaatattattgaaaataaacacgagataaggaatatcagtttcaaatttatcatttgcaagttgaggatgatggttaggtaaaatggtcgaatttacaagtcggaccggatctgcaaatgccgaagcgactgtaatgcgggcaaatggcttgaccaggtcttaatggtaagcccttgtcattgagagtacattgaggctcgctcggcgttatattcttcgggtgatggtatttgcagttttgtttcagataacagtttccagttctaagataatagctgcactctggttcgcctggacgttctgggaatttttcttcagacatattttctcttctcctagtattatattgtttgcatgtacttgtatatctcttctacctataatctatatatattaccagaagaaaatctagcattgaatactaaaatgacatgttttgaagaaagatagtatcatctttaatatttattgttttagttataattgtatttaaacaaaattataatatcatgatgctatatttatattttttcatttaattattacttaattaatatttagtggattttattttgctaatattttagataaatacattttaatcatataaatcttcttaacataaactacatgtgacataagtcgttttcttaaaattagattattattattttgacagcaaaaactccacctttttttttgaatatttaaaaaaactccacctttattaagcatgttcctaaaattaaaatataaaagtaatgaatacaaaagttaaatatgaaaatcactaataatgtaatcggaggccggatcgatctggtgacccaatcacaaaacttgtgaaccattattcgatcaatcaatgtaccgtgtgagccaaggctctttatttctaacctaagaattttcagatttaggttttgaggcctattaagattaaatgaacggtattttggtaaatgataactatatctaaattgatcgatccctagacaactctctcaagaagaagtagaagaaatcaaaagtttgatcaaaccctatgatagaaaatgacgacgacaacgcaactggcacttccctatgatttgctattgggctgcattgcacacgtcttctagattgtactatcctaatctttccttagtctccaagagctttcgatctctcgtaacttcaccggagctttacaagacccgctctctcctaggccacgccgagagctgtctctatttgtgcttacggttccctcctgacactaatctaaccctcgttggtacactctctgccaaatacctaaccgaatgaagaagaataattcaagtggcaaaatttacgtcccaatcctaatccaaccatctcccacttctcctcctccacaatcgcattcctcgaatcatatggttaccgttgtaagatgtacaaaattggcggggatgtgccttcttcttctagagtctctgtcttggattggaagtctcacacatagaaccaaactttaagcatgcgggtggaccggagctcctcttcctccactgtaagtctacttgaggggaagatatatgtagcaggaggttgtgaagatcgcaattctgtggactgggtttaagggtttgatccaaagactcacacttggagctctgtgactagccctagcgcggtgatacggaatgaaagtgtagctgaacacaaaagcttgggacttggtggaaaattctacctctttggttatgactcagataagtctgcggtggtttacaatcccaaagaaggtagatggaacccggtaggattatatattaatataagtaatgaagtgtactatagttgttttgttgtgtgatagacaacgtcttgttctataggtttcacggactcttccattggtatgactataagggaaacttttggaagcaagtgaatggtcttgggccaggtaaagatgaagaccaatactaaagcgacgtcatctaaggcacaacggtcatcttcaaaaaagttggaagaaaacgacgaaacaaaaacatagcaaggaggtgatgaaagttgcttgtacggagaaagtagcgattctcgcagccctcgatacgtttgacaacgcaagatgatgacatctgtcctctctctagggttttttcgattaacccattctcttgtctataaatactacaatgttctaccgattccttttagcttcctttgcgttactactctgcttcctctgcttgtgagtttccctttgtaagtgcgattagtgttacattttaggtttttttctctaagttaggattttgttttgctttgttacggtttttgcctttcagtgtgtgattagtgaacaaatgaggagcttttagtcacgtattagggtttgttacggatttttgcttgtgcattttgctttttcagtgatcaatgaggagcttttagttaggttttagcgtttaatacatcctcctttagttttctcattatttggtaaagaagctatcacattggttctcgatctagccacatttctttttgtcattaaaatatcttcttttgctatttcttcgataaaaatgtcgtcttttttagggttctttgttctaagttgttgggatttgtttagctcttgctttggtatgttacgggttttgcttgtgcattgccttttatttttagtgtgattagtgaacggtgaggagcttcttcgttaggttttagagtttaatcctcctttactgtagtttgctcattctttagtatataagctatcacattggttctcgaatttgccacaaacgtctcatcgatctgtttttacttgcctctgaacaataaactctttgttcaaaccgcttcactttggatcccttcttagttaatgttctttccattttctctgttcacatttcattaatgtattttattgaccttggaaattttcagggttaagtaattgcagatggcactcccaccctatgatcccaatttcaaatttgcattctctcttggcacgattgcgaaacaccaagattacggtaaaattgccactctagaacatactcataaaagtacatagctactctgctttgcaagatgtgagtgaattgtggctgtagaactagtatgttgttgaatcaatgctttgcctcattgctttagttttagcctgaatattagtgcaagccaaaactttacccattaggttgattctgctcatattcttacaccaatgtcttaagttttgttcttgttggctatgataacttgtttgctatgataggttttagattctctcagatattgtgtgttagacccttaacgtgtcttgtcattgtacgttttatcatgttttcaaatcatattcttatcttggtaacatgcgaattacgttcagattttgattcatgtttccatttgtgtttttgtctttgcagatgaatctgcttctgctgctgttgtagcgcttgatctgataagctctgcacggtttgcacttaagctggatagtgtctatactgagtactctgctaagtatgtggtggacaatgctgctggctcacacagtgggcgcaagctcactgtcaaagactgtcttgagtttgccttaaacaaaggcggcataccgaaagcagaagattggccacgcttgggatctgtgataacgcccccatcatcgtataaacctgatctcgtttcgatgaaaggacaagtgattgagcctcagactattgaggaagcatgtgacatggtggtggatcaaccagtaggagcaaaattgcatgtgttcaagccacacattgaacttcaacaagacgcaagtgctataactgttagttaagattcaatataaaacgagagagagagagacatttgatctataatatttgtgtttttgtgtggtagggcatttactgtggcacgtcaggtgagccagccagctatgtcggacttagagatgccatcatcgttggagtcgagaagatccaagggaagtctattggaactgtgaaggtatggtacaagaagttcatatttctgaaagtggctatgagcaggtggtttcagttatactctccggatggcacacacacgggcataaagcgaacagattaccttgttgatttttgtgtcccacgcctatccatggattaagcaagaagatgttttttatcttcttaataaagtatctatctatctagagaacaatatgctactagtggaagacttttgtttaagaataatgtttcaggagactttttaagatatgttgtaagctcagaagttgatttctacttctaaagaatgttatatgttccaccaatttggcatttcagctcctgatcttagaccccttgaattgtttatgttttagttttgttaaagtcagtcctcgtttgcaggaagtagccatgatttgataacaaaacatgttattttgattgtcatatatgtgaataaaatccaaaactaataaataagcttttggagtcccaaattatggcttctgctctggattgttgttgtttgaactggactgtgagtgtaatcttcaggtctgattgttgttgttgcagaagccgaagaacttcagttttaacgatacgttcacctcaagtcctctctctttgaacaacagggcggtgtggctttggagctaaaccccaaataataaacaaaggatctttcaagatgttttatcaaggaatagaagtgtacaagttaaagggagagctattaccgttgggattgccttgctcatagaaacatttgaaaagagagacagcttcttctgccattattcctcctctgcacttgtatccttttcctctttgagcttcctcactacctaagtgaagcgacaaaatggaaccacatcccccaaatttatcatttggacatccataatacacttccttgataccttcaattaagagcagagtatatcacctctcatcagaaacaaaacagaacaaacaaactgtctaattcagcgtaaggattcataccgagaaacgataaggccgatgcacacattatgcaaggttcacatgttacataaagaacacatttcgagaatttctcagcgacttgtgaaggtgagagtccatctttctgccactgtccgacaagctgatcaattgcttccatctctgcatgtcttgtggcctgttcaaaccacattgtaacaaatgccttaatatagatgaataaaccgaagtaacaatcatacgtttctgagtcactcaataaaacaagatagagagaaacagtgaaaaaaatagactatccaataaatgaatgaagacagtagcttataactagaacatgtataacaaatcaagcttagttacttgtaaaggtttgaataattacattgcgtgtctcatttgttcggtttcgccctgaagcaatgaccttaccgtcctcaagaaaaacacatctggtccacacaaaccagaaagaaaacgcattagttatcctatatgacattaattgatacactggtacgaaacacaaattggtatgaagccaaagcaaaaaaatagagaccccacgggaacttcaagagcctccagagcaagtttagcctgcaggcatagggaaatcaactcaaaagcaacaaactaacttttgcagtattatagaaccaatactagttttacctgatgcagagcaaaacccatataattatgagaatcctcacaatggtcctcttccattaacttttatagttggcttggccagagaaagtaaataacaaaacctgatagcaaagattcaaaaatccctagttatatagctaagtagaggatcaggatactctttggcatatccattctaaagagaaatttctcaaagaaaactcttttttttttacttgcaatgttctcagtttatatgtgtctaccaaaactgaaactaaatagtaaaatacacgtaacagaggagtgtcaggaatacaactaatcacattatgctctcagggatgaatcagatcaaaaagaaaacaatgcttgtgaattcaacagaagagctatgaacataagagtcacaaacaccaaaaagaaaggtaatagaattggaactgtgattattctggatgaagcaaagaatcgaagtaagaaagaagagacaaaccaatgatctactcgcttactcagaccgcaacgatcaacaagcttcctcacaatcgtctctgagaataaaaaactaaaaatatcaatcctaaattttgtgaaaaacccaaaccatatgccagccaaaacgtcgtcgtttatggatataaaaagtttaaaagaaaatcatgatttattgaagagtgaagtaaaacataatttagggttttgttcaatttcggtttattcgggtccaattagtttccgtgtgtaaggccaaaccgaaccaaaccaaaaaaatcaattctttttatttacatttggtcagagagttcacaaatttaaaggttagatgccaaaacaacttctgatttttatatagacgtcaatatacacacatcatctaattcttggtggtaactctgtatcaattcaatagtacagatcatcaagtgacaaatatagagggaaagaagaatggtttcatcatatagtttgacactttggtatgtccaaaggatttgcctttttaccgaacaaaagatcaaacatgcaaatattgcatcaccataactatattccaaattaggtgaagaaatcacgccaaatcggcaagaagaataagaaaacaaacacatttgaaagtcatgaacaaggaaccaactctctctttgttttgtggtcgaagtaataaacgctttaaacatttctcatcgagcattatgcagatgaatgcagctacgaaatggggagaagatagtatcttcaagatacaatgccaagaaaacttatcgaaaaccaaaaaaaaagtgatcatttcatgccaatcgatcaagataccttagtagaatcagtcacaaatttccgtataaaaagggtaggacacaatgaaggagaaacaacctcaagaaacagctaaattgggttatgttgctcttacaggttttgacattgtgtaaccaagatcaatcagctttctaatcaacactttctcagcttttgcctacacaacaacacaaacaagaaacaaacaatgagtattatcgaataaagctagtccctttcacatttctataatacaatagctcaagtaaaaagaagaacctcaagcaagggattgtttttagggatgttgcaagccagtattatattgagaccagtcttcaacactagaacacagaaaaatacactgaatcatcaagaaagaaaaggatttgaaattgcaagaattgttataatcagagtctaacctaatctacgcgcaatgccagatccagtgttatcagatgttccaccaagtaccgatgtaacactcactgtattgctctgccatagaaacaaaaaaaaacatcaatttaaacagaaaccctaaaaattgctgctttagttagaatcaaggtttttactgagctcaccggtcgtgttgaagcggctgcgtacaaactcccaaatttggcggaattgcaaccgacccatacgtaaatctgtagttcgattaagtccaattttagttccgacgaagctcaaagacttgagaattaggttaaaaggaccaagctaagtttattggcgggaacctgtttcgcgagacggatgatctggaactggatagtaacatcatcgaaaacttcagtgaagcacgaaacttttacgccgtttccgtctctttctacgtcgtcggattctccgatttggtcggcgatgttcacctgagcaacggatcgaagaacttggtcgtattcagtctccattgtctcccaagtccgagaaaagtcaggtcctctttggctcttcttcttcttatgaaaatcaatttcactttttcatctccggttaaatctgatttggtacggttaaatacggtttagaccggctcaagtttttagatggtataaatctcaattgcgaaattcctctttctccgtcgttgctcttctccggcgatacgagcatctctgatccgagcaatttcacttcctgaattttccgaatctgatccctggttcgtttctcttctctctgtgttaaattcagcatccattgatctttcgtggggtcaaatagtagttatctttcttcttgcgcatgtatacgatttgggttctctatgcttgagatcgaaacagatctgtataatttgttatggatttaatcgcctatttcgtggatttcaaatgttgggttcagattttgatgttgcttttatccaatcataacgttttctgttgtgatttaagagcagttggattaatctgcttcgttcttgatatgtagatggatagtggaacgataaacattaagaaatgggtagtgatatatccagtctatattaactcaaagaaaactgtagctgagggaagaagaatcagtgtgagtaagtcatgtgagaacccgaattgcatcgagattagtgattgttgcaagcatttgaaactccctagtgccgtcgaggtaattcttcttcttctaattggggttataggagaatgttatgtctttaaacacagtctttgatttgagatattctggtatttgttagattgacaaagcatacccgcgagatttcatgcaagtagggagagtgagggtgcaattgaaaagagaagatggtactttactcaatccagccattacttcaagtaagacctctcatctgtactcctgattatatctccgatcgctgtagaacatttttgtcttttgtgttttcttttaatgttatcctagtgtgatcaatcagattaagctagaaaatggaatctgctttatttactttacttactcttgttgtgttgttaagatctctccttgttacccatgtttggacttcttcaatcttccgacaaatgttgcctgatactagcctgcttgttatcaaatctctggtcgctaatcttaactttctgctttgttttatcacatacaaccctgaatcaaactttttcattgataatttagtcatcatcaccaatttcaatctttgatctggaggctttatgagctgttccagggatccatacatttttcatttatggtcagtatcattattctcatgtggggaaacaagctgttatacattatgtatatttcaatcctatgcacatggaacttaccgcagcaattatctgagtctttagatatttatgtttgttatgatagtgttaccgaaatatcaccttatgctaagtttatctgattttcttcttcacaaattctttttcaattcattgtgctatatcttgaatttttttggttgttattgtcgcatatggtcacagcagactcagatacagaaataacctatatagaacttgtttatttcaagcattttttgacaaattgcaagacttcagatgcgtttgtgtttgtgtttgtgtttgtgtatgcgtacgcatttgatactgttgataaaaccattttccacattgctggttttttagacgtttgtgcttactttgaccttatatccttatcatgcccaggaaagtgtaattatatgaatatacttttggcttgctgctttgcatgctttgaacgaaaagagtccacctgtgagaacactgcaagttgtttcctacagacatatgatgatgtgctcttgtgttgatatatattttgcagggaagcatctgatgcagaaaattgcagagttggtaccaagacatccagagagagtaaagaagcaggaagctcagaaagcgaagaagcaggaacctcaggccacaacttcaacctctggaacttcttcaaagtcaggcaaaggtggcaagaagaagagataaaacaagccaagccctccctctctctcatcagattttatggcttttaatctctttaactttctgagaagaacacaaaggtgtttgcaggtgtaacaatgtttcaaatagaacatcgtctctttcaaccctaagctactttgttttcaccattctacttcttctttttggcatcatccattgacattagacaagaaagaatgcctaaaaagggaacataaagatattgtaattcaccacaattagtctcactaaccacagccataaccaaaatcgaaattacagaatcaaaagagttgagataaaacagatatctatagatcgttacacacaacaacataaatggtaattacctaatgaactaactaaaaccgtaattaactatgagatcgtgcttaatcaagctgtgagaactaactaaaacatgggcattccattgcttcttcgcttaagtattcacttatgtcgatcaataactcgtcgtcttcgttggttgaggaatgatcttgaagaggaacctcaagattgttgtcgtccttaaaaagaccaaacacgtcgtcgacatctaggttttcccaaaagctctgatcctcctctgtgaacatcggttgtgtttgtgtttcttggggaagacgcattccgttattctcttcctctgtttcacataagaggccgtcaacaaatccagaatcttcattcaccaagtaacgagattgatcagatgatgactcgctgccaacagagaaaacagggttttgatcaaaacaagtagtaacttgtgacgaaggctcaagtgaggagtaagagttctgatcaaaagaaacaatttttaaggaagacggagacaaggtactagggttttgaccaaaatcagaagcaatttgagaagacgaagaagaagacccactgtcgttgttagggttttgatcggatttagaaacagagtgtgatttttctttcttctcaagataatccatgagatgcttcttcgttctcatcaaacgatcttcgatgattcttaactcagacagatcgtcacaatcacggtaaagatcgggctcttcccaccaaaacttggctgattcagggttaatagtagtcttgggaggagacttgttgttgaggtaacagtcaacaatttcagaggcatgagagtagcccgagaatgaataaacgacatcggagttctcgtcaggagaagttacaaaaacggctatgttggctccggagagaaggcaaagatcagccgctttggagaagagtgtgggacggcgtttgctgcaagcgacggatcgttgttgtttagtcatgcgtttctcaatttcaatctttctttttgttcctcttttcctcattgtgcaatcagttacgttcgacgactgcattattagggtttgttttgtgtcttacagagagagataatggaatcgagagaaaaagagagagtgaaaagagagtagaggcaaagcacaaatatatagagattagataatactaatgtcggtattatcatgtgactcggtcaaacttaatttttttaatttttaccaaacaaacattttcattaagatcatcaagattattgcatctaatcacaactgttatcatcaaatatcaacacaaacactataaattcagaatcagattatgcatgagagaagagaaaagaagaagaaaaacaggatcgtacttggagagtaatacaacacaagcacccacatcctccttaaccaaaacaacaacaacaatatcagacaaacaaccataaacagtaagaagaaaagatcaaacacaaaaaaaaagctccaacaaagttgttgaagggtcagcagaggagagctcaagctcgaaccaaagtgtttgatgtaatgaagcagagaaggaagatgctgatggaaggatcaatgcatgagaaggtgctagcattaaaggcagacaacaacaaaaaaaatctagccctcataaaaagtttgcttctggatgcacgaatggagatgaaacaagaaaagcatataagcataaggttctgaagtcatctgatgagtcaaacattcacatcgctgtaggggatggaaatgagggacaggattgttgtttgcttcatgatgatagcatcagaagtgaagaaactatgaaatccaatgagcagtactctgaaaagggaaacaatgattttggtgaaggtgatgttgataacaatgacaagactgataagagatttcaagagctgaatgtgctagcattgtcgatagaggagcgtattcttaaggcataaagaactgtggcatggttgaacgaaaggagagccataaacacacagaaaagcagctggtttgaattaggtgttgttgtggacagataaagaaaggagaaggcaaatgcaagttgaatatcaaagtcatatctttatgatctttttggttcagtgtcttttgattttcctgcttagtatcttttaaaaactggtttggttccaaatgtttcatttgtatcttttgaaacctactcagttatgagcgacttaataccttcttggtgtgttgcatatcagagttttcgtacagaggatagcctgattcaatctgttgatgcgatctcttttgcatacctggagaacttactagacacaaaggccaaagctttatggtaattcaccacaagaaaatgtaaatgcttctattgttactaataagtttctgcaatttggaatatttgttatacttttgcgattacttttggatgcatacgaagcttttgcgttttacctcagtgacactgttaaattcaaaaattccaaacagtacagttaagtcttttgtcaataacgaaaaatatctctgatgaatggtctgataaaagcctttgtgtcaattcgatccaacatctacccctttgtgcttgaagaagtccttagcctctgcaatatcctgcaaccaaagaaacagataaaagacactaaattagcaaaaatattgaaggatgtcaacattagataacacgaatccgtatagagcaggatgaaaaataagaacaaggccgactatggcaaacaaagagctagtctcaaaagtaccttctgcagcagaactgcttcttgggggcaagtaggaaactgcatgagcccgactccaaccattaataggccatagcatccgagggatacaacaaagtagatcggtagctgtaagacagaccggcaataataccaaatcagaacagaatcctaatttcaaaaaagcaagaaaccaaaaaagaggacaaaattgtttgttactcaccaaccatgtatggcttcgaggaataattgcagcctgcaaaagaccaatccagaaggcagagatagccaccaacaggctcaagatctttactatatgcttcatttgtcctttaaagtaaaaaattatgtaaaagagtttaagttagctgcgaatagaaatgcatagacgatcacagcattctccaagaagttgtagagcatgtaaaagaaatcactcagcgagcctaataaacaaaatctagtaaatcaatgaactattcacaatttcgtagttgtcatgatcaacacatatattcctcaagagcaatattaacatcccatttaccccaccaaaattgatcacaagctcaaaccataagaaatataccaataatagctatcagttgtaactagatggagtctcaacaaagcaaatggattttcatgtttcagtgtgtaatgttcactaacacaaagacgcgcacataatttccaaacatcaaagtaaaactagaatctagcacaatctgaacagctcagtaacccagtttatacaactcaaaccatcatgctatatccagatcaatccgtactttttcgacaatgacctctgactgggataaacaaaataagaaattgaaaattatctgactccgaaatattgtaacatcaaaaaaaaacaatttccaattcctgagatgatcaagtccgaactgaagctacagaaccgatacaaaatcaatgagttccaacagttcctcagaccaaacgtcaagaactcaaagtctcagaccatacgaaacttaatcctaagaattgtgttagcttccaagaatccaaattcacaaatgctgatcatgtaacatcagaggaggtaagaaaaacaatcacaggaaccaaagcaatagcaaaaaaaatcccttacattcaggcaagaagcatttaaaaaacaagaattctaaagaacctgagctgcttaaacaggatttgaatcgaaagcatctgaatcgaaccgtgtaacaaaaaacaggattccaatttcatatcgctaccactgatgactgatcagtaaccatagaaacatttctagacgaaatttttatatggttccttaaaactacatagttctatcaccaaaaaccgaaaacagtagcacaaaagtttcctagaatcatctgaaagcttatactaaattagctaaatagtacaccagaacaaacacaaggtaaatcaccaaatcaagataaaaccatggcaaagaaatataaattcccaacaaaaccgatccgaaaggagatgttcctccaaaaaattatcgtaaatcgatacaacacacaaaataaagaggaggaatcgattatactcacagttaatcgatgagatcgtgatcgtctaagcgataaaatcagttatagaagattaatctgggtgtggaggtcacaagtactcgccgtcgacgacgatgaatcgacgatataacaaccggtgaatacggggaactcgtgaatatgcgaattcacttatacactaaaacgatgccgtatagtccccacttatgttcctccggtctaaatgtcattaatccacattttggttcacgctatatcggtttgatgcggtttcatatcggtttcattcggtttgatgcgatattccccttttgtcacttttaagttcggttttaaagtcacttttccatacagatgagagtattagcattttcataagctcaatacgtttttcaaatatatcaacttttacatttgattcggtttcaattcttgatcaaaagcaaggattgaagaattcggttctctattccaatccgactagtaaataaatcgtcgtactaaaccactctatatagaacaaacttctttttattaatacaaggcctacacctagtgcaccacatcatcaccatacgttacaaacgtaattatttttgtttacacgtacgtaaaaacattaatatcatacaatacttgcatgtacgttatatagtaggcttttgttattatcttttcaagagacctctgtgtgacgcagatagcctttctttgacggaagatcggcggtcttgaaaccctgtgggaacatctttttggcttcctcgtccgacacagcaggcgaaatcacaaccggttgatctggcttccagttaaccggagtggcgatcttgttattgtgcttggacgccatcaacaacgagtctaaagccctcaatacttcgtccatgttacgtcccgtggtcgacggatacaagaagctcaattttatctatatatcacaaatccaattaaccaataaaatcatacatgcaataatatatgaaattattaccttactgtcaggaccaacaatatgaagggcacgagacggtccgttctcaattggatcaatcatgttaagctgaggaatgatctctttgttcgggtcagcgattatcgggtaattcaccttgcttccgtgctatatcatacatatgtaacaaattaatcaaaaccaaaatatgatctctagctagtctggtatatgcatgcatgagatttaaattatacattaaaggcttcaatatctttgatccagtctttgtgtgactgtacatcgtcacaagacagaccaaggagcttcacgcctctcttatcgaactcatgagcgtatttggccatcgcaccaagctccgtggtgcacacgggtgtgaaatcccctgtgtgaccgtcaacaaaaatcaagaaaacaaaaaaggaattgcaacagaagtcaagaactcaagatctatatattaacatatataccgggatgagagaagaggacggtccaagaattggcgaagtagtcatgaagtttgaacttgtcatgtgtcgtctccacttctaggttcggcaccgtgtctcctagtgtgatccctggcattttaccttttatatttatatatagaaaaaactttctgtattgatttgatgtgaatggatgtagtagaagttgaagttgcgtcgaggaccgattaaatagagatcgcaagctggttaggttcgtggatcaaagtcagaaaaagagagagagagacttgatgatgttcaaattgaggtgcatgcaaaagagtatagcgtggcgttgttatgaattgggttcacgccacgtgtcttcgtataatcttcaaagttcaaataaaataactcttttgtttcgagaaaaaacttaaagctaaggcgacgcacgatgtctagagagactcaagtgtttgtatttatttttttacttgtgataatcgacaaaatctttgcgtttacacccaaacattgtcgtattaagtttcgtttgggccgagactatggttaatgggcccatgttttgagaaaaacggcgtcgttacctcaaaaagattagttcttcggacagacctaggaggatcagaagttcttaaacgaaaaagaagaagccgaaaacttctgtcggatctggaagctctctctttctctcgtttcctttctcgctcccgcttaacgcttctctttgcttaattattcttcgtcttcctctggtttatttcaaacgtctctttttggtttttgttgatcacggacgcttttctttggtacgtcctctgattccaatcacccacacacttggtttatgttgtcgaatttggattggttcaatctctttgtggtttgttgtttcttgtttcttgtattagttcttcgtgtctttgtatacgagtaattagcttgatttttttgttgagcaatttttctttcgtaccagtttaggatttcttgtgttcaaattatgaatctttaattctcatttctcagttatattcccagaattacaagttttctttgatgttgtataatcactgatcattgtgtttattgtcctgtgatatattatatagatggaggtgcaaagtctattaaactttgatttggatcctggtccagttgatcaatctatattggtgtggcaacatgagcatagatcagctgctatatgggaagatgaggtgtgttactagtttctcatttcatcttgtttcttgttttgcttccgttgttttaattatttcctttttaccgttatacttcacattcaggttcctcctcgtgaactgacatgtcggcacaagttattggggatgcgagattggcctctggatcctctcgtgtgtcaaaagttgatagagtttggtctatatggagtttacaaggttgcctttatacaacttgattatgctctgataacagctttggtggagagatggagacccgaaacgcatacttttcatcttcctgctggagagatcactgtgactttacaagatgtgaatattttgttgggtctacgtgtcgatggacctgcagtaactggtagtacaaaatacaactgggctgatttatgtgaggatttgcttggtcataggccaggtcccaaggatcttcatggttctcatgtgtccttagcgtggctgcgtgagaattttcggaatttacctgctgatcctgatgaagtgacgttgaagtgtcacactagagcttttgtattagctttgatgagtggttttctttatggagataagtctaaacatgatgtggctttgacgtttctccctctgctaagggactttgatgaagtggctaagcttagctggggtagtgctactctagcacttctctacagagagttgtgccgggcaagtaagaggactgtttctaccatatgtggccctcttgttctgctgcagttatgggcatgggaacgactgcatgttggtcgtccaggaagacttaaagatgttggtgcttcttatatggatggcatagatggtcctttaccagatccattaggctgtaggtaattgatatttgtcatattggttcagtttgtttttacaagttcaatttcaattatggtttgcttatgaaactgcttgaaatctaggtggagggcttctctgagtcataaagagaatcctcgtggaggactggacttttacagggaccagtttgaccagcagaaagatgagcaggtataataaaataatggcgtagatgaccgagctttgaccgttcagtttaggatagcagaggaagaattacagaccaactcctaatctagacaacttttgtttgtcattcaaggacttaatcttttcagtaatagaaatgtattttgtaacctcactgtgaccgatacttaattaagaaacacttacagtgtaagtactggtctcttatagcacttatagctaagatagtgtgtagtgatgggatatccaaaatggttttgtaatactagtttccagaagtcgtagattatcacttatcaggcaaaacttctttattttccatacacccatgaatattttatcaacagatctctgatacggtaaacgacgtgtgaatttcttttatgatgtggatataggttatatggcagccttacactccagatcttctagcaaagattcctctgatatgtgttagtggtgagaacatatggcgaactgttgcaccactgatttgttttgatgtggttgagtggcatcgtcctgatcgggtacttagacagtttggtcttcaccaaacaataccagcaccttgtgataatgaaaaagctcttcatgctattgacaaaagaggcaaatcagaatatgactggtcagcacgtcatagtcgacatattggattgtgggaggcacgtgtgtcatctgttgtatccggtgagccagagtgtagcccaatggactataatgatccttatatggagtggtaccgcagaattactagaagaattattagtcctatgaacgagaggcgccccggacaatttctacccactggttttgctttccaagtgcttgtaagttattatgtccaacatcaaaacttctatggtttttcagcttacttaaatctcattacccaatataaaaattacaggttcagagggttgcagccattcatgctcgatctagggcttcacttgaggaggaacttactgttggctccgcgaggcaaacattacaagatatcgttgatatgtgtgcaggcgcccttcaactcaatgcgcctttaggctcgttatctaatggtaggattccataagaaccatcagaatagttttaggctacaattccttttcttagtgacttaaactttcaagttttgtcgagacttatcttttaacttaagaaattcctttgttataggctccgttgctcaagctccaactccagaaccatttttgatgttacctcaacctacacctacaataataccccaaaagccgatgggtggagaaatggtatgcttaccattgaatgacatggagatagatgatggtcttgcagcagaaccgttggaactgatgccacctgttcaggatataggatgtgagcagtctttatcatcagtttcccagaaacctcttttctggccgtcgggagggaaacttactttcagctgggtttgtgaagtaatgttggtgtttgattggtcgtctaagaatctcccaccttgtgaattttcaagtgttctgccttttaatgtcttggatgagctggttctctttgcttccaaaatcctgaaaaaagagccaaactgcgttaggatagacagtgagaaagcagaggtcgttgtggttggagatctacatgggcagctacatgatttgctgtaccttatgcaggatgctggattcccggatggtgatcggttctatgtgttcaatgggaattatgtagacataggagcatggggtttagaaactttcttgcttctattatcatggaaggtaagcttattagccttttgatgtgtgtagtactgatatcgtgtcagtggagcttaggacgcagacacatactctactttaatgctgctaaattaaatcatgccgcagcatattttaattgtaggaccttcatttttctgctaggttcttctaccggcaagagtgtatcttctacgtggcagtcacgagagtgaaagttgtacatcaatgtatggatttaaaaatgaagtattaaccaagtatggagataaaggagcagctgtctacaagaagtgcttggagtgcttccagttactccctttggcttctgtaattgctggaaaggtatatacagctcatggaggtcttttccgtgatgtatcaagctttctttcagacaagcaagaacggaacagaaaacgcaagcgaactcagaaaaagcaaacggataatactgtccttgacactgaagatagatctgagtccttgcctcttggctcgttgaaggatttatccaaagtgaaaagacgtgttatagatcctcctactgaaggttcaaatttgattcctggtgacattctttggtcagatccatcgaaagacaccggcctctttcttaacaaagagagaggtatcggtttgttgtggggtcctgattgcaccgcaaagtttctacaagacaataatttaaaggttagattgattagtttgtgataataaattgtcaaaaatattgtacctagaagcattgagaatttgatagaagatttgagtgtgcaatcaatcaaatgcattaggatataatcagaacaatttcgttcttttttgtatatttgtgaggtatgtctgttactccttcagcttcatgatgttatctctttgtatggcagtggatcatcagagggaagggagcccctgacgaaagggcaaaacgagatgaccttgcaccaatgaatggaggatatgcagaagaccatgaagggcttataactttgttcagtgctcctgatcatcctcagtttcaggtatgctctattggatatttgtattggctatcttcacttccacctgttgtagtaagctcttgcggttcaacaaaaatggttactcgctggcaggatttcttatatcttgtagatgttgtaacttgtgtttgagcctcaacacaaacctgagtacctgttgtctcgtatgcaggatacagaggagagacacaacaacaaagcagcctacataatattacaaatccctgaatgtgaggagcttaaatttcaaccgcttgaagcagtatctccgaggccaaaggtagtactacaatttaattacgagagtcctaattttaatatcttttagtttattcttaatatgttctgacatctgcaggctgaggcgtactacgactttagacgcctgattcatccacccagtaatttagtacacaatattacgaattctgttgattcaccatcctcagtgcctgatgacaaagataatttaatatcttctgaaaatgtggaatataagtccatggatctctctgaacagatggaagttgatgaaaaagatgatgttgattccaagtactcagaatctataactgatgaagttgcagcttttggaactccagcatctggtgatagagatatggttgatttttcagataagactgaaaatggttctaaagaagctgaccattccgaaactgcagagattagtaaagatttatctgatacagttggaaaaccggagtcttgcagcagaacaagaggtacatatgaagctatcggaactgatgcaaagctaaaatctaacactcctgaagctattaatctggaaccgcagccaggttgtgatctgtatgtgcctgattctggaaattctacagaatctaggaccgaaaaagctgcagaagaggcttgtgttggcagaataagcatagatgactgtagcaccactggtgatgctgcagtggaattagaaattacatatgatgagaaactggatagagtggtaactgaaatcacagggaacgatgcagctgaatgtatgacagacggtaatagagacatagccaccgatggtgctgagaacttggaaccttcgactagcaaacttaattattcagagcccagtgaagatattgatgattctaccatgaagttcagacataatactagctgcgttgctgattctgatcttgagactgtgaatggtggggttaatgcagactgtagcagttcatcgaaatgtctaaccagcaagccagtggtggctcatgacaagtttacaaatcttacaaaaccttctcatgataaaggttatggagagtctgcagataagccagagagagtaattaaactggttacatattctaagcgtaagtcatctgacaaaaaacacatgattgaatctaatgaagatccccaacagaaggtcaatgattctgtcgattcaaagaacaaaggttctcttgacaagtcacaatcagttccaggagatatggactcatgaaatcttgttccactgtcttctttccggctgaggtaattataatctctcttctgaacacggtgtctaggcaagcctcactatctgtttataacacggtgttaatgactgtttttcaactttggtggttctgtggttagttaattctggttttacgagttctgcaacatttcatttcaaaaacacgcatcttcttgccatgaacaagacttactattacatatgattgatacacagatcccagctcttttatctcacacgtctgagtgatctcttaattgattttgcagatgatgatgaacagctacatggctttggatgtgtccttaaagacaatgtacagtggacagtggtcataatagtctagctggttcaaatccaaccggatccggtttgctaatttaagcttagatcagtagggagatggtgtaaacattattccccttctcttgaattttacttttctcaatcaaagtttatgtagtttagtggtacttttgtaaaaaagaattgaaagtattaagaattacagtgtgtttgtctttcatcattgaaaaataaaatttgtaaacggtaaacaaacaaaaccataactaatccaacggagaggcaaattcgtgggttgggtcaaaacgaaaagggtataatcgactttgccacacgataagtcaataactagattcactcgttgaaaacgcagcgtttttgcatcctaagctaaagaagaatctgcctttgcgcgtcttcaggttttcttcattttttttattttgtcgaatctctctctctctcttcaacccctcttctcaatctagggttagggtttcgattctgctagaggttttttttctcccaacttatacttctaagccctctcgtcataagccttgttgactcttcttcttaatttgaagaacttcgtaggctaagcatgtcgtgattatcccaaatttctggtaaatttgatttctgctacttctactcgtcattttattctgaattcgtctttgcgttcgaattatttcaagcaattagcttcatcttcgtgtgaaatttcaatgttttaggatttgatttggtgtcataaagaacttatttttctcgtgattttgcatcttcttttaagtttttctgggctggtttcatggctcctttatcgtttcacgtgaatttcagtgtcgattcgattgggattttgagaatagttggggacgtttctgtattgcaaaagaatctgtgaatcttttttattcttctgatataattttccaaggagattaatcgttgtatcctactgctgtagcttatttgtttaagtttgatattatttcttcaaaacaatcttcacaaatttctcatgttcgttcttatgttaatttcaggtgtttattcaaactccattgttacaaagattttctttgataagttaaagcaatgtatacctccgaggcagcccctgattttgttgttgaccagggcatgtattaccccgttgatgccagttatggctattactgtacaggtaattataacttggattccttgtatcaattatactctcggccttaatgcgacaagttctctaattttcttaagtttcaggttatgagtcacccggtgattgggagaaccatcagatgttttttggtgtagatggttcagaagtccaatacacagtactaatctcggacataaagacttctcattaatcgttgatttgttcttatacattttgtatttgttgacatgatatcctttttttgtttctccagggtgggcagaatgaaaattctccctatatatgctatacacctagttatggatatgcacagtctccttataatccattcaatccttacatacctggcgcttcaattggcgttgattctgcttttgttgctcctcaacaattttactctattcctccttaccagagtgttgcaacgtcgcctacttttgttccatatgcaattcaacctgagattgtctcgaatagctctacaaactctttggttgagactggttcagctaataggggtcgatctgatgggagagggtcaaggcagagaagtggcaccgctactgccggactccaaaggaatgatccgaaacttcctgcagggaactctttgggcaagatctcggagaaaccaaggcctaattctggacaaagcagacagtcagaaatggacaagagtgattctacttcatcatcaggacaagctcgccaggtataatttcgtattactaatgtctggttttactttattttggatattggtgatacgaagttgatgagttagaaaaagattagcggaatgattgtgattctaatttcagacattgatatgcttacctgtgtagttctaggagtactgtagtttgttgatcactacagccacagatatcattctgattttgactctggacttgtgtaatcatctttgcagggaagagttacctccgtcagtgctcaacctgttgacgtggtttccagtagcagagtatcgtcttttaggcaattagacattgctccacctcaacttaatgatttttcaaaaattgcaacaaacaataacaatattcggcccaagctgtatggtggccatgcaaatataattcctgatacagtccgtgaacaaaatcgaggtcgaagatcgagagcattgggaaatcaacttattgttaaagcttatacaacaaaagctggaaatgctgatgccgagggaaatattgtgatcaatccttctcagtataataaagaggatctccgaatcgattacagcaatgccaagttttttgtgattaaatcgtatagtgaagatgacgttcacaagagcatcaaatacaatgtttggtcatcaactttgcatgggaacaagaaattgcagagtgcgtatgaagatgctcagagaatagccaccgagaagtcttgtgaatgcccgatattcttgttcttttctgtgagtttttccttctctctttttacatgctagcttgtttgtgttaagcttattctgatgcattgcttttctttttaggttaatgccagtggtttgttctgtggcatggctgagatgactggtccagtttcttttgataaagacatggatttttggcagcaagacaaatggagtggaagctttcccgtcaaatggcacatcataaaagatgttcccaatagctatttcaggcacatcatactacagaacaatgagaataagccggtcaccaacagtcgagacacacaagaggttaattttcctactagaccacgctttgaagattttcacattcagaatttgctaatatatcattttcttctgcagataatgctgaaacaaggtctggaagtgctaaaaatatttaaagatcatatggaaaggacttcattgctagatgattttgtgtactacgaaagccgacagagagtcatgcaggatgagagaaccaggctgccgtacaggacctttcttaacgatttaccattacccaggccagatctctctgatagaaacaagaaaacccccttggaatccttcaagaaaccttcagtaatctctgcaaaaaccgaggagcttccttcaaagtcagaggggaatgaggagaccactgtaaaagaaggtaatgaagaagatacttcttccactcagaagaagatcagctcactcaccattgacccgagtggtacagactctaacccgactactgtttctcacctgaaccagaagagtcaagccaagtctaaaccgaactcctctggctctctcaagaagacagacccctctgaagtggttgatgcttctctctcggataaaaatgactctttcaaagttaccgggtctcctgcaatcttaacagtcggtactattcctctggaccccaagtcacttcagaagtaaaccacccccacgggtttggtttattctctgtttccttacatttattcttctctctaaagtctaaagttgatcctgcttcatcatacaagccaatgtggtatgaagagagggttctgtttgtatagatgagtcttgacttgataatccgtgattcgatcaaacgccaaaaagagaattgttgagggttgaggtttgcggttagtggttgcgtttcggttattttggatgtccttgagagagctgtactctgagcattttgatcggaatttcatgtgctgttcacttattgtgttttttcttacttccgtttttttctttccttattgtaaaattctgtctgtgttctgtttggttgtttgttcctcccaactcaaagagtttcaaattgaattttgagtctttttttcttcctacctttactttgtcgtattatgaagtaacagaatcatatgaaaccaatccaaaagaaagtactaataaaaagatctaactaatagagtagacagataaaaatatataatggacaaataataagcccatagagacaggcatcgatctaaaatgctttaaaatctcatcgcacaaataaggcttccactaaaaggccctacaagggatggcccaatatacatacaacaactaaaaatagttcaaatcttatccatccacgtggcacatttccaaccatccaaattcaccggagagattcaaattcaacaaccataattcgaatcatatgcttcctccaccaccggagatccatcaagcaaacaatcaatcggcggaatcgtcaacgtctcttgtttcccataagcattccaacaaaacggatcatcaacaagctcaccttcttccggcaataactcaacctccgacatcgttatattcgtacacgcgacggtatcgctacaagcgaaatgaatcggtggacttctaacgtcgtaagtacctttaatgttccgatactcgacgtcgaatactttaaccgccgatgtttcgttacggcaatctttggattggcaatagtattgatcgacgattatgcaattgagaacgttctccatttggatgttttcgaagaggagatttgatactgatccggtaccgccttgccatgttttgactcggaggccgttatcggaatcgcgaatcacggtgtttctcactgttatgtttgaaacgcaggcttgtgaattgtgcacgcctaagctcccaatgctgcgtttttagacattttaagaggtttttagcggttagaattcaaatcgcgttttgaaagcgatatacgactaaacaaaatgtacgagaaaaatatagttttcttaaaataaaataaaaactcagctaaaagaacttcaattttcaattttatacctaaatcatacgcgtaattagctttttagaaaaatacaacaaattttcttagctttttttatttatatattttgtataaattcgaaaatgatattttatttagccacaaaaaaaaataatagttgatattttccaatattaaaaatcattcaatcttgagttttatacctaaattaaactcgtaatttaagatagacctacgatattaaaatattggtatatgagataccagccaaattagaatattttttttggtatgttcttataattttgcatagacatatttattcaagttcgaaaataatatttatgaatatgagtaactttacttaaatccagcaccaagttcgatatttttttgtcaagtagttccaatttccaaagctcaatttcgggtggatggatcattcagctaacatccgtgatccatgtaaaacacacagacatcgtaatggaatcaattcgggaaaaaataacattttaaagattttttgtaacaaaagaagaaaaagatgaggaaagaaatgaaaagagagaaacctgatcccgtgactagggccacaagtgacaccttgaatgtcaacatctgagcagccagttccaatcgatatgcaatcgtcccctgtgttaattaataacattcttaaccaaagttataacacatacactaccaatatacgcattattcatgatacaaaaaagtttagtaaataaaacaaaaaacagtaccgttgctaacgacagaattgtaaatgccaacagatcttgtgtttccgagatggataccatctgtgtttggacttagttttggtgacgatatttggatttcgtttattaacactccttgacatccgtcgaatttcatgtgaaattgtggactgttttggattcttaatcctttaacctctatattgttgctcatgaaaaacctaatcatctataaatcaaaagaaacaaaaaaaaaggttagtactaaaccaaataaaaccggtctaatttaatgatttggttcggtttaagtagacttacagtcggacttgcacatggtccggacgatgatgatccgtctggaccctgaaaagataataaaacacacaatcccagttattttatttgacaacatttttttggtttttacaagtaaaactatttagggagcatagtagctagtatggtttgtcgtgatgttctatttgtcacgaccacgacttatgaattaattaataatcagcaaatctctagtgtaaaagttataagtaaatagttaccctgtggggcttgcaaggtagatcccaccatttttgaccattgccttcgacggtgcctttgcctgaaaacgtgaaaccgtcgaggcggtaaaaaaccaaccactggtttttattgtctttctctggccattcctctggtccgtccggtggcatcaacactccgtccaacttcacattcccaaaatacatgtaataaataattaataaatattattgttactttaaataattgcagatttttgtaaaatattattatcattaatgctatgctttttcttttgaaattttaattttgtttactttttgttataagcctgttactgttaaaagaaaagaagcatttttgtttgactcacctgaaatacaagacccggtttacatggaccggaaaaaatagtggaggtgattttgaaaacgccgccttcaggtgccaaaacgacgccggattcgacagcacaagcggctttccatgcatcttgaaatgctgccgtatcgtcgcatgacccatcacccactgctccaaacgacgtaacgtcaaagacgcatcctgagtcagaatctcccggagccgggtctggactcgggtacgggtcggaagggacttgatcaggtggattggccgtttcaagaggaggaggaggaggaggaggaagaggatgcgttacgccgtgacggcccttgtggtaatgatatcttgctcgtgccacgttggtgaaatgtccaaagaggacagtggagattatgtaaatcacgagaatgccactgagtctgcgcattgtttagctttgagaagagagaaatggagaaagagaaagagaattttgagagagttagaggagttttgagtgtgttttatagcaaacaagaagaacagagagacaatagagtttgaagtttgtggagacgacacgtgtttattttctgttggttatggagttctatctatgtgtgtgttttgggcatgaggctttttaagagacttcttggttttacaaatattctaatgtttttacgacttgtctttttctccatttgatttttttaaaagatagaaacttataatgtttttcatctatgtcgaaaatttgactaatgtttggattgatatgcttatatgaattctgaatggtcaagtgataacatttttgaaaatcagtgcaaaaaacataataaaacaaatctttttaaggttttgcagattttcatcttaattaccttcttgtgtatcgagaaaattcttgactttttgttcttttatacatcaatctatagtactagtatagattatatggtgaactatgacttaatcatatttaattttcaaacataattcaaatacctaaaattttttttaatagatgtatttaagtaatcagatttgagattttattcattttatcttatgttaactttcaacatacaataagagtgtttgagactaaattaatattatgtcatgtggtttcgggtctgaaaaaattacggaatttaatccatgacctcttaatattcagaaaaaatatttgagtgatcttaattattatttttgacattaaattaattagagtttgttatttactaaatgtttatctaagttgtgtttagttttgacgggatttgtttttgagtaatatatgagatttatgatatttataaatggtggaagagagagacacattaccacggtaggtatatatcgttatatttggcactattatctcgcctctcgcatatgttccaagaaatctcatgtttcctatgttataaaatccaaatttatcagcatcttattgacgctagttacaaagtcctcttagtctccaagctaattaagcaaagtcaatacaaggttcattagtaacccttgtttactcgtttccgatccccatgcaaaaataccgcgacgtcaactttttgtttgtctgacattttgctacgttaacttatatggtaatcctaattttgatatagaccatctttattaacggtctcttacataaaattttaaacaattttgatagacaaaataatatttaaatattagaaaggtttttataaagagagaattaatctaaaaacttttaggtaagaaccatttttcatttctcaaaaacacgccttcttaattttattttcttattttgtttaacataatattttaatagttcatgatattgttgacgacctataaattatgatgctaacgataagggatattaagaaaccaatagatattattacatgtacgaaatgattagaacacgaaatataatgttgaaagattgatttgaaatctcttgcgtttagattcttgatgcgtgtgtgcgccactgttaaatgtcgctttgttcatcctctttcttcgtcgtacttctattgttcagaacacgatgacgtcaccgatcatgtttatttacatggccgacttaaattttgtaggccacgcatgtttaaagttgttagtgtcaacaataaatatatcattcttatttttgtttgttttctggttaaatactgaaattctaatattcggattgaaatatatctagatgaatagttatataaatgatattaatatttcatatttaaattcatttaaaaattattatagtaaagaaaaatttattttgtttatttcgtaatgtcttctgaaaacaaattattggtgcaaggtcttcagctccatttacatatacatatattgattataaactcgtcgaatatttatttaaagatgccttgacaaactcataaatcatgtatcgatatatagaattttcaattctattcaagatcaaacctagaaagatcaaatgactgatcttgtgacgacagcgattgatcgattctaatccaaaacagtaacacaaatgatttgtatagctttccaccctcttttttcttcttaaaattgcttaaaattgtactttttgtaacactaactatgccgacgcatgagatagaaaagaaaaacataattttatgaaataatgtaaagcgttttcatagttttatagattatatagcaaagtgaaataaataattgagaagcaaaagattggaaatagacaaatctcgtgacactttgttgtattgtagttgaatatatttcttgtggatgttgaagccggataggaaaaagttgggcgggctccggaaatgatccattggttcttattgcttctaacgagctgtcttaattctctattttttttattaaaaaatcctttaatgtcggctagaatcatcaaaaacatgtatatacaacatattcaccaattcatgtataaagattagaattttcgtagtggatgtaatcatgatataaatacgtagacagcgacattattcttcaaacgtacaaagtagtttgtccgttaattaactgtttttattctaaactttccttctcccctcctttttttttccggtccatgaccatatacatggtatataaatttccattattttccgtaattttttttgtgataatcaaaaaatttatgcataaacgcgactaatatcaaagactatagaaatccgagttttcttcttgttattttttgaatgatatgtctgtgatcacctccctacaatgtcaagaagaaagcacaataatacttttatacgaataactataattttgcactcaaaaacccccactaatcgattctttgtataaactctagtaagtgatcgatttcctctcaaatgtataattatattgtcttgacaaatgtatatctataatcgaccatttcgacataaacatatgtcgtcctacttaaaaaaacagaaaaatggtcgaagccattattcccaaaagttatttagtcatttgattagaaggagaaacaaaatttaaagctttgatcggtctttttattttttcgtctgtatatgtcacatgtatctctcacgggtcgtgcttaacacttattactaaaaaggattgttgagtgatgatggcttgtggctcaacttaattccacgtggaagtatctccaaatcgcgacacgtgtttgttcgaaatctaaatgccgcaaactgtgaaagatcttccaagttacatcaaactttttgtgtgtacatttatgtgcctttgtgacagcacgtaaaaattatacacattgttttctttctcttataaatgttttgctggtaaccatattttctgctacaaaacataaagctaataatatatagcaacgatgatggcttcgaccatttcgtacgcattttgagtcttacatatgtatggttatggcattaatttggctattaataacgatggtggttttgtgtttattggagtttaaagatagaaatgttgttgtgtggacgactggacggtaaaccacgactaacattatccttttgtttacattttttttaaattacatacttgaccattagaagcattaagaaccaatggatcatataacaagataatcaccgaatgacgatcaaatggcctttatttccgagccaccaaacgttgtgaataaaagtagaaagttgttgcgtatagtttataaatttactagatctatgatagctcaaatgtcatggacgtatattatagtttacgaaaaactctatataacatagagaattagagattgtatatgacataaaataaaattgggaagatgttggatcgccacgtgtgcatggttcttaaaactcacgggcgtgtgaatgttgtttcagagaggcgtcacgggttggtggatttttaggttaatgatctattcataacgttgagatttgattcgatgctcagtaattaataacaagattcattatttttattgtgatttggacggcttgacgacaatgttcacgcaagacattgaaagaaacccgaatgttcttgtctgcttcgtggatgtttagctatttgcttcttacgtactaagatcacctccaatggagagagtttttccatgagttatttacattttttttatgattaaatttcaagaaaaattaataagagagttttgtgtttattttcttatttttcatactccaataagcttaataccatgcacacgaaattgatagataaaagattaaaactacaaaaaaaaatcatacctaaaccagaaaaaaatttgaattcatatccaaactttatatttagagcataattcagagtcgttgtgttattcaaccgttatttttgctaagtgagctgatacgtgtttgatgacatagcttaaaacgatgtatttttgcttattaaagttacaaatttataaaattttgcaaaagtcggatctcgacccacaacatttcagtcatttacaaaactcactacacagtcggactcaaaaaccttcttgtcatagccgccaaattcccaaccttctaaggagctgcctttgtaaaaaaaatcttgggctacttattaagaacaatagcaaattctcatttatgtgtttattgtctatttagagataacagactaatgatccaaataagattaaggttacgaatttcaatctgcaaaccgcataacgataaatcatttccgatattttagaaacaaaacaactatttacgttcattccgtaatttccatttcccaaagattaatgacaaagttgaaacagaattttgacatttcttcattcaaagtattacaatcattaaactacacctaatagatgtcaagataaataaaatatatttaaaacaagtgaaaatagagagaaaaacaaatctttaatttagtagatattgttaccttgtatgtataaactccactggtaatgtatccttcaagatcatccaggatgctatatttgcttctacgcaaaacaacggtggagaatggtgttagcaacttcatcattttctgcaatcatgaccttgacatagcaaaaaaacagattttttcttcatatattgtcaatgaaagacaaaatatattaacttaaaggatagaaaatgacttctacttaatgtcacaccatcaattttcgttattgatatcgaatcaacatatccaagatgctcaggtcttggcacacaaagcttcaattatttgaaacatttaaaatattaaaagctaaggtataactgacggtcatagagagtattccataaaggattgttacaacggtcatataataattatgaaatatatatatatacattgctaatctattgactttctatatctatcaataaccacccttagatactcattcagatcacactttagaaacacttacatgggaggcaactgccccagctgtccggacaaaactcgccagctcaatatctaaattaatttgcaagatcatgatcctgccataacagtggataaaaactccaccataaatttattaaccctttttgttttttttccaaaaagtatttgttatatataacaagcaactgcaacatccaaaatttggagaaaccaaggtggagaggcagacaagttacatagtacagagagacaagtagtatggttgcatcttgttcaccaccttcagtcattttcatcttagaagtaaaagtatccaaaaatgcattgagcataagcaaacagtgaatctagtccactgtgttgtaacgatctactagaaagcttcattgtggcaccaaaaagaatcccctccagccacaaagaaaaactgtaaaaggagcaggtattcctaagaaactgaaagcattacttaccccaaaaagaaaccatctcaagagtttaagggtaagttaaactcttgagttctttgttaaactaagatagatctatgggggttggtctgacacaggataaaacctaatcccctgatccttgcgacattgcctaacgttgcgaagtgcatcatcaacaacttgcttatcctttttacgtttagagcattcaccaatctccattttcgcttttcctttgcccttgaagtcagaagaagagctagaaaagtgattctgaggtataggtcttggattaacaagtctggaagcctcagatccagcaactaagtgaggttcatgagaagctaaagatgctggaggaagaggctgtgatatcagtgatgcagaggagatgtctgaactgtctgagctagtcatatgagtttgatcagtgatagtgttagaagcagcaccttcctcccaaacaggtacatcaagtacctccacctcatcatcatgaatcacaggtgcattaagaaagggacagttgtttacgtgatgagtgatacgacaacaattagtacatatccttcgaagcttctcatactcaaacccaatcatagcaccttctctagattcaaaacgaactctccgaaaaaaccgaaggcggtcagtgaatacaagtctgatcttaacacggataaaggcaacataagtggaagtgtcttgattaaaatccagttcaagaacaggcccttattaacccttataaataaggaaaataataaagaatatcctagaaaggccgacggccctaatccgtaagaaccatgataatacaagctgtgacttgtgagtcgcaagaactgggtaatactatattctcaaaatcactcattagagggaggaaagacagaaaattgttaaaatattacttattttggtttatattagctgcaagcatatttttctctcttggttttgcacccataaaatctaagtaggcatttgtagtatagctagagttagctcacattaactcagttagagtcctcatgcaatatttgttatgttaaactatttctcataattattaaccaatagtagttcatcaaattttaaaattctcaattaatgattcttgaaattcataattttataacatttattataaaaaagtatacagaaaatcaatctttttgatagaaaaaaccccttagaaaatcaatctttttaatacgtagggaatatatatttacttcatttataaataagtaatttaaaataacatcacttagttttagtttaattcaactctttttttttatagttatgttatgacttatgtttcataaaagagaaaaaaaacttgtatgtggttactataaattaagctgattttgtagctttgaaatttgaatgtagccttatgatttgagtattgatttttggatatcaagttatgaaacttcaaaaaactttctttgtgtattagctgttaggtttgcacaaaaagaagaagctattaggtcatcaatttgttgagttcttattgtttgtcagctgactcagctccaaagatttttaaggatgtttgtatcatgagaaccgaggtatttaccattgtaagtgaagtgtaataagactaaagagttttcttagagcatcattatttgtgctatcttagccaaattcttagagcacctttaatggggggggggggggggggggggggtttaaacaagtttcttaacaaagaacaaaaaaattatatgatttaaatattcataagtctcttaactttgatgaaacctaggcaattgtctcttagttaagagataattggtcttggtttcaccaaatttaagagacccataattaaaaatattatttatctatacttatactttaattttgtttaagagacttaggcttaaaaactaccattgaagatgtttttaggttaagatttgtgaaaaagaactcttatataagagcttttaggcttatataaaaccttttttttcacaaatcttaccctaagatttgggtaagataccaccaataatgttggtcttatatgctaattcatattaatggatcccatgtattttttttttctagattttattctagcataaaaatagtttataacctcttgtatatgtaatgtcaaattgtcaattaaatctattgaagttttggaacctcataattaggataacgaaaagattcgtagtaacatcatttgtctaaatatcttggaatcttacaaaatgatatgttgtttcgaagtggatatatttatgaccattaacaatagactcatgtaacaatcaatcacaaaaacaattcattatgttgttcaaaatctcaacaattctgaaagtacaaaaagtttatggataaatgtaaaatctttaagaaaaataggggtcaaaagtgttataattttgaatattaaaataaaattaaaaagtgtattttgaccggaaaaaagtagaaaaatacaaaatacaaatagcataggaccggcacgtatattacctgaaattcatccctgagtctcgttcttcttctctcacttcgtttcgttttctcacaaaccgtctctatctctctctcgagtctcttgcttcttctctaatcctctctctctcgctagatcgattactgagattcgacgaacctttgtttgatttgtaattttgagatcgtggtgcttctctctctttaatgttgaatcggttcgtttctcggatctcgatgatcctcgattttctcaaccaaacttgaagaaaaacctttccatttttcgctccgagcttaatttcttgtttccgccatgtttgaagctcatgtaagcctttttctctttgttaattttggggattgtgatgtcttctttaccggttatttttttctggtgtttctagttttagaagttatgtgtttggtttagttcgatgttgtgattctgggtgattgattagcttgtctcgtcgtatgttggaatttatctatggattatgaaaatgggtttttagtttagcatctatgagagcagcaatggtagctgttactggagaagtaattagttgaatagtgcattgactattagaataaaaatgaggaatagaacaaatttctaagttagcgacttggactgtttcagatatcaatttctgcagtttgtagtgatatgttttgcaggaaatctttgctcttatgtagaggtcttcatgtctccttaaataattgaatgaagtatctaataattgctgcgactcggtattcaggtactgcatctgcttcggaggtatttgggtgaatatgtgcatggactctccacagaggctctgagaattagtgtctggaaaggttggattttcatttttgttagtatttttatatagatgtatcttgagcgtattaaaaattcttgactgctcatggtttatgaacagtgatatatgtagagatgtaatcccttggctgtctagtcagttgttgttttgatgttggggtttttttttttttttttttttactttttaggtgatgttgttcttaaagatttgaagttaaaggcggaagctcttaattcactgaagcttccagtagctgtcaaatctggttttgttggaaccatcactttgaaggtaactttttttttttttttttttctcttggtagaattttgatgattttcctcaagatcactgttcccgttctgtactcttgatagatgaagtatatttcttctttctcaaaagtttacgtacttgagctgtgagaactttatgctggattggtaatcctttacagagttacttgcagcttctttcttcatatacatatactcatttcgatctatgttaaagttatttgaggatttagagagccgaaaaatcactttgtgattacatagctctgaatgctcacgtgaccagaactgtttgcatgtgtgacggtctcatgtattgatatacaatagcaatgttggaaattgatttcattttggattatgaagaacatgttagttggtaatagtgatcaaagtggaaaattttaggtcattgtttatgaattctgggatacaagttaaaatgtttaattggaatattggataaaaatgaaatatatatgcatgtgattctgtttgttgcatatattgaagcttttgatacgaagtcaaatgtcacggaggttgcaagtcagagtgatattctaatttttgaacttggacttgtgtttaatgccagcaaacgctacttttgtcaggaaactcttgtagttatggctaggtattaaatctaaaatttgaaagtgactcatataaacttttgtttcaggtcccttggaaaagtttaggcaaagagccagtcattgttctgatcgatcgtgtcttcgttcttgcttatcctgcccctgatgaccgaacacttaaggtattctgttgaaattgttatttatgtttgcttgtcttctctttaagtttttcactttggttggtactgaatttgcttacactaattacataccaggaggaagacagggaaaagcttctagaaaccaagcttcagcagatcgaggtacttcgtatttctggctgatggagcttcatggatacgtctatatatgaccgttacatgaaacttggattttcattttcatctacaaggtttgatgttattctgagttatcattctcgtgtcttttacataggaagcagaaacagcaactcttgaagcaagggcaaagtctaagctgggaagtgtacgtctctaaacttgatgactttatttttggctatcttcttatattcatttcaggggtatgtattttttgtgtgacgctggaactttcctaatctgattagaggataacttatgattttttacgaacgatatatgcactccttgctaactactagataaaataactctcacacgctaagcattttataactaatctttgatggttggttcttttcagcctccacaagggaattcatggctaggctcaattattgctacaattattggtaatctgaaagtatccatcagcaatgtacatataagatacgaggattctaccaggtttgtggctgtttgccttttttgtttctgttttcccttctgattttgtggccatatttagctattctgctcgcttttagtgtcttgttgttggtgtttattagagacagctcagaaatacttgctagctttttttcttatttcaacaatatttgctctagtaatccagggcacccctttgctgcgggcatcaccttggccaagctcgcagctgttacaatggatgaagaaggaaatgaaacctttgacacaagtggcgctttggataaactgcgtaaggtgagctttttatctcttttcttaactgggcgaagtagttgaaagttgacaaaaagcatcgtgtttcaaagtagatgtgtgtttggactataaacaactataattccattgggacgttggagttctcttgtggttcataaatggaaaacaaatctagtcttcccatttcttaagatatcccgttttgtaggctcttcatctatgaagttcaagggctcttctcccagaggtttcaagtacaataaaaacattgattgggcttttaaaatgaatgtttatttgttttttcctgccatgaacgacatggataaatgacaaagcagttttagaaatacttctaggctcttatgccagatttctttggagtttaaacaactctttatatctttgtttttgtttctttccaattagttattttctctactgctgtgtttccctattcttttgctgtgttcgttttgaatactagttataatttaagataattaatgaaatgctgagatttcaactgaaatatactttcttacgtggtctgttgattgaatatctgaagtgtgatgaataatgatgatgctacttattgacttgaaccaaaaattcatgttagcacatggtttctgtaacagtcgttgcagcttgagaggctcgctctgtatcatgattctaatagctttccctgggaaatagagaagcaatgggacaatattactcctgaggaatggattgaggtttgttcatacataccttttccttggggattatgttgtgttttttgcctggtttattagtcaaatgaaatgtttttgagtgatatgtatctaactttcgacagtcttccttcagatgtttgaagatggcataaaggagcagaccgagcataaaataaagtcaaaatgggccttgaatcgtcactatctattgtcccctatcaatggatctcttaaatatcaccggttaggaaatcaggagagaaataatccggagattccatttgaaagggcatcagttatccttaatgatgttaacgtgactatcacagaggtaccacttaaagtacttgatatagttggctatatttttttgggagtgttcctcattttccatcagggttagccgtaaatttttcttgtgggttctaatttcttctatctgtattccaaatttctgagacccattagagttcaggatttttttttcttgaggtggtaaacttaactctcttgtattttgtctttcccatttcttaacaggagcaatatcatgattggataaagctagtcgaagttgtctccagatacaaaacatatatagagatttcacatttaaggcctatggttcctgtttcagaagctccacgtctgtggtggcggtttgctgctcaagctagtttacaacaaaagagattatggtacacgtttgttttattctctctcatgtaggatttcactgacataataggaaaagacacagcatttatttggtaaagctgtttggtttttactcttgcgtagttttaagcttcttctggtaaagcatgactgtacttgatctgtggaataaatttatattttgatctgatttttgcatatgttcaccccatttcagctatcgattttcctgggatagcattcaccatctttgccagttacgtaggcgctatattcagctgtatgccaattttctgcagcagtcatcagatgttaattacccagagatgagagaaatcgaaaaggaccttgattccaaagtgattcttttgtggaggtaataatcaaattccaacattttgaacggaaggcatgtggtttcttaatatgatcaaatcccaccttctgatgcttactattgggattccatcccgctgactctttatctctgaatttatgtgagaggttcacatgaccatggttaagattctattatactgtaaaagatttcacttgtagacacctgccttatattttcctagtggttaagctagctgttgcctatgttaggggtagttaggctcgcatctatgtcgtgatgaagtttgtttggtagtgccctgtttgatagggtacgtttgtgatctttttcaggtgtataattaagaacaatttttcgttcagatgctattctacgatagtaacataattaaacataatatgattcattcttcaagtaatgctcaaactttgtgaatgacatactagctgatatctaattactacttctagtcatatcaataccactttttgctcataagaagttcatactcagccattcttcctttctatttttattgagattctcacagtcactgttctgtctctgtgattttttcttcttcggacttatcttatcatttattatgttgtatttccgtgataggttgcttgcacatgcaaaggtagaatctgtaaagtcaaaagaagcagctgagcagagaaagctgaaaaagggtggttggttctcattcaactggtcagtagggtttgctgcttccttctaaatacattttcttgcttttttggctgttcagttctttttcctgtcgcagtcatgatcacaaatagaaaccatttttttttttaaaacttttgtggctaccatatccatgaaggcggacagaagctgaagatgaccctgaggtagatagtgtggctggcggatcaaaattgatggaggaaagattgactaaagatgaatggaaggccataaataagttactgagtcatcagccagatgaagagatgaatttgtattcaggaaaagacatgcagaatatgactcactttcttgtaacggtatcaattggtcaaggtgcggctaggattgttgatataaatcagactgaggtgctgtgtggtaggtttgagcagctcgatgtgacgaccaagttcagacatcgaagtactcagtgtgatgtatcactgaggttctatggcttatctgcaccagaaggttctctagcgcaggtttgtttccaattttcaccatattaacagggtcagcagtctctttgattagataatatgcctgcctataaaatgaagtttgacctccccccttccctctctgtttcatgctggctttgcagagtgtatccagtgagagaaagaccaatgccttgatggctagttttgtgaacgcaccaattggagagaacattgattggaggctatcagccacgatatccccttgtcatgctacggtaatctcttcatatattatatgtatactcttgaagcatggtcgtttacgatctgcgtaatatttacatactttaagattcgtccagagtatagcagcttctatttattatctagctggtggcattggttttctgaaaatgggggattgtcaattgtctggaccttagaaagtgttattggaaattaaatctcctgcttcccttttggaaattatgaagggagaaggttgtatgttgttaaatttctttgaaattaagaattacttgtaactctcatggtcctatgtttttctaagttgggaaattcagttgtatatagttagagacaaaataaagtctatctagtatggaagtttaacacccaactacgaaaattataatgttaccaaatccagctgctaccaaggggtcactaacactcatccagaatagaaaattgtttttcagattagataacttggtgtgtgggaataggaagagtccgaaatacgtagtcacatatcaaagattgtttcttctaaaatatttgaattgacttagtccgatgcttttgatggccttaatgttatttcattttattctgtcttgataattttctgcgtaatagttccacgttgcaccctatttactttgttcttttgtctttctatctgataccactgctttgagcacaattgaaggttttacgtatttgcagatatggactgaaagttatgatcgtgtattagagtttgtgaagcgaagtaatgcagttagccctactgttgcgctggaaactgctgctgtgcttcaggtactggtctaatgcttagtggaaattttcctactcttaccctgtttcttacatagttttttttgcttatattgtcatggtgaaaataagacatgtatgatccttcaaggttgatcattcatagattattgtatgtttattttcctgcatacgtaccatagcatttaattttatttgcaccggtaattacagatgaaactagaggaagtgactcgacgggctcaagagcaacttcaaatagtattggaggagcaaagcaggttagaacagtttaactggactttatatatccttttttttttatctttgtccatatgatcagagttggaccatttggtagtgagtgactagagtggaatgtttgttgcatggaacacaatcttctgtccctgtagtctgttggggattagatctaattattttatcattgtttacaagttgcatcaccagctttcctttatactttgcctttggtttcttagatttgctctcgacattgatattgatgctccaaaggtgagaattcctttgagggcttcaggatcgtccaagtgcagtagccatttcctattggattttggtaattttacgttaaccaccatggtaagtttctagactagcccttcgagtttactagtttttcttttctgttttcttatatttcttgtactattgcaggatactcggtctgaggagcagaggcaaaacttatattcccggttctgcatttcgggaagagatattgctgctttctttacagactgtggatctgacaaccaaggttgcagtttagtcatggaagatttcactaatcagccaattctgtctcccattctagagaaagcggacaatgtttattcccttattgataggtgtggaatggcagttattgttgatcaggtattaccttgcgtgatattttatttttaagagtcaattgcgacaacaaggcatttctacttgacacggatctatttcttgttgaagatcaaagtacctcacccaagttacccatctactagaatatcgatccaagtgccaaatattggtgttcatttctctccaacaagatatatgaggatcatgcaattgttcgacatcttgtatggtgctatgaaaacctacagtcaagctcctgttgatcacatgccagatggaatccaaccttggagtcctacagatcttgctagtgatgctagaatcttagtttggaaggtatgcattataatatacaagtactttttaagtttggttgatctgtattagctttgattttttattttcacggaatctacttttttcagggaattggcaactctgttgctacttggcaatcttgtcgccttgttctatctggtttatatctgtatacatttgaatcagagaagtcacttgattatcaacgttatttatggtttgtgctaattttattaattattttcttttatgtactttctttctctcttttttttttgtcaagttcttttttctactacaaagacttttgcatatgttaagacgtttaaatataaagtttctgtgtgcagcatggctggtaggcaagtattcgaggttccacccgcaaatattggtggttctccatactgtcttgctgtcggtgtaaggggaacagatcttaaaaaggtacgctaagctgctttattttaaataataggagttagattagaaccgaaaaatctgtaagttgactagggaatacaatatacgctcttggtgacttgggtatgcttgctatgcttgctaaatcttggaatggcttcctacctgaacaataagatggtagtgttatgattctctggatcttacttttattgaagttgctttcgatgttatactggagaaaaaagccagctcacacatattcctttacaaccttgctttgtttgtggtattttcatttctgtttatctgatggatcttccgcattcttcaggccctggaatcttctagcacctggatcatagaatttcagggggaggagaaggcagcttggctgagaggactggtccaagccacctatcaagcttctgtatgtgtataaaatctctttcttcttttctctgggcttttactgcaatggtcgtcttcgcttaatgctgaaaatcttttccttttgtaggctcctttgtcgggggatgtacttggtcaaacgagtgatggtgatggtgacttccatgaacctcagaccaggaatatgaaagctgctgatcttgttattactggtgctttggttgagacgaagttgtacttgtatggaaaggttagctataatcagctatctacatgtttttataagcaggctatttttatgccataccgtgttgattaggaacgtgcgtaggttattgacaaaccattgacattctgtgaaagcaacttctccttttttttacttgacttcttaaatcctacatatcccgcagatcaagaatgaatgcgatgagcaggttgaagaggttctgcttcttaaagttcttgcttccggaggaaaggtttgtgtttgctgaacatatttcattgcgtttaagttttgaggtagtgagttatatgcgtgtgttttgtgtcgcgggtactaaggatagaaggggtaaaggttaaggcatgttgggtgtacaaaacttagacaatctaacctcatgaaatttggtttctggttaaagtgatatcagttcatttaagcctggctaagctattgatgatgagatggaaactggaaactaccaacagagccacattattatcatattttttttttgataatatcaaagccacagtatcgttgactaaggattagtaaatgataagttcttagtgtattgtttggtaaatcatgttgcatatcttagtgctccacttttctagatttcctttgcttagatttttgcctttctcgggttccctttcctgatatgtcttgtaattttttcataagctgtttttatcctttaagttctacacaacagactagtttgatagaggcagaattgtgtttgctttgcaggtgcacttgataagttccgagagtggcttaactgttagaacaaagttgcactctctgaaaatcaaagatgaactccagcagcagcagtcaggaagtgctcagtatttagcttactcggtcctgaagaacgaagacatacaagaatcattaggaacatgtgattctttcgacaaggagatgcctgtaggacatgcagatgatgaagatgcctacacagatgctttaccagagtttctgtcacctacagaaccaggtactccggatatggatatgattcaatgcagcatgatgatggactccgatgaacatgtgggactcgaggatactgaaggagggtttcatgaaaaagatacatctcagggaaaaagtctttgcgatgaggtattttatgaggtgcagggtggtgaattttctgattttgtgtcagttgttttcttgacgaggagctccagttcccacgattataatggaattgatacacaggtatgtagtgaaagaccatcggaagacatcttactgcctcacatatttcttatcagctttactaagctctgtttgaaatcaattccagatgagcattcgcatgtcaaaactggagttcttttgcagcagaccaactgttgttgctctaattggttttggatttgatttgagcactgcatcatatatcgaaaatgataaagatgccaacactttggtacctgagaaatctgatagtgagaaagaaacaaatgatgaaagtgggcgcattgaaggcttacttggatatggcaaggatcgtgtagtgttttacctgaacatgaatgttgataatgtgactgtgtttctcaacaaggaggatggttctcagcttgcgatgtttgtgcaggaacgatttgtgttggacattaaggtaagatattttggccgggggcatcttggtgtatttaatttcttataatgattttctcttaatattagccctatgcagtagtacaagaaaatcaaagttgttcatgatattatgtaattgggtttccaaaagttgcatttgtagttgatcctctagttaaatgatttcatcacagcatcattttaagttaactagtagtttggctaaatttgtttatttttcaaggttcacccgagctctctttcagtagaagggactctgggaaattttaaactctgtgacaagtcgttagactctggaaactgttggagttggctctgtgacatacgagatcctggtgttgagtctcttatcaaggtattgaatattatataaaaatttctgatggttttattcctgtttctgtgatattgttgattcttgtttgatgtggttgtgaatctgcttgattcttgttttacactgcagttcaaattcagttcatatagtgctggcgacgacgactatgaaggatatgattatagcttatctggtaaactatcggctgttcgcattgtatttctctacagatttgttcaagaggtaccatgatcactgaacctgcctcttacctaattgatttgaaatgcaaccgaaagttatacaaatactcttctttggacatcattttgttgtggaacaacccaatgaaatggttttcaggttacagcatatttcatgggacttgctactcctcattctgaagaagtcattaaacttgttgacaaagttggaggctttgagtggctaatccagaaagatgaaatggatggtgctactgcggtgaaactggacctttcgttagacactccaataattgttgtccctagagattctctgagcaaggagtaagtagaaatagagtgtggaaattattaatatgtgctatcctatcaaatatctattaggtttaggataacacataacttttcatggatctctagctcttttgacaccttggtatatcaattatcacagtgtttacttgacatcaaaatagttaaggcagattctggccttttggctgtaggtctaaagattctgaaagcttgaggcctgcaacatgtttttttttagctgaatctccaaaatatttagctcaactttttctctgaatcttcttggcacaatctcaacacatttgtatttcctgcagttacattcaacttgaccttggtcagctggaggtatcaaatgaaataagttggcatgggtgtccggagaaagatgccactgctgtacgtgtagatgttcttcatgcgaaggtacatatatattacgaaaagtatggaacacttgtatttatcgtgaggaatgaatactctttagcctgatgattatttctgttgttttttgttgtaaagattcttggactaaatatgtcggtaggcataaatggttcaattggtaaaccaatgatacgtgaaggacagggattggacatttttgtccggcgcagcctaagagatgtttttaagaaagtcccaacactttcggttgaggttaaggtacaagtctacttctctatatttgacgtacttcaatatttgcttttggtgtcaagaacctggaccttaaacaaagcattttttcttttttggtctttgattcttcatattgctaggttagggatgactatacttataaacgttattgtcttaaaaggatcgccttgctatgaaataatcacaatttttatattttatatttatcattgccttttaggcaagcttgaaactgggagtcatcttacagtgtctttgatttttgtttatcatccctaagtactatgtataaacttgttaccttctcctaactactggtatcagcagtcacttcttaggactaattattttcttaatatttgctgtgcagattgatttcttgcatgctgtgatgtctgacaaagaatatgatattattgtaagttgcacatccatgaatttgtttgaggagccaaagctacctccagatttccgtggtagcagttctggtcccaaagctaaaatgcgtctactggctgacaaagtcaacttgaatagtcagatgattatgtcacgtacagttaccatactggctgttgatatcaattatgctcttctcgagttacgtaatagtgttaatgaagagtcatcattagctcatgttgcggtacgtgcttctgagcctaattcttctatttcctggtacattttgtcatctaggaactataccatatatctaagataccaaatttccattcacagcttgaaggattatgggtatcctacaggatgacatcactatctgagacagacttgtatgtgtcagttcctaaagtttctgttcttgatatccgccctaacacaaagcctgaaatgcgactgatgctcggctcatcggtcgatgcttccaagcaggcttcttctgaatctcttcccttttcccttaataagggaagctttaagcgagccaactctagggctgttcttgattttgatgcaccatgttcaacgatgttgctgatggattatagatggcgagcatcctctcagtcatgtgttttgcgggtgcaacaacctcgtatccttgctgttcctgacttccttcttgcggttggtgaattttttgttccagctttgcgtgcaataacaggaagagatgaaacattagatccaacaaatgatcctatcaccagaagtagaggcatagttctctctgagccactctataaacagacagaagatgttgtgcacttgtccccacgtagacaattagtagcagattcactgggcattgatgagtatacctatgacggatgcggaaaggtaatctcgttgagtgagcaaggagagaaggatttaaacgtaggaagattagaacccatcataatcgttgggcatggaaagaagctgcgcttcgtcaatgtgaaaattaaggttgagactcttctctcttttaaacaatttaatatttaatacatacttatgtaatttgcatagtcacttagcttgctcagagtaaatttctacacatttgctaagcacttatagtgagaagaggagaaggaactttcttgttgtaatcattgctccacactcccctttttccaagattcttgatttatgctagctgcttgttttctgtttttccttttatgcatgtggcagaatggatcgcttctgagcaagtgcatttatttgagtaacgatagtagctgtttattttctccggaagatggtgttgacatctcaatgttagaaaatgcctcatctaatccggagaatgtgcttagcaatgcgcacaaatcatcagatgtttcagacacttgtcaatatgattcgaagtctggtcagagttttacctttgaagctcaggtaggtttacttctctttttgttatttcacgggtttatttaagttttgagtgcctaaattatgttatttttatcttctttgaatcatggtttctctttacttgttaccttactttttgagtcgttactccctgattttggtgtataattctttttctctttttactcataacctttggttatatagagatctcttcctcaaccttcttcgagtgatttaccacaaactctggattccaggcctatctgattaaggaaatccaaatattcttgttttgctggatttgtcaaattcatagcttatttttgtgcaggttgtatctcctgagttcacgttctttgacggtacaaagtcatctctggatgactcttctgctgtagaaaagcttttgcgagtgaaattggattttaattttatgtaagtgcagcgttctctaaaccactggatcagtgatttataccattttgtcatacatgacagttctggacatttgggtctgagcgtaacaacccaatatttcggcagacacaaatatgattgcttgattactttatctatatgcctgtataaagaaaggattgtactaaagtaacccctcatctgaccaccactacgtcctgctcgtgacattgaaaaccagtttttttctaaactagttgcatactggatcttaagtttcatgttacattgttgatgtaatttttgctcttgtttcaacaggtatgcctcaaaagaaaaagacatctgggttcgagccttgctaaagaacctggttgttgaaactgggtctggtcttatcattcttgatccagtcgatatctctgggggatacacttctgttaaagagaaaacaaatatgtccttaacctccactgacatatacatgcacctttctttgagtgctctttctctcctactgaatctgcagagccaagtaactggagctttacaatctggaaatgctattcctttagcttcatgcaccaactttgacaggatttgggtctcaccaaaaggtatgacatcagttaagttatgtggcacagtttaacctgaaagctgtctgattttttggtgatcatgtttcatctacttaagcaactgtctcagataattatactgttgattagaaagaatatttattctaaatcctttacattgattatttcgttttggggatggtcagcagaaaatggacctaggaacaacctcacaatttggaggccgcaggctccttcaaactatgtcatattgggagactgtgtgacgtcaaggtaatatataacaagttactcatctggttgcatgtgtatctcattgttatgtatcttttgctttaattttttcatccctacaacaaagaatactatggttatagtccttttatttgtatatttacaaaaaaagtatttaagggtcatgacttatctaatcagactcattaatagctttgaactgcgtccagaaaattcatatcgaaccgtttccgtaacagagattagcagctcttgttatattagagttgatagcttaacgcgtaattgggggtaacatgttggtgccagtgcttacaactgtttaacaagagtttggttcagtgtacagatgttttcttcttctaaaagttaaagctatattatctcattaattccttgaaagttttttcttacagggcaattcctcctacacaagctgtaatggcagtaagtaatacatatgggcgtgtgaggaagccgattgggtttaatcgtattggcctgttctctgttattcaaggtttagaaggggataatgttcagcattcccataatagcaatgagtgttccctctggatgcctgtagctcctgtagggtacactgctatgggttgtgttgcaaatataggaagtgagcaaccacctgatcacattgtttattgtctaaggtctgaccttgtatcttccagcagtttctctgagtgcatatacaccgttccctccagttcgttatttgagtctggattcagcatttggcgtgctgataatgttcttggagcattctatgctcacacttcaactgcagctccttccaaaaaatatagccctggcctcagtcattgtcttctttggaatccccttcagtccaagacatcttcatcctctgacccatcatcgacaagtgggtcccggagtgagcaatcaagtgatcagactggaaattcatcaggatgggacattctcaggtcaatttctaaggcaactagttatcatgtttcaactcctaattttgagagaatctggtgggacaaaggtggtgatcttcgaagacctgtctcaatatggaggcctgttccacgtcctggttttgcaatattgggtgatagcataactgaagggttagtaaatatttaacgtttactttgtctctatattagctaccgtgaaaggactgttttttatacaaatgttgtataatcttgagtttttcttcacattagattggagccacctgcactgggaatactcttcaaagcagatgactctgagattgctgcaaaacctgtacagttcaataaagtcgcacatattgtggggaaaggtttcgatgaagttttctgctggtttcctgttgcacctcctggttatgtttctctaggatgtgttctctctaaatttgatgaagcgcctcatgtcgattcgttttgttgtccaaggattgatcttgttaaccaggccaacatttatgaagcgtctgtcacgagatcttcaagttcaaagtcctctcaactctggagcatttggaaagttgacaatcaggttggacaacccatttaacgtttgatgatgtgtctcttttctttaaaggctctcaatagttatcattgaattgtaggaccttctgtttctgtgaaatagctactatccacttttagcttaactacccccatagtgaaaagtattttccaatcgtgatagcgctgctgattccttgtgtaggcatgtacttttcttgcacgttctgatcttaaaagacctccaagtcgaatggctttcgctgttggagaatctgtaaagccgaagacacaggaaaatgtaaatgcagaaattaagctgagatgcttctccctgacacttctagatggattacatggaatggtatgttatgttatatggttaaagttaatagccaattttttggaacctagtgtttacatcttgatcctattctgaattcttccagatgactcctctctttgacacaactgtcaccaatatcaagctagcaactcatggtcgtcctgaggccatgaatgcagtactcatttcctcaattgctgcttcaacatttaacccgcagttggaagcgtgggagccccttctggagccatttgatggaatattcaagtaaagacagtattgtttcttatttatgatatgacttaactagaaaataaaactatttgaaataatattttgattgctcactttcacgttgtaggttggaaacatatgatactgctttgaaccaatcgtcaaagccaggaaaacggctgcgaattgctgctactaacattttgaacataaatgttagtgctgcaaaccttgaaactcttggcgatgccgttgtttcctggagaaggcaattagaacttgaagaaagagcggccaaaatgaaagaagtacattatctttttctttttccgtgaaagtataaattttcataatgtgttacttactaatctgctctggtgcaggaatcagctgcctctcgtgagagtggggatctttcagctttttcagctcttgatgaagatgattttcagacgattgtggtagagaataaactcggccgtgacatttatctgaaaaagctggaggagaactcagatgtagttgtgaaattgtgtcacgatgaaaacacttctgtctgggttccccctccaaggttctccaatcggttaaatgttgcagacagttctagagaagcacgcaattacatgactgtacagattcttgaggctaaggtatctctatacaagagcatcatttgaagtacttatagtggcatgttagaatttgtatggttaagatgacaccttcacttttttgttcagggtttgcatattattgatgatggtaacagtcacagtttcttttgcaccctacgcctcgttgttgatagtcagggtgcagaaccacaaaagctttttcctcaaagtgctaggacaaagtgtgtcaagccttccactacaattgtcaacgacttgatggagtgcacttccaagtggaatgaactttttatttttgaaattccacggaaggtagttcataaggaaacagttaatctatgcttcctttattcatattctctgtttcttcaaatatgcggtatacataagcgcttaagcctagttgctatccctgtatacattatgatttagatggttagtggtacaagttagattggtatgtctgtctgcaatattcatttctaaactgaaaacagttgtcatgattttggaacttatctcatatgagtatctgtttttttcttttctatttgtttaattgttatagggagttgccagattggaggttgaggtcacaaaccttgctgctaaagctggaaaaggttcaatcctattaattcttggactcttttctttgacctgtttaactataccttatgtgtgtgattgtgttctttttgagattgattggtattgtttagttttcattgagtccttggattgtttgcacctgattcgtgaataaaagatgactggacatttttccaagagttttcacaatgagtcaagatggtacctatgttgcatgatagttagctattgactattacaggggaggtcgtcgggtcactttcgtttcctgttggacatggggaaagtacgcttagaaaggtagcttcagtaaggatgctacatcaatcaagtgatgccgagaatataagttcgtatacgcttcagagaaaggttagctgtttttcatttatactagggtgtgttaacgtatatctcaagattttataacatgcattttcaattctccattttatcatgaaataaagaatgctgaagataaacatgacaacgggtgcttgcttatctcaacatcttactttgagaagacgacaatcccgaacacactaagaaatatggaaagtaaggattttgttgacggagacactggtttctggatcggggttcgtcctgatgactcatggcatagcattcgctcactgcttccgctctgtattgctccgaaatcactacaaaatgattttattgcaatggaagtttctatgagaaatgggagaaagcacgcaacattcagatgtttagctacagttgtaaatgattcagatgtcaatttagagatatctatatcttccgatcagaatgtctcttctggagtaagcaatcataatgctgtgattgcctctagatcttcatatgttttgccatggggatgtttatcaaaggataatgaacagtgcctgcatatccggccaaaggttgaaaactctcatcattcttatgcatggggttattgcatcgcagtgagttctggttgcggaaaagatcaaccatttgttgatcaaggtttactgactcggcagaatacaatcaaacaaagcagcagggcatctacattttttttgagattaaaccagcttgagaagaaggatatgcttttctgctgccagccttctactgggagtaagccattatggctcagtgtaggagcagatgcgtcagttcttcatacagacctcaatacaccagtttatgattggaaaatttctattagttctcctttaaagctagaaaatagacttccatgtcctgtcaaattcacagtgtgggaaaagacaaaagaaggcacatatctcgagagacaacatggtgtagtatcctcaaggaagagtgctcatgtatattcagcagatattcagagacctgtatatcttacgttagctgtccatggcggttgggctttggaaaaggttggcttttatattctgcacaagaaactacctacacttgagaacattactgaatttcagtttgcttttgtaggatcctattcctgttttagatatatcttcaaacgacagcgtgtcatcattttggttcgtccatcaacagagcaaaaggttagtcttttatctgcttattacccaggtatttgattatatgcatatttgttgtttaaattgaatatatgattgttaagaagtggggttaaggttatggctatatcagtatctcttttcaaactaagcagtatccctcggaaaatcttgtctagctgaacattctttattgatggaacctactatgttgagagttatcaaatgaagattttttctttcttttacataaacctaatatcatattccatgaaatgatttttttccaactctattttttggagtttcaggagattgcgtgtaagtatagaacgtgatgtgggagaaacaggggctgcaccaaagactataaggttctttgtcccatactggattacaaacgattcctatcttccactaagctatagagtggtggagattgaaccttcagaaaatgtggaagctggctccccctgtctgactagggcttccaaatcttttaagaaaaatcctgttttttcgatggagagaagacaccagaagaaaaatgtccgagtgcttgagtctattgaggatactagtcctatgcctagcatgctttctccacaagaatcagctggccggagtggcgttgtactgtttccgtctcagaaggattcttatgtctctccacgaattggtattgctgtcgcagctagggattctgatagttacagtcctggaatttctctccttgagcttgagaagaaggtgactagctaaagcttaaatgatattctgaaaactaatggcttgaaaatttcatgggctgtgtttaaatacttaaaaccatttccaactcttttatgtatgaaagatttccctcctagtcctggctgagtcaccattttctttagttggttggcagaccaggcaatattcgttccttttactaaccacaaatcctattccaggaacgcatagatgtaaaggcattctgcaaagacgcctcatactacatgctctcggcagtattaaacatgacatctgacagaacaaaggtcagatatcactgttttatttttctaattgttctagcacatgaatgttaattacctgtctgaactcaaatgtgtgctcttgcaaagtgttcttgttggtgtttatttacgctatttggttgtggagactcctaatgatatacatgcaatactttgtttagcctccgctttatctctcctgtttctgtgaaaagtatacatgcggttgctatatattaggttattatccgtgttttattatatcaagttgatttatacgcagatcaatgcttacaagtaacttgacgcttagcatttttggggtcagaatattaagttaaacttgatattatccgactttcaatttaacagtagatgactatattttttgtttgcaggttattcatctccaaccacacaccttatttatcaacagggtgggcgtgagcatctgtcttcaacagtgcgattgtcagacagaagaatggattaatccttctgatcctccgaaactctttggatggcagtcttccacccggcttgagttactgaaagtatgttaaatatcttcaaattgtgtaacttttttttaatgatgattaatgtgcttacggcggatggacaatttcagttacgagtgaagggatatagatggagcacgccattcagcgtctttagcgaaggtacaatgcgtgttcctgttccaaaagaagatgggactgatcaattgcagctaagagtacaagtcagaagcgggacaaagaactcacgttatgaagttatcttcaggccgaactctatctctggcccttacaggtaaacattcagttatctaccagatgatatattttttctgacattactctttgcttggatttatttagatgatagattttccaactgcttgagcatgtttgcatttaagattaattaaatttctgccacatatgttcctcagaaactgttatcattttggtgaataaacttgttcctggaaaaacctgcatgacgtcatttttatacaatgatgcatcatgttagctgaatccaaatgtatattccctctcctataactatgtcttgtcactactttatctgactatatattttttgtattcacttaaatatgaatcaactctcctaggatcgaaaaccgttccatgtttcttcctattcgctatcgccaagtggaaggtgtcagcgagtcttggcaatttcttcctcctaatgcggctgcttcgttttattgggaaaatcttggtagacgacatctatttgaacttcttgttgatggaaacgatccttctaattcagaaaagttcgatattgataagataggtgattatccaccacgaagtgaaagtggacctaccagacccatacgagttactattttaaaggaagacaaaaagaatattgtcagaatcagtgactggatgccagcaattgagcctacttcaagcataagcagaagacttccagcatcatccctgtcagaattatctggaaatgagtctcagcaatctcatcttttggcctcagaagattctgagtttcatgttattgttgagcttgctgaacttggaatctccgtaatcgaccatgctcctgaggaaatactgtacatgtcagtgcaaaacctctttgtggcatattcaaccggcttgggctctggacttagcaggtgagtttatcaggttcttaaggtgtagctctattttacaaatgtaagggccaccatatatcaccaattcgccatactgattttctatcaaattcgataaatctgggtactgtctctatgcattcattagtgtcaaaagttcaaaacatctaaaaatgcagaaagggatttgattgagacttgcagggaatttttttttgctaagatcatgaatttccagttgcgcttatcagattttgttggctgctatacgaacaaagtactttgggctattgctaaacgcttattgttttacaggttcaaactaaggatgcaaggaatacaagttgataaccaattgccattggctccaatgccagttctgttcagaccacagcgaaccggagataaagctgattatattttgaagttttctgttactttgcaatcaaatgctggccttgatctccgtgtctacccgtatatagatttccaagtaagtttatacagtttctgttttcgacctgaacaattatttttggcatttaaaattttgctcacattgttatatctctttactagggacgtgaaaatactgcctttctgataaacatccatgaacctattatctggcgcattcatgagatgatccagcaagccaacttgagtagactatccgatcctaactcgacggctgtatcagttgatccattcattcaaatcgggtatgtacgggattttcttggtctatatatgctgtttactgaatgaatcttccattcaaaagacttaatcttggttacacccgtccaaaaatgcagagttcttaacttctcggaagttagatttagagtatccatggcgatgtcccccagtcaaaggccgaggggagtgcttggattttggtcatccctgatgactgctcttgggaatacagaaaacatgccagtaagtattccagagtaattcattggtttatgtccattggtttctacttggtactcgtaggacatcaattatagtcgacaagttttgtagtttttagaatttgttttgtcaatgtactacttgctacactttcagtccaacccagtatgtattttttttcttcttctaatttttcttatcttcaaataggtacgcataagtgagagatttcatgagaacatatccatgcgccaaagtactatgatcaataatgctattaggaacgtaaagaaagacctccttggccagcctcttcagttgctctcaggtgttgatattcttggcaatgcaagcagcgcgcttggacatatgagtcaaggcatagctgcattatcaatggataaaaaattcatccaaagtcgacagagacaggtttcttcctgactttgttttttctccttgtacatgttgctgtttcctgtggatacaacataaacaatccaagttgccttccattagcctaatatgtagaaaattttcctcttaacacttgaatttttgaatggcttctgatactaaacggatgtatgggcttgccagtgtttctttcctgtgctccattttgttagtacacgctaatgcgtttcttgatttggcaggaaaacaaaggtgttgaggactttggcgatattatcagagaaggaggtggagctctagcgaaaggcctgtttagaggagtcacaggcatattgacaaagcctctcgaaggtgcaaagtcttctggtgtcgaaggctttgtctctgggtttgggaaaggaatcattggtgctgctgcccagcctgtgagcggagttctggatcttctgtcaaagaccactgaaggtgcaaatgccatgaggatgaaaatagcagctgccatcacctcagatgaacaacttcttcgccggagacttccaagagcggttggtgctgatagcttgcttcgtccttacaatgattacagggcacaggggcaggtacaatttttacccgtaaatatgttcaaatttgtatttcgtggcttgcactagtcgttttgctcttggttagctgatgaggaatggatttactggtgcttataatatatttggtttggtttacgtagcatatgattattcttatacaaatttcaaacctccaatattttgcatttgcaggtcatattgcagttggcagaatctggatcattcctgggccaggttgatctgtttaaagtacgtgggaagtttgcattaacagatgcctacgaaagtcatttcatcctaccaaaaggaaaagttctgatgatcacacatcgaagagtgatattgctacaagtgagttagacaaaacctttttgctctctatgtttaattggtatagtgttcgtcttctgtatctatccaagaaattctattgaaatttccaaacttttaatgtttccagcaaccctccaacataatgggccaaagaaagtttattccggcaaaagatgcgtgttctatacagtgggatattctatggaatgatctggtaaccatggaactgagtgacgggaaaaaagacccacctaactctccaccttcgcggcttattctctatctgaaagcaaagccacatgacccgaaggaacaattccgtgttgtcaaatgcattcccaacagcaagcaggcctttgatgtttactcagctatcgatcaagccattaacttgtatgggcagaatgctttaaaggtgagaagagatctttatttcacttttaattacatagtgacaccccttttaacaattggccctaacatgttgttataagtgatattacagtggtggaaactatatgccaaattaatatgatgatttaattatcgtactcgttttagggaatggtgaaaaacaaagtgacaagaccatattccccaatttctgagagttcttgggctgaaggagcttctcaacaaatgccagcttcagttacaccatcttcaacctttggcactagccctacgaccagctcaagttaaagtctgaatctttgagctctcattccttccaatgtcccctctcgcctccccggtaaagactttttcctcttctccatttgcttgaacaaagctttatttcttttcttttttttttccttatataacccaactgcaattttagtatctaaacgcaactggttaatggttaatgatctctggtgttttgtattccctgaccaaaatctctgagcataacaaaaacacaaatatccgttattgtttggtacaagctatagtttcatggttttaacatccagccttttgcgtttgatatctaatggacatacttttcttctcaggttaggggagattaaacacagcattggtgaaaaaagaaagaacatttgattttgttcaaatttttcttgtgtagggttttggtaatcagatcgtagaaatattaagtgtgtatatatatgataacatctacaaatcgggtactgtacagactcatccaacattagactcgtgtatcgcatcacatgtatacgggtaccatatataattctattaattttttcatatatctccaaatagtcaagttttgaatcagccagtggcccaatgcataagctattatattcacagaatctgatgattttcaaacgaataaaaagggttttataaaaatacgtaacaaaagataacgcccaccgtggggctcgaacccacgaccacaaggttaagagccttgcgctctaccaactgagctagacgggcatgttgttcgacttctggtttacatcataattaatatgtatatttctaacaattttctcaattaaaaaatgtctcgattgaaagaaatctaaatctcaaagatcaggtacgatttttttctataaaaagcaaaaaaagaaaggagacgtcgccttctttctaacctgcagcaacaaatatggatggatcaaattagagataatgaaaaagtgcattttccttagctagacctagtcacttagaccaggagtgtaaaattttgttttcttgttattttaattctaatggtattccttgtaagtttttttagaactcaaggttgtcctctaaaatgtaataaaaatgtatagaaggtataattttattttaaaaaataaactttatctccaataaaaaatctagtatttcaaatttcaatgtttggattttttacaaaaaatattctaataatgttattaaaatacaacataacatgcaaccgttgacttttgatatgataaaagtatcatgaatttcacattaggagtagtaattaagtatggacagctaagttagtaaaaagagagatggtgttgattggtcattaatttatacattattgttcaattgtaaaaccatcaacctttttgatgcttataaaacgagacaacaaatcctgcagactacacattataagaaaacgagagaaaaagatatactatcgatcaattgagaaaaagggtctgtacggtttagtaatgctaatgtacttggtgggtagtggctttagtcaaggtataaataaccatcccatatatatatagattaaattactataatcttaatgaatattatctctttgattgatgattcattgattcaatgtgtgtacgtaggggaagtgacatggttgagtaacgaagttgaatggcgacttattctgaccacgactcaacttcctatcgtggttacggtaacatcctcgttgtgcgatgaccggtgcactatattggatgatcaactggcccgattgtctgaaacctatggtaacctaattatattacgtaaagccaatattttgacgaatccattctttgcaatactttacaatttggtcaatgccccgatcatcatagtcttccaaactggaaaagaaatagcacgtttagaaaatgatttatcttggggtgcaatcactgacataatcgacaatctttcactcttcgccccgcccccctcggattttgtgcagccgccctccgattccgccccagtcccctctctcggagagtaaatgatagtctcatctgaatcagtaacttcaaatatttgcctatgtattttgtgtttgctgcttccgctatcaaacatttgcctatattattgtattatatgatcatattgtatttaatgtgctaatataacaagtcaatgattaagtttatacatgattaacatcgtaagaaagatttcttatgatcagatatttaaccgtttttcataccaaaaaaaagaaagatatttcaattatgaattggtcatatgatcataaaaatagctaggaattatgatctgcacctttctcatttgtgaaataataacagtagtgtcttcgttcaatttaattattttataatgtttgaaagctactatacagattgttcccctaccattcaaaagaagtaaatgcttaatgttcccatgtacgcattcatgttttgttattgtttaccacaaaaagaatttctaattatatcaataaattaatcttttataaacaatttttttcctagaaaatcaatcaataatgaaaagatggagtatgattttgatacatttttggttttcaacataatattcatgtcaatattgcaagctagtactatatacattgttctcctaaaattcaaagatttatatatatgcataatcttcgattcatgttttgtaattgttttacgtatagttctatcacaaaagaacattgataatgaatagaatcataaaataataggtatcactaatgatggtgaattgatttacgtaccaaacacggtattcaaatcttttgatgttatatatatattgatccaataagaaacacgtttagaatagtcaaatacagaggagttgcagagaaaggttttagacaaacacagcattgttatcctaagaactaaagaaggtatatataattatatgcttaatattcacatgtgtattaattcatgttttgtaattataaatcataaaagaaacttggaaactgaaaaaaacggatatagtcagtcaaaaacttttaaaagcctgaagactacaacaaaatataatgacattattaaaaaacaaaatcataaagcctgcatagatgaaagtgtcattacaaaaataagaagaaaatcaagtaaaagaatcacaaagacagtagagtctcaacgtgattgggtgaatattgaatcccacgtaaaggtttatcttctccaagtccattgcgttgtctaaaacctttatctgcaactccttcgtatttgacaaggctaaacgtctttcttattggatcaatgtatataacttcaaatgttttgaataccgtgtttggtacgtaaatcaattcaccatcattggtgatacctattagcttgaaatggaactctaaacgccgatcatagtgagaaagaggtaaaaaattataagttgaccattcgcccttcttttcaccctctaaaacccacatgggaagactattcttcacattggaatgaccgagaaaagcgaacttccctttataagatatcatcatctttggctcacaaccacatggtaatctaatcgcttggaacttttcagattttacttcaaaagtcattataaaccgatgagtcgatgacgatcaatctcggctagataatatagaacaccgttgatgcatctgcatggtccataattgtttttgcgattgccacggctagggtgatgcttataattggttttgactgttctccatgattcttgatctgctgaacccaatgttaaaatcctacactcatcagaagctttatcacacggcatggccactactttgtgcgtccgttcgagtggatcataccctaaaaagactgttaaactctcccagctcttgtccggtttgcgtaaaggtttgaactttctcatagtagggttccaaactataggctttgtacctctctggaagcagatcaaaccgtggaccgactcggttttaatggtgaagcagctatgttttggatagggtgtttggtaactatcaagaatctgagaagaagtatgagaaacggactcgttcggtctccgattaggtttaggaaccgtgacaacaaagaacctgtcagcttctttgaagaagaacaaaagattaggtcgagtttcgaacgagttggtgaaatatggagcggtggtgattgatgaccaatgcttcgccacacaactaaaccttacgacagacttcgcaggaagccttaagaatatatctgtggctatatcgagaggtatggacaacgacgatgatgatttacttcttttcctcgccatattttcgttcttctcttcttcttcttgtggcttcatctttttcgtcgaaaccctaattcgtttcacgatttcgtttctctctgtataaggatctgatctctcgacttcttttgcctcccctaaatatatatatataaggatttttagttcttgaaatctttggaacggtctattccttgatatgataggaaaataattatttactattttaaatatttcaaagttatataattagttactaatttaaaaataaaattgcttaataaaattatctaaagcctaagaccatcaccatcagaaaattcttaaaaaaaatatatattaatattttaatcaaaacagatatattaattattatttaatagttgaactacagtaaaaactctataaattaatactcgataaattaataaacacgataacttaataaattttgccggtcctaagtcgggccaatgtaaaaattaaccaaaatcgataagataataagataataatttttttgaaatccctatgtaaaattatagtcccaataatattataaattaataatcatagatcttaagtatatattttaagactaatttttatatgaagtttttgtttaaactacaattataactctttttaaaatacaactggtatgatctatgttgtactcacataactatttgcgtatttgatccgtaatagttgattttgtaaaaaacattatttgaaaaaacattgctaagatttgtgtaaagaaaaattggattaagcttcatgtttacgtttacgttcacgttaatatcgtagatataaagacacaatatattgccaaaaaataaattaaagaagtcaaagaaaaataaaaacctaacataattatatatgcaaacaacaaagcatataaaaaattaaattaagaaatattttaaaagaaatatagtattgtattttaagtaaatatttctataaattaatatttattaacttataggataaattaataaatattaatttataggataaattaatatcactataaattaataaaattttatggtcccaacattattaatttatagagtttctactgtaatagtattgtgacagctgtccaaattggatgagaatagtttttcaaagtttctagcagaaaaaaacttaattctccttctctcatactttttattttttaattattatttttttgattggggatctcattgagatactccaatgaagatgctctaagggaaatctcatgtcaaattgttttttctttttaaattagttttcctataaaacttctggttatcgaacaaaaagggttgtttctgaaactagttatggaaggtaaaaaatttccctgagcgttcttgatatcaaaagtgaaaacggtaccgttttggacaacacagttacaatatcagttatagcgaagactttgttagctctcgagcattgactcttgtttaacgatgaaatccccagcgttctcgtctactatatcactggttaaagcaatgaccaacaaaaacattcatcagaccaatttagttattaaacagaagatggtttatataactaacctgtccgctgcttcggatttgggaatcaaagtgatcttctttgacatgaaatgttcgagaagatgagataagtttctttcttggcataacttgaatagatggttcaagaactcattgaattgctttggctcctgctcacatatttaagaagactccatgaaaaagttttgagagaaaatgcacaaagtcgagatagagaaaatagaagagacctgctccaagacgcagcctttacgaagagcgagtacacattccaatgctttgtcaccctcgtcggtacaattttctacaagcttcattattaggtttttcatttgtgtgattgctttctcggtccagtcagttttatctctgcgggatatcatggcttcaaaatcttgaattgggtttgcatctccgactatatcaattttgttctctttggcgtcataagtaatcatgcgattgtcttcatcatctgaacccgatggtttatcccgcaacaatctcttagaagccttcttcaactgcaatgaaagtcatgtcaaagagttatgaatgagatcattcaggttcctttctgaaagctgatgattcaggggaacacacctttggattctccttgacttcaaaacttccacgaaacgtgtccattatggatttattgttggaagagagttcagggtcctgctccataagtctcttgaaagttccatccattggaggtaaagtagcatccgtggatttcgatttcaactcaaggtattcataaaagcgctgataaaaatatttcatcagtatgagttgacaaattacctgcaacaattatacaaagcagaataaaactggtattacctgcaaaaccgggttaggagtaagatcaggctttagtacttcctcttccgcagaaggtgcaaggtcaagcatcttaaccaaattatctgctactgcttgttgttgttcatctggcttccatgatgaaggaagcttgttgaaagaaggaaatggaaactcgcggacatcctcggcgaaaggtagcacattgaagtaaaacgaatcaggctgcgaaaaaggtaaatgatcatcaaatagtcagattcggatagaaattttcctttcagaagataacactattaacttacagtatcatctctttcagacacatttggagtcaggaccccaacaaccacattgccttgtccatttctccagacacatcgtacaattgctaccttgtttgtttctttcatttctcttgcaatagcagatacggcaagtacagatttttctttgcttggatcaggaacaactatattcacgtctttcatgtaataatgtcttcattgacatgcagagaaaaacacaaaacagcattctctcaaactttaacaaccaagagtttacaggcaaacatagatatatgtctttatgtttaccgcagtatatttgacgcctcagtaaatcccagaagcttcatgcctttgtcagttttaaacttgagtgtttctatctgatctggtgatataggaataacctgaggtccatagcgaaagcccttgatcctttcttctggagcaataacctcagtagattctgcagtaactttgtaatcataatcaacttttacttcatgtttggcaaacttgtcagttggaggcgctttgtcagaatacatttttagagtgggaagtctctcctcagccactttcttataaacccacacctacaaaatttcacattcttattttcagaaaaaatttcacgaacaattatataaacgtgaatgaacttaagtactgaataacaacaaagaacagcaagttcgatgatatctataaactctgcacaacaagcaaaagacacaaccaaaaaagcgttaccttaatcttcattgttgggttaatttcaaggtcacccctgaacaaagtaactggagccaccctccgggtctttaaggaaccaagcagtgagagtggactatcaacattcactgttttggcaatcgcgttgctggagaataaagtcaacagatgatcattctcctctattactctctcatgagcatcaccacttaaattagacctcataacaatgctctccatcttaattccctccgcagccattttcatagcaatagtgctgacttgatcatctttcgtcccttcaaatggatctttggtaggacaagctgcgttcgtgatgagacacatccgttttttccccttgtgtgcattaccatacatctttataagcatatccatcccaacaattaaagcatcaagaactgaagccagttaaagaaccaagaaaatggtagcgaaacagtaaaaataagcggtaaactagctagcaggatacagtctccagctacagttcctcgaggaagctgcttcacatgctctgccgctaattcatcaacaactctgatattccttaaaactgtaacattctcatatccacctatctccctagcaagctcgtttccagtttctgcagaggtcacatgaaacattattatcaaagtacatcaacaagccgataatactccaagaaagaaccattgcagtactaaagaggatagattcctaacttcctactttaatcagtaataagaatagatagagagaccttcagttccaaagacaacaattccaacttcatcatacttgttgtaaatcaactgcaacaacaaaccaaaaccaataaggaaagatccaaaattcatgaacaataatttcagaagaaaaagatcgtataccttcttctgaagtagcattgaacatgccttttcaacatcagggagaacactacgcatcgcaggacctacatcgagcaccaaaaccaaaccctcctgcttccgatgaacacacacacacacatcgaattaaaagtaaaatcgagcaggactaatttctctcaaatgaaatgacaaattaaaaccctaaattactccaagaacagttccaaaaatgaatcaatgagatatccagaacataattgagcataaaacgaagtcaaaatcagcataaacagaattatcaaagaagaaatggtatgcagcaatgtagaataacatgcacgaaactaagtagaaaaagaaacatcgatggaaaacaaacagaagctgaagaaggtattaatttcattgaattgatttctgaagaaacctataagaaaaaaaaacgaaggttaatatgtaacgaagtaagattagaagaaattatacccgatttcgtgccattgaggagttgtgctggaagaagaaggtgaagaagaagaagaagaagaagaagaagaagaagaatgatgagaaaaagagagatggtgaaacgaagaagacgaagaatttttattttatttttttgaaaataggctgactgactctaacgtggccttaaaatgagataggcccattgggctaaactatctaagaaaaagtccatatgtccaacttccaatatggactctgtagatttaacaaaaatgggtattttaataaagtatgtaatgaatcatatcttatatagtatatatccctctgaatctaaacataacaattaaattttactttttatttaaagtttagaaatacagttacaaaaaattattttcactatattaattatttttccattttaaaacctcataaacacattatcatattttaatttttttcagtaggcatcctatattttttttagtaggatcccaaacttgaatttttccatgtaccgatcggtaggcatcctatattaattatgtcgcaaagatgtggtaagacccgaccttgagatcgtcgaggataaagggagaacaaagagcattttgagaaagaaagtcaacccacatttagaagaacgaacaagattcaattattcacaaaggatatcaaatcatcaacttcagtgaagtcacgcccaatgctcaaaatcatcaacctcgcgtcaccacacacatatttgtatacacttgtcttgtttcttaaccaagaatacacgtatgtaatttatttcgccgtcaaataatgatttttcttcaaaaatgcaaaacacatacaaatagttaaaaatgttgttgcgaactttcaacgttaaaaaaaaacagttagattatatattatatgtttactactttgtttactcatattattatttaatttggtataatttctgcattttaaaaacaatagatatgtaacaacaattaaatattttctttttgtaagatcaatttcaatttattaaaacatcaaatagtcttatgtttaccgtttatatatgtttcggttggatttttagaatcttctaagccattgaatttgttcgtcataggcagttcggttggaactttgaatttcagatatacaaaaaaaaatagattaaaaaaaaaagaactaaaatcacaaaaaatgtataagaacttattacatattctcaaataaaactggacctttcccttttttttttgtgagtcccatatggaagttgggcttagaaaattaaaagttgaaaaaaactttttaatttaaactaaatatttaaaaacagtctttttatagtttatatatgttccagttagatttttggaatcttctgaatcattgaatttgtaagtaacatttgcggttatgtgggaaatatgtgaatttaaatatacaaaaaaaagtagataagaaaactagagatcacaaagaatatataagaatctattacactttcttgtccaatatggtatatggaagttgggcttaaaaaattaactcttttttagtaaaataaatatttttaaaacagtattttaatacattaaaatttataaattatattaaatataggcatgggtcaattaagaaatatgcaaataaacaaccaacacagaaaccaaaccctaattccccattccctgtcttctttattcttttaggcgaatttcaattgcgtccaagcaaagcaccacctcttaccccgttgatttattcgtcgatttgcctttcggtgaaattcgcaatcggatctactccatttgattattaaccaagtcatgattttgagtcaaacaatggttgctgaagctgagatcagggttcttgacgttaagtgccatatctccgctcctaaagatcagaagaattttcagatcgacgaagttcgtgtttctgagtctgtccgtgctgagatttcgggttccgctgaaacgcctcgattcggatcggtatgtgtttttggtttcttgttctaaaaatcgctcatttttattaattgggtttcttagaaatttcccttagaaattagatcatgtggattcttctttctcgtaattgagtttgttggtttagattaggagttataatttgattttgagattagaccgttgcttgaaattctgataatgatccgattctgcatcagggcttatattagttttgggtttctttttgttctctattgcataataatgttgaatcctacataccctcttcgattaggttcgtgtagacaatggaaaatgataagattagtgttgtgctttggaaagtttatacctttgcatgaagaattagtttaggtgttcatgaatcaattttacattgttagcggaacgactctgatgctctgttctggctgttctgtttctttaattgtgccaagttcaggaatcttaaacaaaccttcttatgtacatttgttgtaacagggcatgagttgtgtaactactaccattggagaatccgccagtgactttatcccaactatacgttcagggagctttgctgacattcgaagtcgagaaaccatggaggatgaacacatttgcatagatgatttgtcagctcaccttggatcctacaacttctcggtaccaagtgctttttatggtgtgtttgatggtcatggtgggcctgaggcagcaattttcatgaaggagaacttgactagattgtttttccaagatgctgtgtttccagagatgccctccattgtggacgcgtttttcttagaagaactggagaattctcaccgaaaggcttttgctttggctgatcttgccatggctgatgaaaccattgtcagtggttcatgcgggacaaccgctttgaccgctctcataatcggacgacatcttcttgttgctaatgctggagattgtcgtgcagtgctatgtaggagaggagtggctgttgatatgtctttcgatcacagatcaacatatgagccagaaagaaggcggattgaagatttaggaggatactttgaggatggatacctcaacggagtcctagctgtcacgcgtgccattggagattgggaactgaagaatcctttcactgactcctcttcaccactgatttcagacccagagattggacagatcattctaacagaggacgacgagttcttgattttggcatgtgatggtatatgggatgtgttgtcaagccagaatgcagtgagtaatgtaaggcaaggattgaggaggcatggtgacccgagacaatgtgcgatggaactaggaaaagaagcagcgaggcttcagtcatcagataatatgacggttatagtgatctgcttctcctcagttccgtcttcacctaaacaaccgcaaagaagaagattaagattctgtgtttctgacgaagcccgagctcggttacaagcaatgcttgcaggcgagtgaaagcagtgtttttggcagtatgtacaaacaacagggatcgggtgttaccgatcaaaccattatttctctaatttgagattcgattcgatgagataaaataagagacgtagagagtgatagagagttaaggtcttgtttgtaatgtggtttctcatttttgattgatctgtttttttggtttgtttcagagagagatagagagaaaaaccagcctgaagttttggtaggattattgaaactgattaagaggatttcatttttgttcttgaggattagtgatgttgtacccattattgattgttttaaggaattttaattttaactattttgaatctagattttggaggttggtttaagaatctctctcccatatatgtggaattcagagagtttctttctgactgtgaaaggttttggaggtttatctcaaaagcctcaaatcctgtccttacttgcttctcatcatctctatctttatctctttatcttcttctcctccaacaatcttcatgtccatatatttctgatgagtatattttttgataatttttacaatacagtatttttcattacatatacataaatattttttggtgtatttctttacatatgaattagaagtctagaacttataaaagtaattcaaatgttgacaagaaaataataataaatcaagtgtgcattaaggtaactttgtaatcaatttcaaatatttagtgtacataattgagattagaaattcaagtattcattcatataaatgatttatttacttatctatatttttggtcaattaaggaaatattaaaatatttgtgattaaaaagagaaaaagggttctaagagagcctctcctctttacatttgccggctctgttcatctctacaaggagccaagtctctctttctctctaaaacaacaatggcgatggcgagtttagctaggaggaaggcgtattttctcaccagaaacttatcaaactctcccactgacgctctcagattctccttttccctctcccgtggcttcgcctcatcaggatctgatgaaaacgacgtcgtcatcatcggcggcggtcccggtggttacgtagccgcgatcaaagcctctcagcttggtctcaaaaccacttgtatcgagaaacgcggcgctctcggtggtacttgtctcaacgtcggttgcattccttccaaggtcaaatttcgaatcatctctcgtttcttcaatcaatttgttgatcatagttgacgattttgatctgttccttttgtggatgattcttttgagagttaattactgtcttttgtgatgattatcatttgcttaagcacagttattccataattactaaattcttggttgtgtttattgatgtattaggctctgcttcactcttcacatatgtaccatgaggcgaagcattccttcgctaaccatggtattaaggtctcttctgttgaggtagatcttcctgctatgttggctcagaaagataatgcggttaagaacctcactcgtggtattgagggtttgttcaagaaaaataaggtgacttatgtcaaaggatatggtaagtttatttccccaaatgaagtctcggtggagactattgatggaggaaacactattgtgaaaggtaaacatatcattgttgctactggctcggatgttaagtccttgcctggtattacgattgatgaaaagaagattgtttcgtcgactggagcgttgtctctatcggaagttccgaagaaattgattgttattggtgcggggtatattgggcttgagatgggttctgtttggggtaggcttggatctgaggttacggttgttgagtttgctggagatattgttccttcgatggatggtgaaattcgtaagcagtttcaacgttctcttgagaagcagaagatgaagttcatgctcaagactaaagttgtttctgtggattcctcctctgatggtgtgaagcttacagtggaaccggcagaaggaggagagcagtctattctggaagctgatgtggtacttgtctcagcgggaagaacaccgttcacttctggacttgatctggagaaaatcggagtggaaactgacaaagccgggaggattctggtgaatgatagattcttgagtaatgtcccaggcgtgtatgctattggagatgtgattccaggaccaatgcttgctcacaaagccgaagaagacggtgttgcttgtgtggagttcatagcaggcaaacacggtcatgttgattatgacaaggttcctggtgttgtttacactcatcctgaggttgcttcggttggtaaaaccgaagaacagctgaagaaagaaggtgtgagttaccgggttgggaaattcccgtttatggcgaatagcagagctaaggctattgataatgcagaaggattggttaagattctggccgataaggagactgataagatcttgggcgttcacattatggcgccaaacgctggagagctgattcatgaggctgttcttgcgattaactacgatgcatcaagtgaagacattgctcgagtctgccatgctcatcccactatgagcgaggctcttaaggaagctgccatggccacctatgacaagcctattcacatctaaaagggaacaaggtatgtcacactttggtctgatttggttttgttcggttttggtttagatttttgatttgcggttttgatttcttatgtatctaatcacatcccacactaggaagaccttaaaggagtgagccacctatgacaagccaaatcgatatcttaacctggttggattttggttcggttttctgtggtttagccttcaatttgtcctttatactgtgtttttattcgttaatgttcagatacgtgttaagcctgatctttaataaaatattcaacattcactcaacactttttattgcttccggcttgctttctagtttttggtttacactaaacccaaaaattgattagtcagttcatacgttaataattaggggatatacattatgcattcactaagagaccaaaattaattcaattagctccatgattagataagtacatacaatttgatgttatcatctaatgataactgtatactatatttgcaattcttctaacaatggtaaaaacttttttcatcgttcatgtcaacttctattcttgattctgtttttgactaatgcgttgtacgtaaattactctaatataaatactcattgctttgaatattattttctaccacaaacttggaaaaactaaaattactagagaaaacaagaatggctgcgaatctaaggaacaatgcgttcttgtcttctctcatgtttcttctcttgatcggttcatcatacgcaatcacaagttcagaaatgagcacaatctgtgacaaaaccttaaatccatctttctgtcttaagttcctcaatacgaaattcgcatcgcctaatcttcaagccttggcaaaaaccacacttgattctacacaagcgagagctacacaaacgttaaagaaactccaatctattatcgatggaggagtcgaccctcgatctaagttagcttacaggtcatgcgtagatgaatacgagagcgcgattggaaacctcgaggaagcttttgagcatttagcttcaggagatggtatggggatgaacatgaaagtttctgctgcattggatggagctgatacatgtttagatgatgtgaagagattgagatcagtagattcttcggttgtgaataacagtaaaacaattaagaatctttgtggtattgctcttgttatctctaacatgttaccacgtaattaatttgaaaatcttcatcatgtgtttgctctgattaattgtaattgtttgcaagaagacaaactaaattaatatacttctattataatgaagctttagtttgataatatccaacgtaacccatgccaatacaaaaaggcttcaaaaaatgtaatgattgataattaagtaattttgtttttgtagtattgtatgaaatattgtttaaatctttcaatttgtaatgtaattttttatgagatttaaaaaccttaatttgggaaaagttaactagatatataaactgatcttagttttcgatgtgcaagaagtagataactaattattttatttgtaatcaagtctaatccgtgatcattgttgtttcaaactgttttttttttttttaatcatatatcgtttgttttcttattataatttttttatttgtagattccaataattctaatgtattggtagaattatattgtagtaaatatgtcccaaaagaatataattcatcatatttttctgaatctttcatcgcaagtcgcatagtaactaccaaaaatgttttccaacatgaagtttggcagtaagattagtgccatcatcaggcctaaactttgtttgcgtaaaataattattcaaaatatgattggtcggatcaaaagagaagtcttggtatattggtcttctacaagtgcagtattgatggctaccaagataatttatattcggtcatgaagaaatgcaatcattcatatgctattctactcgtgcgattgtggtaaaattggcggttggaaacaaagtgctgttggcccagtggtaaattttaaaggtggaggtgttgggttcgaggcacgttgagagaaatctcttgttcaaaagagatgaatttaaccttgtgtaaatcccgcctctaaaagatatagggtttttgaatctaaacttctagatattcaaaaaaaaaaaaaaatattggcggttggagtgaaatgtaaaatgagccttcaaacttgcattgatagaaaacggatcgatagacatggattttagagcaactgcactcgaaatattgtaagacgtctaggcgaaatttggaattttgtaaaatttggctaattaaaacttgccaacttgcaaaaaacttatatcattttacggtttatcaatcagattctatgttgtgatgtcaatgatattgtaaattattgagtaactaatagtggaggattacgcacacttcaaaatatcgcatgaaacatgataaatttgcgttgactaactactaatgacttcagtctgttatacaattgtacggaattttgaaagtttgccatcactgtcaccagcctcatcaccatcaccatcaccacttcatatctcatcttgttttctcgtcatctattcttaccaaaattcagaagctctctttttcttctctctttctataacatatgagagaacaaaatcagtagctcacaatctctcactcgcacgtccatccacaaactgaaataactatgaatgagtatttagacatcccatctctcaaaatcagtgctatattctgaaacaaccgacccatttttttaaaaaaaaatataattaaatattcccataaatatctaattaaaccaaccaataacataataattaaaccgcaagtcagaaatactattttatgaataaataaataaataattcgatcaacaaaaccaagaataactgacaatcctaaccgggttccaataacaaaaaacaccaaacataaaacaaacgagttcctagatcatcctctcttccttgtcatgattccacaatcacactttatctttacctgcatcaacaacacaatgagatgcgtaagtattatcataaatacttagtgaggcgatcctcacatctacgagctatacacacaagcaaataaaaatgtataatcacgaatacaatacaaacaaaccagtcattgaacaattcacccaaaacacattcaccacacctacatatcatcactcaaaacaaatcacacaacccaatcgctcagataaactcatggtcacgcactcaccttaacaaattgattctaatagcaattaaacccaggagagactctccttgcgtctgaaacagttcagaaacgtcctacaccaagtccacaaccaaaagcaaccttgaagcaaactggacaggaaaaaccagaaacaagcagtctcaaagacaaaaccctaaaatacaaactaaccgttaactattcaatcgttacggtgaaatcctagccgcagacgtcacaaagttgcccacaaaatctcgtgccgatcggaaaacagacgagaccacgatctcagtttcaatctccgctgatcctaattcgcgtctgagaaaatgtgtctcacgaaactgcgaataactcaaccaattttaatccaaatccaattctgtaaactggagaataacgataaaggacttgggaataactataccaacttttgttaccttttaccacgatttgatatgacgaaactgatttctcccaaaccctaacgattctgctccttctccttttctctttttttcttctttataaaacgaaaagtggctaactaaagccctaatttcgagtttccttattttataggcacactctagggtttccaattaacccaaccaattaaaccggatgatttaaaaacaaatcctaaccgattttccggttcacgggcgttacatattcttaaatattttatccaaactcgtaagttttgcaaaataccctatttcttgtacccagataaagaaaatggctctcaatttctttctctattttaatttataattaaaattaaaaatcttgccatttgataaaatagacgtgcggaagaagtcgaaactgcaaacaaaatggttatgatgagatgtcgtgacaatgatggtttgtgtggtggtcagaagcaagtacaaaaagatacttacaagattgcgagtctcgacttatgaacggcatgatattgagcatgatggtcgattgatggcctctaaaagtttcaatcgcctcatttggacaacttgaccgaacatcgacagttcatggtatatgaaatccattatgttctttgagattttagtcgcgaatttcttgagaatttgccaatcacaaacatgtaaatttcaaatttattttattcgaaaataaatttgaaatattttgttttgctttgtaacagtaacatctaaaaatttagtttgggttatttcttttgaggaaaaatataaattttagttgatttgaccaatgtctagaattggagtcgttaagttcactatacgttatatcggtggcagagatgttttgatcaatgtaaatatctaaaatttcttgagaatttgccaataacaaacatgtaaatttcaaatttattttagatttgaaaataaattcgaaatattttgttttgctttgtaacagtaacatctaaaattttagtttgggttatgtcttttgagaaaaaaaattatatttttaattgatttgatcaatatctaaaattggagtcattaagttcactatacattatcttggtggtagagatgtttggaattgaaggcgaaagaggtggtattgatagaattgaaaatgacagcgttgatagaattgatggagatggtgctaaaaaagcgagcacggtagtgagaagcgagcataagacgacaatgatgatggagttttcagcagtaagggaaagcaagggtaaaaacatcatttgtccctctccggaaatgccaaattttgtaaagacggaaagaaatactcttttcaaagattgagtccaaagtatgagtaaaagctttatttgtactttccaagaatgcccaattttataaggtgtgaagattaaaaaagagctcacaaaaggcccaaaccaacaataatcccattactttgcatataacttattttttataaaaatatatgcagactttaaatgacatctttaatttttaaaattaactaccatatagattagccaaaaatagaacaatataaaaaaaatatttgacataatcttattaatttgcatcatcttatattgagaagaaaaaattctataaatctactaattgaacctatataactctatctctcacacaagaattc

SEQ ID NO: 1192 - DNA, 95295 bp, Arabidopsis thaliana
aagcttcttgcaacgtttgttctctgcgttgtaatatgtgcttcgcggtatctttctccaagtttgcagtaacgagctgcgagactaagtcttcaatgttcttttgcatatcacaagtggagacttccatctgttgaaaggacaagatgctctctacttcagaagtgatgtcagtatcggtatcattgtcatgaggaatgacttgtttagggttttgattgaaacggtccaagagagtggcgtaaccatcgtagagatcttgacagagtgagagaaggagagggcttctctggtaaaaccattcagcacgttgagaaaatgtttcaccggtttggttatcatcaagagcagagacccgcattacttgcatccgagactcaagatctgtgtccatattcaccaacatatcaaacaaagtaagcacaaaaacaatatacaaagtttgaatttttaagtgtaccggagagagatggcaactgtggaagaggagactgagaggcatccatggattctgtcgattgctttgctggttaagagatggaagagaaactgccaaacaagggaagctcaatgaaaattcaaaaaccccattttcaaattatagggaaaaagaaaggcaaacgcatgaaatcagtgagagagattgatatatggcaattaatgggctttgaagaatttaccataaatgctgcaaatatccgacagggtgagagaaactagaaagcataaaagaggcagtaaaatcagcctaatttaaaatttgtaaatgttccactttaggcattttccacgcaaacctctaaatcaaaaccacatgtttacttgtgtgataacgtcaggattttagtcctgactacatataaagaattgtagtcaggattttagtcctggatctcaacgcttatacctacaatgtagtagtgtggtcgacaatacaaacaacctaaacatctctaaacacaaaatctcttgaataaagatttaagacgagttaaagaaaggatcaaagtctgttttgaataataaattttagtagttgtcaaacaagagtcataaagcatctcatactcatagagaaagagtgatgaaatatccaaacacacgataagtcttagaaagcatacatgatattcttcattaatttaggtcataaagatagatagagggtgaatcaactcagcagtagaacatgacacgcttcacattctctttcagagctgggagtggcctcactgcagcattgacattaggcccgcgtgtgcttctaccagccattccacctccacgtgccatgctcccactagccattgagccactgtctgatgtctctggctccatgtagaatcgagccctaaaagctgctagatgtgcataatatgcagggggaactacaatatcccaaaacaaaaaaaaaaaacattgaatactaaatctctctcttctttatatcaaaatcaagatgacattaagggatgggaaacacaaaacttaccaattgaaactgagcgtgtgcatcttgcatacctgtacaaatcaaaaaggtagtttaaatgttactcttattttccttgcaatcttgcaaacacttgtaacaaggaatatgttacaaaggtaagaaatcttacgtgtaacataagttattggtcagagattgaagtccatctgcagtaaagttgttctcatcccaaagaacgtggtaatgagcaggtcgagaagtgccctgttaatggagttttgatttgttaaacacttcaaataaattctcacccacaaactcatttgagattgtaaattatacctgaataccagcatgactacagaggtaaaagtcaaactctgtagggtggcagattttagagtccacaacagtgcctacaattaacaaaggggttaaaaaccaatgcaagggattttcagctgattaggtctacgcacaaaaagcttgacaaagatccaaacttgtctcaccaggtaaaatattcccacttctgtccaccgaatggcgatcattgtggttctgagcaaacagcctcgtgtgatgacgcttctgcaccaccacaaatgtcactggtggttgataacctgcttccagcgaagcacaggcctgaaatgagttgaaataataatcagattaaacagaagaaaacgagcacgcaacacaagccatttgttagaagtaactgttaccttgcggatggcatcaagttcatagagcaaaacttggtaaaattgtccctcactgactccatccctgtgcagaataaccatataatacatttcagaaagaaagacagaaagttatttagtcaagtaagtgccataagaagagttaatacctgtagaagatgatccttagtggtttatgcccagttgatctacggaaggctatgagcaactccctgttcaaaagtaaggggagaaacgtacagatctgttacttaagagcaagctaaagctaaaacccaatcacgaaaatattaaataacatccacacgtactttatcatgccaccagtcaccacacctttctgaggatccttccactctttgaacagatcctgaatgagctcctgcctatgcgcttgagcgcaaactaatccagcatatttagtgatttcaggccaatcctgagatgccacaacctgaaaacaaaaatttcgttgtcaacaaaacaagcacaatttgaaaaggttaaggccatgaaaataaacaaaagcatccatatacagaagtagatcttaaaggagaagctaacttacagcagcaatagatgggcttgaatcctctccagggtgagggtgggtaacatcagcaccaaatataatggtgggtcgatcactgactagaggaatccgcctagatagagcatcaacaagcactgtgtttcttcctccaaccttcacattaatcttcagcgcaacattagccatgtattgtttgctcatcttaaagacatgctttgtcaggcaacattgagagactatgccgagttcagtctcacatatgcgtttcaaatcacctgcaatggatattattaaggaaaataagttgagagtgtgttcctaagcagaagtagacaatgaaacatccgagaccatggctcataccgtataatgatccattattatcgggcagaatgacaataagcagatcaatttcttttccttgggagagttttgatgtggcatcatgatatctagtcttcaagaccttctctacttgctcagggcgagcactgactggtgggaggactggttccggattaaatgcctgcaggtaagaaataaaaaattaaagggaaggaatcagtgtaggaaaggttaataaactgatcaagtttgtgcttccaaagactcaccatgccagatacgtaacacatttgagcaagttcctgacaaaatgtacgcgctagattgtcctgcacttgcctagaaaagttgatgcagatccaattattcaccgttccaccattgatcattttctgcagagaagactcatattagccagacaacagaaaacgttgtgatcactttcaaaaaataacaaagacaaattcagtgtgtatctacatagctacatgaacaaaatactctctgcaactagtcaagtgccacacccatactcatatcaagagaatagcattttagagtaatatgtctcataacagacaaataaataaacaattttcttgccaattacctggaaatatacagctcagccatgatttacaaaatattcacataaaaatgacagcataggtatatataggtaacacaagcaagaaacatgtaagtgcatagttgaaaaccaggaacattttcgtctagttaccttattcatcatgttccattgaccaacttgtggcagacaagtcccttcccttccagactcgtggtacttaagctgcagaacattaaaatcagattggaaccctaatttgagtcattaagatacagagaaaaagtgtaatagcaaagagacaatgggaacgattactatacccatggaggaggcagtatacgagcctcaacagaagccagagaagtacttattttgatgccaaactcttgagcataattatctttagcataatcattgagttgcaccgtctagaaatcagaaaatattgtataatgttagcaataaacaattgagttttcaacaacagcagccagaagacacacgcgctgctaaattaagagcacaactctgaagatggtaatctgcctcactatttatgaagtaaaggcatcatctcaaggtaaatcactctcttcaagcaaacatatgcatccaagtaaagaagaaacaggtttttaagccattcattccataacatcctttcagccacaagtttatatgattaaaaacaagttagatatgaattgagaaaatcacttacttcaagtaaacacatgcaaccaagtaagaataaacagattttacaatgatctattccacaatgaggctttatcaccagcatacattatttaaaacgactatcaagataggcggacaaaaagatactcttgattcaagtgaaggaaaacaaagttatcgaaaataaagaaacatacctgtaagatatctttttctcgatctatcgggcgctgacaggtaaccttcagcaaagcagtgatctgtctctcattcaatcttttggaataccgctggccttcaacaatcttgcatacctgtgcagcaacacattagaatcggaagtactggtgagctaataaaacctgatgacgtatttcaaagttacctccattggtaagtaattaggcctattagaattcccaacttgcaagcatggtagttgagtgtgctgaatgcgaaaaccatatgtttcgtggaagtattctacaacagatttctgagtatttctttcatctactgggaatctgaaaaggataaaaacagagagtaaaaattaatttcatcaagttcaacattcgcgaaataagagtagtaaatctaaaacaaatacgcacgtcaattcccgagtggccacagcagtcaaaccggaaatgcggtacttccggcgcatgtttcctcgatgagtcacttcaactttgacacctctaagagccttttttatctgttgacagaagaagattccaagtcactaagcaaagaagagtagattaatacaacatttcacttactacagaaaatgacaattgattcataccttaacacgatcagcatcagataaaggtcgagaagaaatatcccggttaagcaaatcacagacaaactgaatcacagggtttgcctctatgaaggctgtcgatgacatatctacaaaacagacaaaattgcagcacaaccatgagttaaacattcaaggagaaccagatatcaaaaattattgaatgtaatacagcaagccatcacaccaatattgagtgataagcccatctgtgtaggacgaatgctttggtagaatccacgccagctctccaagccatcccccaatgattgtttttttcctatatcaggggaataaaaggaccggcccaccggaatatacctgattctaacatgttagcaaaactaaaccagctgagacttacaagcatggtagtaaagaagcaaacatccataggatgagtaaccagtacctagaggtcggcagctcacgaagaacaatgtcaagaacctgcagagcttcctgtggggcatctgattgtttcccctccaaaaacattcctaggtgatgcagatcagcacgtgcaactagcttgatcacaactttaaattccctttctcgtctgtaaaataggaaagatgttattattctgaaacttccttattaaaaaaatcaacaagaaaccataagaactagacctttgacctccagcccctacttcttcgtcaagaagattgattctgaactccttggagttaaagggaagtggaccagcagtgtaaagactttttcgaccatcatacgctggaagacgacttccaaggtgagaatcacgataattatcaacaagttgtttcatcacagcacgattgacaccccttgatgtaacttccggagtaatggtaacctaacagaaagaacacagttggtcaggtaaatttataaatagacattagatgtatggtagctaatactaagggaacacaaaactcacatcataatggtgcaaatccttatcaggcagttcagcaaagaaatggttagccttcacaatgcaacgctttccactctgtcctttaccaggcctcattggaaacttgaaagccttgctagaagaaggtataggctggattgcctgactgggagctccttgttcaacagagagttgttcaaattgctgagccagaacagtaggttctggtacctgggtaggactcacctcagacagtgtaggctgagaagacaccgcttgataagtaggtgaggtagcttgatgcagctcgggaactgattgtctctgcggtggtccagaagaaggtccacctccacggccaccgccataccctcctcgacctccttgatgaggaggtcctcctcttcctcttccttggtactcttgtggtcctccatactgttgttgctgttgtggtggttgcccatatccacgaccaccacgacctccctgttgaggttgaggagtataaccccttccaccttggtgttgtcctcctccctgctggaaaccacctcgctgtgaaccacgtccaccacctgagactggaccagcttcacgagacccagagccttcacctccttcagatggagcatccgttcttctctttctcaccatgatgattcctgtgaaaataacacaaccacccaaaaacagtgggtcattttaaaattatccttgaaaataagaagcaaacattgaaaacaagcacaaaactatcgaaatatagaagcaacagaagaaaaccctaactagcttcaaaaacaaacgactcagaagcacgaaaaccagtgattagctagagagatagaaaaccaaattcaacagcccaaagcaaacatagaaaacctagtaagaaacaatcaaagacctaaacagaaaacgaagtaagaaaacaagcacgaaacagtaagaaatttgaagcaacaaaaaaaaaaaacctaaatatcttcgaagacgaacacacacaccaaaacagctacgaagctaatagatccgaaatcgcaaagatcaactaaacatacaacactatcagtgaaccataacaccaaaacgaagcggatccacccaatcgagtggaaaaatcgagttcatacgcagatcgaacacagattaagtgaagaacaaacaccaaaaccgccgccatttttacctgaaaagcaatctctcgccggagaaactaagattgaccgagaaaatccgtacgaaacaccaaccctacgtcgctctcgcctctctgtgttctctctatatctttctctctctctctaactccgaacaaacgagataactcaaagaaatgagattttactgctacactttaaattcaagggttctgtggttagagtaagttacggaattaccctcttcattaatagctggcatatgtcgacgtggcgagtcagggttgggtctttggaatgctgacccaaggtcgtgtgtagtctttcattgtttgtaatgcgctgatgacgtggaattgcataatgtttttttaatccggaaaaagaagcttctcgaaaacaacaagacgaaaaacatttttgtcgtttatctaccaaatcttttttaatttattttactaacagtatatgtattatccgattaaatatgattagtgtgatgcgttacctcgattaatcttcaagagttagttgcattaatttaaatatttgttttagactataatatacctcgattaatcttgtaaagttagttgcattaatttactatttcaacgagagataatgcatgcacaagtgttcaaaattagtagaccggccgttattaatcttattattaatctgtagtaactgattagatcataatttttggcttacgttacgtataaaggatgttatacagttaagtacaacagtttaaaattggtacttgtgtgtgaagataaaacagtggctagagaaaatgtcgtgagtcaaggcgactgatcgagtagtactaacgaattgtacattgtcaaggaggatttttcatgcaacgaaaggcaaaatcatgcgaattacgtttagttttatagactatatataagataaagtgaatgattatagtatagaggtgaatagaagaactatttattaactgagatgggtcatgggtggtggggcaaatatgaatatagccatttactatatagataactctctttcgttttcatagaaatatgacctgcgatttcggggaagtgatgcttttttacaggtttgccaattttctaactttaggaatgtggtggctgtcatcacgtggtatgatttgtttgtttaattcaatttactttatttgatggttagctctttaatttagtttcactagttgatttgcttctgtacctcaaaaaaattcatatactcgtaacaaatctgtattatatataattgtcaaagatgatttatacatatataacaaaattggttgctcgtgcgtgaagaagaaatatgagctagagaatatgtcacgagtaattacatgctgacgaaaggctaaatcttggggaaaacgtttagatttctttttgtgataactgtaagtctatctcaaaatgattcgtttgctttgggaaataatgattcttttcattataaacattaattataataatcaaacgagaaattaaaaggcgaaagattataataatcaagcgagatgtatagaagaacttatatatgatttctcataacggaagaagaacttagaactcgtcaagtactactacctcgagagtcgagatgaagattaacggcatataagcattgatatcaatcaagattggtgtacgtaattacgggcaccaacgcacatgcatgcatggcgagtctagctagaaccgatcgaaaacgttggtttacgatggaggtttgtgttccttataagaactacgtacagtttggctcatgtttgagtcgattggtgcggtcttgacgagaaacgactctcacggctcggttctcttctataatcaatagatgtttttgtacaagtttacgtttccgtgttaattaggtgaaagaatatctagacactttacctaacaaaagattgtctagatcatatagtaaggtgaaaaaacataaagttgtagacaaaatattagatgttgattggagttctaaatcgagatattgtaggaagccgttaagaggaagaaagttacaaaagacttatgaaaatgatgtttgaacgaagactttatgtaaaactccataaagtcttagttttcctttggaagccattagcgtatggtttggaatttggatagtgaccattaattctatcgaaaacattacttgtaagtaaatgctatcttaatcatcggatattatccaattctcaattattttagagagttattatgccttcgaaatctagaagtttacataaattacatttcaattccaataattatatccatcacacactcaccacacacacaaagaaacattcgattctctgcacatatcatttcttaacatcaagtcaattaaattactttgacctccggtcaaaaaacttcatggacagcgaagtgacatgtgtgtgggactcatcaggttttgttctaaggtcaagggatgcattgattatgagttttaacaagcggtaaaaaaaaagagataaatgatgaattggtgggggcagatcatatgaatttactttacaaaactctctttcgttttcgtagaaaaaaagacctgcgattttaggcaagtgttactttatgacagggtttgataatttttctaaactttgggaatgtggtggagtcatcacgtggaatgatttgtttgttttaatagtagtattcaatgttactttttcttcatctaaattgatttgacggctctttagtttttcactggttactttggtctttacctcaaattggtatactcaacagaaagctacttgatagaaaacccatttgaattcttatcattgttttggtaattgagtattcgtatacggacgatacatcatgttgacacgacgatagatatcaatgaaaatgaataattacaaataaaacaataatgaacctatggactatttagagaaatagttaagttttctacaaacatatttcttttgttttcagacaaatttcatttctagggcccatataaataataatatcttgatattaggagtagaagatatcaagatgcagaaacgatatgattgatgtaaatcagtgttagtactaagtactatcttgattctcataggtcatttttttttaaatacgagtttcaaaaccgcgagctcccaataatagatcatttacactcaatattgtaacaattcttggactgtttgatgattcgattttgtgtattggacagtttaatttaatgcagcagaaagacgaaacaaaaccaaaggttagatattgactattactaactagttcttggttatgactcagttattttacggaacagaaatattctgttatgtatcaaaggaagaagaaaaaacatcaatgattatacatgtcaatttcagccatgtgcattgctctaagtgaatttaacttttactttggagaattgaaatatgatccaaatatgaccagtaagaaaaatgaatacaaatttaattgctcaagactctttggaccctggagtggttggttgcaattaccatgcctcaaatacatcgaaaatctaaccttactgattagcacatacaagtttgagatgtctggatctttgtatactctgactaacatcgaaagcaaatgcaatggttgaaacatgaaactagactcttagacttgaccattaggatcttcttttctgttttcatttccttaaaaaagctaaagccagttagcaatgtagactctgatggaccaaagtgagctattatgttttacacacggattctggaaaagcataaaattgggaaacaatgagagaattaggatgtggaagcaggcactatggatggtattacaatggaaggaaagaaaagaacctgaagctattcatttgcagaatccatgatgagtttagtttgtcaaatcagggaaactgtgttgactcaataagcagcgtatctgagcacagacctgtatggcatcttgagtctgtttcaaaacatgcaaacacatggattatacccacttgaacatgaaacaactgaaagaggaaccatgaaaaacaagtgacaagaacctggttaacacaacacagacatatctggaaacatatgagttgttcgtcggagttctgatgcttaggtagagaagcagtattgcttgacttcagctgacaatgttgaacagaagaagaaaaacgatagcagacaaagagagtgtggacacaccatttatttatcgtaatcgtcccaagcctatgaacataatacatcagaatagaaaacagagatgtgtttattcactgccaaatgcacaaattgttcaatctgtcttattttcacaggattattacaaatcagattttgttgtgctagaacattttcccaacaccatcttttcttggaacggattctgaaacatccatccgggaccaattacccatcagagatgccatttgatcaaccttatcatacaacccaagaagcccaccagtgtgtatgaacaatatcttccttccctcccaacatttgggatctttggtgatctcatttatcaaaccatacgcagctttcccactagataaacactcgaaaacccaaatgtcaatctcactactttgagagattcaaggggtagtcacgaccataaacattactaggaacaaggaagaattagaaagactaacatacctgtaaaccggatcaagaataacaccagttgaacttgctactttctttacaaactcaagctcctctgacgtgttcatggcatatccttttcctttggcctgcaaaaagaacacgagaatcaataccagaacctgtgtgcttaaagagaaaaagcttgtatcacaattttccacctagtggtatttgcgaaggagccaagagaaatcaccaatgcgaaatagacaacacataaacagagaagtcatgaaactcacattgtggatgttgacgatatcacgagagttaacaccagcgtgaagtccatccagaagcccttggacaaagtcatagaagtaatcaggatcatcgcaaaccgagaaagcatgaacctgtacaatgaatggaaacttaactgagccatctgtcaacttcacagtgagtgaaccaactaaaatttaaagaatataccttggcttttagagctcccaaccaagaccccaatgaaataccagcaattgtaccaccactagcaatccaaaagaaaacttagatgagagtgaagcaaacaaaagtaaaaggcaagaaaaaattacaaggaaagcaaaagcagaacctgccacatgctaccacaatatcatcaaatttcaggtcatcgggtctataattcagctgctcctcaatttcccttgctgcttctatataacccctagacgatcattgcagggaattcagctttaaatggtctcaacaatctaaaacaagtaataataacaacaaaccggttactgcacttagctatatcaaaacagtatctatgagaacacagtctcaccaagttcccaaagagttcgatccaccgactggaataacatagggtttctttccttctttttccagtttctctttcagagcattagtaagagcctaccattcacaagaacaagttttgatcaacaatatcaggctaagtaaaaactactcatttcttgttcttagtaagtaaaacttaatgcaacggacttaacctcactcccaatggaagaatactcttctttagagattagatgaacattagctccaacgagacgctcgacaaggagattcccaaccaatccaggatcttcatcagcaagaagctgcaaacacaccacacacacataaacatgaattcacgaaaaggtaagtgaatcgatgtaaggtgaagaatcagaagcgagaccttggaagtacggagaataagatgagaattgagattaagatagttagatgcagtggctgtagcacgacaatgattgctctgaataccgccgatagtgattacagtatcagcgtgttgatcaacagcttccgccattaagaattcgagttttcgtactttgtttccactcaattccattccggtgaaatcatctcgcttgatccagagttctgtgccattaggaagaccaggaagattccatcgatggatcggagtaggaagctgaagaagaagaagaagaagatgatcagtgaaaagtaatggagaaggagaattgaaacatagagaaaattgaaaattaacgtacgtgagcgagggagaaagtgtgagaaggaagcggacgaagatgagaagcccaagaaggaggagagtaaggttttttggtgagaaaatccgccattgaaggtacggatgttgcagacatgcttcttctcgcaagctcgagctttactcttgagagtgtcaagcttcgtcctctcattgcttctttcttcttcagttgttgactctcaaatattcctcttttatgggcctcggcccattcatactcgggtcgggtcggtttgggtaattcggatcaatacttttatgataaatcatttttcagttttaccggtaatcgaatttcggttagttatgttattttgatgaaatattggttaaagtttgctaattttcggcagagaaaaatatttttttatacatgaatttttaaaaaatgatcatttaatacgtgaacttttaggtcggtcaaataaaacatgataaaaacgttgacccggtatttaacacaaaaccaaatattgaccagaccaaaattcccaagatgttaactggcgttaacgaatccgataaccatcgttagcaaagtccacgtattgaataactatttttttaatgttcaagtataaaacgatattttcccatttttggattagagttacaataaaaaaaagttggtcaattttgccaaattgataaaaattggttaagtaccaagtacttcaatagtataactaagttcattattcaaaaacaataacaatttcataattaatgtcttttgaaatttcatatccaatatataagtttacaccacttatatatcatggatacactcacatcttcgatctacgcataaaagtattgcagttggtgggagacaacatatacacttattggttatgtgacaatatatgtctctacattttttctgtctacactcattggttgtggtacatggtatgtttgtagatttttccacggtgtatgacttaggaggaggagtacactcacaagttccattgttgcaatatgctagacctttggcacaaggcagaagatggcactcatcgtttctttggcacttggcttccactagatcttgtccttcacatgtataagcaatgttagtttaacaagatttgtcataaagaacaaaatgatttataagattagtttccaatcatttgttttttcttacatttttattttcttaggctaattctaaagatcacttttaaacaaaacaaaggatcccatcccactatattatttgggaagtatattttaaatataaccttaatttttgtaagtaattacataggtatgccattagaaataaaaatttaaagagtaaattaatttatctctttaagagttaaaaagtcaaatactaatttaattaattaaatttaattaaaaaacgaaatacattattaatttccaaaaataataaccaatcaaaattaacatataagatttgatatataaatttcaattaatttaatttaattagaaaaacaaaatacattattaatttccgaaaaaataaccaattaaaatcaacaaagtagatttgatatctaaattatcatattaattttttattaattattatagttcacttctcatctttatatgattctattttttcgaaaaaataaaatcatcattataaaaaaagaattagatttttcgcatatgccataatttgaatttttaaaaacgaatataaattgttcaatacataaaaaaatattataacgggtgaaaaatagatttaagaaaactttctactgagtaacaggtcataatttgaaatatttatattcaatttcatacatattatattgaaaatttataatcttatatactacaataattaataacatattagatttttttatgtgtatgatgtgattcaatttttaatacaaggtggaaaatcctataatttacgggtttagatcgatattaatacaagatggtatactacaggtaaaactcttaaattaacaatcaaactataaatgtataatcttaaacactaaacaatatagataatatcaacaaaacatatacaactcacagtttactatacatttataaacaaataaaataatatcatatatttttaaatcatctttacagtaaaagtttttagtttaactaaaatataagcgtacatgcggtatactgcaggttaatatctagattatagggcttattggatctaaaaacgggtcatcaaagatttcctaaactgaagcaaaatatactgaatattcgaatatctatctgttaccaaattataaacaaataagttcgtaaaacaatttaataattttatatacgaaatcaattaaatcttaatcacataaaaattagcataaaaaaagtattcaacaattaaaaaattatcaaatctctgtgttatataagttttgatactatatttgaataaagtgtaatatacctttttaatttgtattctttaactaataaaagctaactaatatatttgctaatcttatacctatcaaaaccgactatcgtttattatctctataatatttttacaagacttttttttggtggatttaggtaaaagtgcattcgggttataaggtatattcccgtaataaataaatatagtgcactcctatgttattagctaaaatgtttagattataattcatagtcatgtcattaataaaataaatggctttttggtaagacagatttggagggacgggtttttgaataaacattaataaaaaagtaaaatataattaatccaccgtttcaatacgggttaaatctttaatttattattttttaagaccactgatattaaacatatcaaatcatccaaatttagaaaagattatataaaaccaaaaatgttatgtggtatgtataatgttactatatataaaattaaactataaaatataaatgtattagagaatgatacaatttgcaaaacttttatatataaaaaataattcttaaaattttaaaattattactttaaaattatcacgggacgggtaaagaaattatagaacggattttattttggaattgggttatatggtggatgtatttgaatcaatatttaaaaaattttaaaatattattaatatgctgttttaataggggttaaaattcagttttttaacaattgtctcattgattcgtggtatagcgttacttaacaacaattataaactgtaaaatataaatattttataaaaataaaatttgcaagttttaatatatattacttttacaaaataaatcgttccgcggtataccgcgagttaaaatctagtttggtgttataaaagaaaaacaacttttaaagaatatacgataccttttgaatttgatttttttgtatataaccttttctatattgaaaatagagttatttgtaaataaacattttagaacgattttattttattgtctctttttatttttggtaaaatatttcattctcatatcaacttatgacacatttaaaacatggaacttgaacaaataaattttcattctcggatttttcaaatagtattctcatatatgtttcaatgtatcaaactgcaaaatgaaaagagagtatacttacgatagacgacgataagaagagaaacgaataacataaatcttaaggaaatgctcttcattctccaagctaatgttgagttaattatttgttttgttttactcaagtggtgaagttgaagctactcttcatatctttttatagtccattttaataatttgagtagaaaatatttgaagatttggttccaaaaattctaggtgtaaaaatattagtagattttactacaattttaggaaacaaatcttcaaaaacattttgcccaaacaaaaaaacaaatcttcaaaagcttacttccaaaacaagcattaacttcaggtttgatcagttcacaattcgatttgtatgtacatggtttggattattcattacaatcgaatcattttaaaattttgttaggctaagggttttatccacccaatattgatgaaattgttttaacaaatgtgcaggaaaacactcagttgcatataaacaggggaagcatttcacaagaatcccattgtcatttgtatataaacagagtcagaactcagaaacattagaactagatacatatagacaacaaagcccagaggcagttatcaaatcagtaaagctcgttataacctcttacagagcctagtccatcagattcaaaacctctgcctctgctctttcacggctcttgcagcggcgctgtaccatgccgctgcagccattgctcctggatcaggaattgatgcaaaaatctcagctgatacatagcttgatctcccggcctaccctccaatcataatccgtcacatcaaaaagaaacaaaaaacaaacaaccaacagataattgtgatgtcagtgattgctattaactagtagtcattaaagctcacctgtgctttcatatgaatggtagattcagctcctgcggtcgcagcttcagcagacagaacaaaagcagcaatagggtcctccccaacactcagcttctgctcagaagcaaagcaaggcacattactacttaacaaatatcaatctttaataacaaaaagtaacctattgatcagtcacctcctcaaggacttttgaagcggggatgagcgcatctaacatcgttctataaccggcagttgctccaccatatttactgacagcagagattgatgacttgagtgcttcagaccctgattacaagaagaaatcagattcataggccaagatgtgccttttggaataattaacgacaatgcaagcaacgtatatcttacagtgtttggaagtggtttctgattgactgttagcttttaactccgcatatgctgccttacagaggagattgtaactggtttcatatgagacagtgtcatgtcttacatcagtaaatgccaaatgcatgatcaattttatggaaagaaaattgttaaaattaactgcgtcgatttacattattccacttgttccccccatgactcttctaatcgatgaaccaatctcactcactgtttccgcagcatcgttgagcggataactataaaagcgagaaaaagagggtatacattgtaagtaaacaatcaagctaaacagaggagaagaagaggtaaaatgggtgttcagagtgaagtgactcactacttcttcatgtcctccagaatagctgttgcacctctgcacatctgtgaatggtgatgagtgcataagatattttagaaatgcaaaacgaacatttgaaaaacaggacttactgttgatccacaatccccatcacctacttttccatcccattcgttcaaactatccttcagattgatgactacagttgctgctgcttcaatagctgcctcaagaattcgcccctgttgactaagctcctgaggtcggtatcgagactaaataaacacaaaaaaaagttagtatgatgatcacctaacaagttctcatgaaacttacagattatcaaatctcattgaaactcttctaagctggctaaattatatttttatcaaaccaaccgctcacctcttcgtttttggttgatcggaagggaagtggaacggggatctttgctggtgggcggcttcctgtagagagatctggcttgatcagaaaaaggaaaaatccaacctcgaaataaaataaaatagatgatacaagaatttacaatcttatacaagttccaaaggaaatatcacagaccatctgtgccaactggccaactaggagcattggtcggagcatccaaacgctctaaaattgactggtcggccttcatgatcgatatcgagaaccctgagaagggaaggagtatgagagcacagcacaaaatcagtgactctacatagacacaacagaaacagtcacctgccatatcaagagacgtcataaatgatccagtatacaccctatcaacggcaagcccatattccaactgtaattttgggactgcttttccagcagcaatcataagttccattagaggtgtaccacctaagctacagaacaacacgaacaaataaaattattcattgattaagcaaactcgttataccataagtgggtaacatagatataacattatggtaaaggtgaaaatgagtacaaggatcacataaatatgaagatggaatacacaaccttatggtccttacccattaatcatcagaaccacactgttaccacgtgtaattggaacataatttgtctcctggagttagaaagaatgcataggccaacgaatgaaacacgatacatgtattttattaacactatcactttggagatagtaagtcaacaacgggaagatcaagatggttatggaaagaagaagcagagaagagaggaatagtgtacatactggactcagtatctgttgaagaacatgggacactacaacttccacaggttgaatgtcgactacagcagcaccaggctccccatgctgagagaaaagtcgaaaaacagcgagcaaaaaaaggtcaaaatattagcaagagtaatgctctgactttcctatgtcataaaagaaaataagaagagaaacaacatacaactccaagcccaagttccattttctctggacccaaacgatctgatgtaacctgtcctggaagcgcacagacagatagtgcaacacccatggttccaaccatttcagatgcatgttttgcttctgctgcaacttctgctagagaaagtccagcagcagctgctgctccagcaacctacccttaacaaaaacaataacaaaggatataaaaatacaaaagagcacaaaagaacctgccacttagacatcacagacaaatataagaaaatgcaataataaaaaaagatgaggataagtgactgcaaacactactaagaaatgctatcttatagtgcagatagaggaaaaacaacatagaagaaaactgagaaccttatggacaagaactgttcccgctaaacctctgcgcccagctacgccacgcggcgggggtagagcacaatcatctccaacaattacagtctacaaaagggatcatgtcatccaatccaccagtgttcttaccaaattctaaacaataaatatacagttacctctatatcgaaaccctcagtttttgcttgctcagctgccaggccaaagttcaagcggtcaccagtatagttctattaacaatatgtaaaagagaaactaatttaaccaaagacactgaaggatagtctttcaaagctattgatatatacataagaataagtctagccatgttttatttaccgtgacaaccaagaggcatccttttggaccagttacagcacgaatcctctggaattggacaaagattcatcattttctcgaaagacacaagagaaggaataagaagaagaaacgttatgtgggaagagttacttacagctaggatggaatcaacagttggcgaagcaaaaacatctccacaaatagcagctgtgagcattccttctccaacatacccagcttgtgctggttcatgcccacttcctcctcctgtttcaaaaatggcattgcataacacgaaaacgaaactcaatttgtaataaaaaagaattggacaagtaaactccaacctgatataacggcaaccttgtcataatttgcagctgagacatcagctcttagtacaactttgatctgtgaattcatcataaataagctgagattttgcacacatccatggaaggaatcgaaaaaagtgaatttttttaacctcgggaagaccatccaaatactgaagtccaggataagtttcgacgagaccttcgatgaactcggttacaacatctgcaataaacagcttatgttcattctctctatcaattgatatttcaagagcatgcaactaccatatatgagataaactatctagaacagagagctagcgattcgaaacacaaacggagacgagggatcacgaaccgttggggttgttgatgaattttttagccggaggaaccatggtgctagctagctttcaaggatataaaaaccataaaatcggagaagttcatacggagaaataaagaagagaaaaaattgagacttcaagagtcaacaatggcagagaagaagaagagagtgactagtttctgtatttgttcttgaaagctaaccgttaaatcgaaataaaccgataatcagcacaataaaaccggtatatggagatattgggccggaggtgagagcccattaagtaagaaaataacttaattagtaagataaagaaaaaatggttaagcataggcacgtgttccacgcacacggttcgtctattattattcttcgtctacttcacacggaatagagatagagagagagagagatccagaaaaagacgaacaacaatggcgttgcaatggctgattctatcgtatgtggtggccgtcgaagtagtaatcaccctcgtgttgactctcccttaccctatgcttcttaagaaacgtgtagttcagcttgtctcattgattctccaacctgctgcttccatcgtcgccttcgccggatttcagctcctcggtaacctcctctcctctctctcgctctatctatctatttcgtagtcggaatatgtatagttagggttttgagccgcgagtgattctgtggatttggtacctttgtgtgcttttgcttatttggttttgatttcattcagatatttactggaaggctgagcatagactatcttgttcatctgaggtttgcactgctacagaacgtgatcgctacgagaaatctgtaagtaccattccttgatcacctttgtctttgattcttctatagctgaattctatgtgtatgaatctttttttgaatagtaaattgttagatttgtgagtttcatccttgtcattttctcccatctttagtctaaagatcaatatttgttagtaaaacttctgagaattggctttctttgtctgaggaagttgcatagattagagctacaaaacactgtctaacttgttagtgtcaatgcatttttttaggtcttacccttcattgatgtactcatatatcttttaatcgtagttctagctactgtcaaatagcaacatgtgactttctttataccatcggcacgattgtcattcatagttcagtttatactttgctcttgtgaattgttggcaattgattcttggtgaagcttcatcaccactcttggatgtttagttcatccctcagttttctggtcatgcactgtattcaaacctttttgggtatgcagttgcgagtcgccaggatcaattatacatagtgaaaaactgaaaatcaaacacttggatatttaattcaccccttagttccttctctttccctgaaatgtctcagcttgcttgctaacgagttgtgcgtttgcattgtaccacagatctacaaggctcagaggaacgtggttctatgcgctgcaggaattctactctactggtaagttgtaacatcatcagctattatcagtcactcacagacagggtctcgcgtagttttattgatatctcttttattcattgacaggtgcatctaccgcatctgcaaatacaacaaagacctggagcgcttggaggcaacggagaagagattcaaggaagagtaataatcttcacgagtatagggagttggttcctcaaaaccattatataagtaaagcttttttttattgcatttttacgttctaatattattggacctgaatgaaactaagagtatcgtgaacagcctttgcacactatatgtgtatatcatcagtgtccatttctttgatcatatttcaagaacaaccttaatttttcatgtccagaattatcatttacagacactaattttgttaaacaacaacgatgcacttcaagatgtaaacgagaagaataacacaaactgatcgcgaatgtagtattaccataaaatgggtattgatattagttggtcagttcacagtcgcatatattacaaacaacaaatccccaaaccctctcaaagaatgtggcacatcctcataaaccacagaggccatttcagttcagtacgaagtgataccttgagtctacatggctctccacgtcccagaggaaagaaccaaacgtcacagcctccaacacaagcctcttcaatcccttgaagctgatcttgatatgctcgtccttcgaggaatcaatagtgccttgtggcgttatcacaatctctggcctcccaaacaatgcttctgtatgcttctcaattatcccaaccgattctctagatcttattgtagcgtacctttgaagggtttctccatcaaaggacataacgtatgtctttaaccgggattgcttcatatcactgctaaaaccgccactggcattgatccctcctacaaacgaaccaacgtcttggtttgaggaaacagcctgataagtctcttctgcttcttcatagaagtttctctctacatctcggcctgcttgctcaatgctagtctcaccttcatctgacccacctgggagaatcctcatcgtcttctcaagctgaaacctttgatcgatcctcttcaggaaatacccatacatcaccgaagcagcatatacctgtccaactccaagtttgcttatctgcgcaactgctgtcagatcatcagtgcggtttttaagaatgatggaaagatgattctgaatcatctcataaacttcaggcgagtgaagtctctcaagttccccatctagagttggccaagtatcaactcgaccagatggatccgcagatgaagaggttatggatggtacaagtgtaacattagcatccatgaacttctgaaccactaacgcatacaaaatctcttccaaggcccttcttctctctttctccttaacttcagcaattctcctaaagacccaagaaacaatctaattcaatatccaaacctatataatagccgagtggtaattaatatcagcatatgacaaacctgtagagaacaatgtctgttccaaggacagaggatgcatctttactctgttcttcagcgtctcgatcaatttggagctgttcaagctgctgttcaacagctgctggaacaagatgaggatggctcactaatatctgtgacagaaactgtcccacaggagacttcaactgaagcggcgcgattgattctgttgaagcatcaccagaagctgaagctttaaccacaaagcttctccgagatttaacacaagttgttccgctttgaaatggtctcgagaatttaagagaagagttttgctgcatacagagagacaacagattcaaattacaatatagtcaagccaatttttttacttatgagaaatttacacgaagaaaccttaaaagttccatttttttacacagaatctgaattctcgaatttcattggaagatatacgattatggggtagattaagcacaaacaaagatgattcgggaaagctataaatgtcaatgttgtctagggtttagtaaatcaaactcagtagaaataagacctactctgagacgaaattgaggtccggagctaattcgcatgaagccaggacagttgggcgtcgaaaatatcaacctttcggaagtttgacgcagtaaggaaggagattgaaacaaattcgccgccacagcgtccatgattagcctctgggagaagcaaaaagtcggaactttggccagagaaaggagaaatgaagaagaaacctagaatgtaggagaagatgatgtcgataaatagtgattaaaccggttagtgtggatggtttatgactcttatctcttccaataatacccactcacgttttttcttttgataattacgggaaattaatttcgtaatttttcatgtttgacacaatagaagttgggctcatatttatatttctcaaagcccattaagcgggattttagaccattatgggaaacatatatagcccagaatacgacccatcaagacaattagggtttctctcgcctttcgcgtctaaaaagttttaccccaatcggtgtgtaagaatgtcgtcgtcgtttctatctgatttttcgtttctcagtgatttcgtttaaaaaaagttattttgtcttctgtgaatctacaatttttttaaaaggtttttcgtttttgctaataaaataagaaaaacggtggcgatgatgaaaaaaaggccggacttacggctactaccaccgtgaaagtgtggtgggtagtagaatgatgctaaagtatccaaaggttacagctgagcctcctctttctacaacttcacccatttttatccgatcttcactattattttgcctcaacttctttctcaatcaaagttcggtttaacgtttcggttcggttcggttatatcggttttcgttttttttgttaaattttttggaaaagtatgctgaattgatccgatattaggttcggttcgggtaggttcggttttcgggtaattcggtttttaactgggtatgtgcaaaaaaaaccgaaataaccgaacagaaggaaatacataaaaaaaaattgggtttgtgcaaaaaaaaaaattcaactgggccaagctaaaatacataaaaggcccattgtaaaaccatagaaaataaatgcaatcagaaggacagtttaatttttaacccatttcaaagaaaacaattccaaaaaataaaatgtcagaaaagaattttcttttagaataaagacagtgaagagatttatttcaaagcctgggtttaagctgctgagagaacacaaaaaaccctaacaaaaatggaatcgaaagcaatttgcttagggtttcttcctccaagacttcgattttcatctccacgtttactctctcttcctccttctcctcctgtaagtgaaatttaaccatcaaaatttcatttttttccatttcgattcttccaaaaccttatcctaaaatttgtcaatatctcctgattctataggcttcttccacatttgcgacgcgtcacaaacttgattccagacgtaagtatctctatcttaaatcctcctacttcacccagattgtagcataaagactgatcctttttctcattttcattcttgtttaagaaaccctcctttggaacaaaccgcaattgagccgagttcgtgtagcgtgttcttcttctcaatctgactcaagacctgagaagaagcaatcggataagagtaactatgctcgagctgagctgttccgtgggaaatcaggttctgtttctttcaatggtctgactcatcagctggttgaagaaagtaaactggtttcagctccgtttcaagaagagaaaggttctttcttgtgggttttggctcctgttgttttgatttcttcgttgattcttcctcagttctttctaagtggtatcattgaagctaccttcaaaaacgacactgttgctggtaggtcaggttttactactgctttaatgtttaacatcggattatgacttatatgaatcctaggaaggaacaaatggagtagaagctatctatcttagtggtgttacatctgctaactcattatgttttagtgtagtaggctttggctttgaggttttgataggcttagtacatgttttctgatgtgcaatattagaatcctttttttcactattatcaagaacacatgacctgagccttagaaagtacctaaacgagatctcataactctcctaaagctaagagacttagcaaatgatctatctcttgttgtatgatactcattttgatgctctctcttattataatttcttgatgcagaaattgttacttctttttgctttgagacggtgttttatgctggtcttgcgatattcctgtctgtgactgaccgagtgcagaggccgtacttagacttcagctccaagagatggggtctgatcactggactgaggggataccttacgtctgcattcctcacgatgggtttaaaagttgtagttcccgtatttgctgtttacatgacttggccagctcttggaatagatgctttgattgcagtgcttcctttcttggttggctgtgcagttcaaagagttttcgaggctcggcttgaaagacgtggctcatcctgttggcccattgttccaatagtctttgaggtaaacttatattctgattttgaccattttggtcttaagtttgtctgcccatcttcttgtggtccatgatgttgtagtcttgttttgagtaactatggttgtgtatgtcatggcaggtgtataggctgtatcaggtgacaagagcagcgacttttgttcagaggctgatgtttatgatgaaagatgcggcaacgactgctgaaataacagagcgaggagttgcactagttggtttggttgtgactttgcagtttctagctgttatgtgtctctggtcgtttatcacttttcttatgcgcctctttccttctagacctgtaggtgaaaactactagatctcagtgtttagtgattgttagatgtagccaaatcccatcggttttgttttgtttctgtgttcatttcagtagtaatgaattgtattaagtcactttaagaattggttgatcatgtgaaatgagaattggctggaaatgttatagaacgatcctacttaacttcagtatttgatgagatttcttattggagactcttgtgaccccttctctaaagtttcaatgtgtgaaatcacaacataagtaacacaacaatagatgggtctggtctcagcttgtgttttggtcctttgtatgcaacaatagagaagctgaatgcttatccacgtggaagatttgtgcctccgataggtgtctttaacagtgtgacgtgtctgtattgtttcattgatgaatctgttacaccgttgagtgattgattctcaaataaattggtcccaaagctttttatcaatatgtgatggttattaatggatacttaataaaagatgccattatactaatcaacgattattgttgagaaaacaataaaataggatctcaagagaaatagccgcttctataaaaatagtgagagtgactgagatcaatagaaccaatctcagaatcatcttctttctctttcggaacaaaaatgacgtctcctctctcagatctcctaaaccttgatctatcagacaccaagaaaatcatcgctgaatacatatggttcgatccctaatcatctttttgtcacttaaatctatagaaaagtctctctataactcgatgcatgtcatatagattcttgatgttacacacttgtgatcttgcatgtctctttaaacaacattgttttgttctgttttttcatgagaacaggatcggtggctctggaatggatattagaagcaaagccagggtaataataccatcacattatgtctctctagtttctataataaccaaacaaaaatttaaattctgtttgttaatagacattaccaggaccagtaagtaatccaacaaagcttccaaaatggaactacgatggatctagcaccgatcaagctgccggagatgatagtgaagtcattctttagtaatctttttcatcccctattcataacatttataagtaaagtgatatcaaaagtatctttaaaataatttcatttttttggaatgaattggaaaaaaaaagtcctcaggcaatatttaaggacccattcaggaaggggaacaacattctggttagcccacataaaattttgagcaaaagattcatctgttttattgattagtgggtctttaaaatcaatgttcttgaatatatcaggtgatgtgtgatgcttacagaccggccggagatccaattccgaccaacaataggcacaaggccgtaaaaatcttcgatcatcccaatgtgaaggctgaagagccttggtaagctaaatacatagcctatagaaaaattcaaatgaactataatcgaattttttcagtttgttatggtgtagaacaaaaataccatagtttgaccaattcaaaatatattgtaacatatattaaaagttgtttaacataagcactgttttggaatatatttcagtttagttgattcagtctaggactcattttgatactttgatgtgttatataataggtttgggatagagcaagaatacacattacttaaaaaagatgtgaagtggccactaggttggcctcttggtggctttcctggtcctcaggtacacttatgataaaattcatacactaactcttattaccaagaacaagtttcttatctcggaaatattgctttttgtgtgttttgatgaaacagggaccgtactattgtgcagtaggtgcagacaaagcttttggtcgtgacattgtcgatgctcactataaagcttgtctatactccggtttgagtattggtggtgccaatggtgaagtcatgcctggacaatgggagtttcaaatcagtcctactgttggtattggtgcaggtgatcaattatgggttgctcgttacattcttgaggtaagaaaccattacaattttatctttgtttttatcaagtttcatgggcccatatttctgctatgtcctatcttattatcgatgtggcattcctaacaatttctttgcgctcaactttggtttcttgcactctaatatgaatcattgtgttttttttttttggcagaggattactgagatatgcggtgtgattgtctcattcgatccaaaaccaatccaggtttcgtgatgatcaagactgttttgtttgtagctatagcttgagagttttcttgaatgttcttttgtagtgaggttgttatctatggtggttaattaattagggtgattggaatggagcagccgctcatacgaacttcagtacaaaatcgatgaggaaagatggaggactggatttgattaaggaagcaataaagaagcttgaagtgaaacacaaacaacacattgctgcttatggtgaaggcaacgagaggcgtctcactgggaagcatgaaactgcagacatcaacactttctcttgggtatatatatgaaaccaaatcatatagttacgttttggtttatgatctatctctatgtaacttttatctatcgagtgtagggagtggcggatcgtggagcatcggtgagagtaggaagagatacggagaaagaaggtaaagggtattttgaagatcgaaggccttcgtctaatatggatccttacctagttacctccatgattgctgaaaccaccatcctctaagctttagacttttcttcgttttggttctttgtatgttcttcgaatttcggtttgatatggtttaatttcgcatttagacttttctttcaaataagttacgaaatgttatgtgatttctattgtttgatccggttacggttcacttttaagccaaaaaatctaccgttatgactcgaataatttgtaaccatcatcctcggctaagctttttagttacatttgaagtcattcagtgaagggcgtttgcattgtaccatagcatccatattagattatgtttgaataagggcattgaccaggaaaaaaacaattgaacgggcctgactttattagcccatatatcaaatttaccgtccgttattgttcttttacttttctagttacgtgttggtccaaaagaaaggattgagaaacaagaaacttgtatacatatctagaagttagaacccatttcgtttcaagcctaattaacctctaccgttatgacttgaattcgaagccgtgtctatgcaaaagttgaccaaaacattgatttttcttttcttatattcaagattcaagctatgtcatagaagctaccctaaagctacatgcctacattatgcagttttcgtccattgatgattgatctgtaacgtttaattatcaggttataagcatacacacattttttcctcgtctatgatacggtgaaagcattaatataagctataagattatatatctcgtagtcgaatgtataagtatttttttgtttttactgaacgatgtatatattatacttggattaatatgggcttatagagggatctaattaagaattagacgtatcttgtggtcaggtaaagtcagtagatacgttcacgaaattcatgtaaaatatataactaaataaactacttgattggtccacctgcacgcatatactcaactacatatatgtatatatatgttcatgcatgttacgtatagtttattattgtaagccggtattttcttcatcacagaaataaatcaatatagacgccaagaaaaacaaaaccaactagaaaaagtcatttaatatttgaatcttttacgagaaaaatagaattataagtttctcgaaactatctaacagaaattctctccgaccaatgaagaataatcaatctttttgggtatttgctctggtctttcacgagcaaatgaaacttataattaatggtagtatttggtgagaagaaaaggagccaaaccacatgaaagaaaaaaaatgtaaatattaattgtagttgtcgtttcgtttcgtgtaacgcccaaccatgtatcgcagcacgttacagcttccttttgttgctgtatgtgtaaatgatctaacctaataccatactattgcaaagaaataaaactattcctttgtcatatactactaaattctaggaatagttgacacataaccataaacttaaaagaatttgtagatttcttacctccaaacggagtaggacatgtagtacatcttaaaactaacagaaaataaaaacgttacaaatcatgatcttggccccttatagatagtcatgatagttatcgacaaataacgtctaagcatgcatgcatattattgacaaattacacttgagaaagttgtatattttgagatcaaatatttgataatatgcgcatgcacaacttatatggcatctaacaaatggtcccggactatagtaaaggatgatacatattatagggccaatgtcgagaatttcttagatacaaaacaaaactaaaggaggtcttgtttacagagtggccgagacagacacaaaacgaagaagatttattccaaaaactttaatgtaatcaaatgtggttgtgaatttgtgatcatcttctaacatgttacggtcctaccaactctctacccaccctttttctccttttttaattctatattaatattatcaacaacttcaatcttattatactccataacttaattctctatgttccttaataatccattttctagagaacaaatggttaagaaaatgtatatttttttaatgttgtgtatgcatttttatcaggtattgatgatgaatcgtaaatttcaaaataaaataaaataaatactattggttaagaattatagaaaattgtaatttccaaaaaatatatttataatcaatttttaatatgttttttcttatgtgtcaaaaatctaaaaaaatagattaattaggaacatataactagggttctcaattatctaggagtctttatgctaattacagaatttagattaatattagtctgttattttactacttaaaactgatattttaattccatttactgacagtaaaaaaaacagaacagaaaaaaaacaatgaaagatggaaaaaaggagaagaagaggattaggctgttgactgctttcactccttttacagctctcttcttctctctttaataataaagttttcatttttatacctttctctctctctctctctctcttcttcttcttcttcttcttcgtcttcttctctgaatagtcacaatgcgagtcttcttcttccccaactcgtccatggcgattctctctgttttcctctccctccttctcctctctctccctcttccatcaactcaagatctcaacgccgacagaaccgctcttctctctctccgctccgccgtcggaggccgtacatttcgctggaacatcaaacaaacctcgccgtgtaactgggccggtgtcaaatgcgagagtaacagagtcaccgctctccgcttacccggcgttgctctctccggtgacattccagagggtattttcggtaacttaactcagctccgtacacttagccttcgtctcaatgctctctctggctcactccctaaagatctcagtacctcttccaatctccgacacctttacttacaaggaaacagattctccggcgagatacctgaagttttgttcagtctcagtcacctcgtgaggcttaatctcgcttccaacagcttcaccggagaaatctcttcaggtttcacgaacctcacgaagctaaagactctgtttctagagaataatcaactctctggttcaatccctgacttagatttacctttggttcaattcaacgtttcgaataactcgttgaacggttctatacctaagaatcttcagaggtttgagtctgattcgtttctacagacttcactttgtggcaaaccgcttaaactttgtcctgatgaagaaactgtacctagtcagcctacttctggtggaaacagaacaccaccgagtgttgaaggaagtgaagagaagaagaaaaagaacaaactttccggtggagctattgccggaattgtgatcggatgtgtggttggtttcgctttgattgttttgatactaatggtgctctgtcggaaaaagagtaataagagatcaagagctgttgatatctcaacaatcaaacagcaagaacctgaaattcctggagataaagaagcggtggataatggtaatgtctactcggtgtctgctgctgcagctgcggcgatgactggaaacggaaaagccagtgaagggaacggtccagcgacgaagaagcttgtgttctttggtaacgcgactaaggtttttgatcttgaagacttgttgagagcttctgcggaggttcttgggaaaggaacgtttgggacggcgtataaggcagtgcttgacgcggtgacggttgtggcggtgaagaggttgaaggatgtgatgatggctgataaagagtttaaggagaagattgagttggttggtgcgatggatcatgagaacttggtgccattgagagcttactatttcagcagagatgagaaacttcttgtctatgacttcatgcctatgggaagcttatcagctctcttacatggtgagttcatatcgaaacttgtgcttagattgagtttggtttcttttgaggcaagtcaatgcttttagtgcctatagataggcttgaatacatttagattatggttaagtttagtgcttaatctctttgatcattgattcttaacattgatatgatttccataatactttgtatagtttctgtgaattggtagggacaatgtgtttaacattggatgctttgatctatgaacaatgattactactctaagactttggtttgttctctttagtttctataattgtcttttgtctgttaacaggaaacagaggagcgggaaggagtccactaaactgggatgttagatcaagaattgctattggtgcagctcgtggtctagactaccttcactcacaaggcacttcaacatctcacggcaacatcaaatcctcaaacatcctcttaacgaaatcccacgacgctaaagtctcagactttggcttagcccagctcgtgggatcatcagcaacaaatccaaaccgcgctacgggttaccgtgctccagaagtaaccgatccgaaacgcgtgtcgcagaagggtgacgtgtacagtttcggagtggtgttgcttgagctgatcacgggtaaagctccttcgaactcggtgatgaacgaggaaggagttgatttgccgagatgggttaaatcggtggcgagagatgagtggaggagagaagttttcgactcggagttgcttagtttggcgacggatgaagaagagatgatggcggagatggtgcagctagggcttgagtgtacgtcacagcatccggaccagaggccggagatgtcggaagtggttaggaagatggagaatttgcgaccttattctggttcagaccaagtgaacgaagctgattaagtcaaagattcttaattgttaatttatttaatttgaatgaaatggttggggagaaatcaggtttataattttaatttctaatttttgacacaacttgtcaaaaaggagaaggggttttattattagtgggtgactctgctggcatttgcagttgtttgtgttgggcgtgaagggatttggtggtgatttgtaattattgttgttgcttccctttcttaaatctattttctaaattgttacgtatctttttgtctcttatgttacatgtgagtgtgacttttatatcgtaatataaagttgtatactgtggtggcaaacgcagttggtcagtgttttatgaaaaagatgtgttcagtttttcgaacaaatacaaaattgttttgatatacaatattttttggttggccacttgtggaatgccttttcccggcagtgtgttttgatcatttgaaatgagaaaggttagtgttaatttatactaatttaaattgcagtttaatttgttcatttttatgttgtttcggttccgtatattttgcacttgtttagcttattatggtagatggaagttatatgtaagaacatgtcatatcaatataagaacatgcttattattatctcttgctatcaaagtgacccacatctaatttagttttgatggagagacagctaaatataccaaaaataaacactcaacacatgatttatgaaaatgaattgaatgaatacagaatacctaatttgctattatgtaaatgtggacaactcttttaatattgggttgtcaaccattttgaataattctttttggttcacaaaaaccactatgacttttttttttggcttgcaaacattgacagctttaagagtaaagcatttaatgctaaaggtataaataggtgagaatgggtggaactgcaacagtactaaggctgctataattgtatgactcttttagagaggtcccaaaggtacacatgatagagagggaccataaagagatattggtttcaagagagaagacgacattaagatagtgatgattctattttatgtgcgttgtctctttacctacatttacggttgatgcggctgctaattgccaatacaaacgcaaaccgcaatcgctaactatacatcagtttagcaacattggtgtatgtcccattaatatgataggtttaaaactttggttggaaaaggtatcactcgttgagaatctaatgaaaatatgtgacagagacaaattgtcaatatatataataaataatgcactttcactcagtatacttggacaacatttcacaacccttctatgaaggtggaacgcaaaagcctaagagaccatgtcccatatatgctgaaccacaaatccaaacaaatatcaaaccgcaaaacaccaataaccgcatttgcagatgcgtttatgcgtccaaataaatgttttttttcttttcttttcctctgtttttcttcatgtctctgcatcagaaagagtaaactcaaaacaaaatcagtttgctatatagatatcacaaatttagtaattaataaagaatgacttacatgtacagaataaacaagtaaaattcatttgtttgttatcttcgctgcaaacttggttgggtttcatctttgtgacccttggacatcagattatagttgatatatgccagctgcgagagattcttcataccgtaaaaagagcgagtcagaatactaaaactgattcatctctcttaagaacaccattttcaaatgctactcaaatcacttgccataacggtacaaatacaagccagttcttgacttgaattaggggaggcacagcccacaagttcataaactgtatctatagccgaaggattctgcaagtctgctataaagctaacaacctatgttgcacttgattgatgtgtcatcctcatacaaagccatccttacaactttaattaggacccaactaattatactgataaagtttgcagcaagttctcaatcctaaatgaacatgcaagggaacttctacaactgtataaaactatgatatatcgtatacttgggtgacaagggatcttaggaagaaagtcatgataaaataccttgaacgagaaattatcgaatgggtaattttcagagacactagtttcgaactccgcaggtccgcagggtatatcaacctgcatatacaatcattgatccaattcagggcactacacatctaaaaatttaacgtcaatatttctgacgagtaagtaaagagagtggatcagcagatattaccccctcgtcgtgatgattgctcaagcgaccactactgccacacaagctgtcaccttcactagaatcttcattctcattggttggaaaacatcgctcacccgaatagttccacgagtagcgactctggaagtaacttgtgtcaaaagcattttctgagtccggcacaaatgcagcctagaggaaacaagcaataattgccaaaataaaataaataatcaagagttcgggctttgcaaagcgtatgactttaaaagtaaaagataaatgaaattcaccttctgttgtgctagagtgttccagtctatgtctttaaagaagctgtgctgcttgacctgagtcatgatatttgtttcatcactatactacacattacaattaattaaaatcagtcaaccaaaaaaaagacatcaatgtcacctcagccgcccctctagctccaagtctctgatggggatcttccgttaataacctggattaagcacatgacacgaggttacagaaattaatacttgtgtcttcttctcaattgtgttataagctgatcttgaaaagggttgcttattgatgtttacgatagagctgctgacaaattcataaagaactattttaactacacatatgactggacagaaaaatcacttaccgatctatcaaatcacgggcttcatggctcatatcttcaggaacaggaggccattgtatattacggttgagaatattgtcaaagatttgctaaaacccaacaaagaagatacagatcaaatatcagggagttggagagtgaaactagatattaaatactctgtagcaacatatgaagatgttaaatggaagtgtttgaaagttaagaggccagtacaaagaaacatagcatttgatgactagccaaaattagaacatcagtttctgaaccttgagaacctctatttcctctaacaaaattatacaaggacgatgcaatatctagtcactgacctgaggatggtcagcattgaagggcggaatccccacaaggaattcgtacaaaatgatgccaacagaccaccaatccgcagttgcacctgaacagtaatggaaatatatctgcctttatggttttggtatgtgatgacgagaattgaatatttaaaactatagtcagagaggcagcagagcaacaatttagtatgaacctaaagctgctaataagctacatattcaagctttttacttacaccacaagataagtagaactgtaatcaacttgatataccacacatcttgttattcagataaacagtctcaacccaggaccaatcatttttctatcaacccagcaccaatttctatgtaagatttgaaataatagagagaagtgaaaaacaagatgagaaagaaatgcgtatgcaccatgtcctgtccccaaaaggatttctggcgctaagtagtcaggagtgcccaccgcagaccgcttatggtccaatgttggcaattttggtttctcctcaacaagcagcgacgttgcactggaaactggaccagagagatcatcagtgttgttgatgagaccaacttttgaaagcccaaaatccgtcaactgctcagacgaaacaaaaaggtaccataaggtctacagggaagcatggttctgataatttatacatgtatgatatttatagactcataaatgcagaggctaattgcccgtgtgggtttataattacgagattcagaaaggactatataatctccaaagttccaaattgcatgagatcaacaaaacattctgaaggcctgatactatttaataaggcctgatattaccttaacatgaccatcatgtgcaatcaacaaattgtcaggcttcaaatcacgatgcacaacaccctcagagtgtaaatattccaaagcaaggacctgacacgaataatatcgacactgaatcacaacatttagataaaatctcttgttattatggcatgatctgtgagagtattacacacttacaacttctgcaatgtatacacgggcattagcttcatccaagcaacctatttttctcaacattgaataaaaatcccctccattgaggtattccatcacaagatacaggttttcgctacaagtaaaagaatagaagaatcgaacctggtcaaaagaaagttacgttagtgtaagaaatctctgcagaggacttaatatgcttaaagctcgaacagctcaccacaaagggattgcgggcgttgatcaaaatatctcgttcggcaagtatactttccacagcattcttgcggatcatatctgccttcctcagaacctacggattatgacagcccccaaacaagatttaggaaacagattttgccaaccaagtcagcttaactgtcacagacagaatcttttacaagagttacaaaaagtaaaacgaactaaaatttagaacaccttaattgcaaataggtctcctgtagtgttcttacgagccaaaataacatgcccaaaagctcccctactaattgacttcatgacctcaaaatcatctatggatatgcggtcccgcagatgtactggactggtcctcaagctgcgaacaacatcatcttccaaaggagcatcttcatcaattatggtacctttttcatcatccataagctcgcacagctgaagatacttttccctaatatatagaaaaaggattcttacaataaattctcagcctgagctatacttgcctcaactgacaagagaatagttctggagacaagaatacatctcccagaacactttcattataagcaaagacagcacggggtaccaggaactcactgtatcaacttttctatgcgtgttccaaaagtttctactataagtgcatcaaactttctgcggtcaatgacaactctcaagtcttcaagacaggaaagtaaaagctgaatagattgatcatcaacaggaatggcatttgctgcgcatcttgcaatgtcagcaagttcactcatctgcatcatcagttatccagggttctattcatcagagcagatattaaataaaagactaggaaactatgagcatagagcagaaccatcacaaacctgagggaaatcatcctggtcatggaatgtacccttgccttctaataacaattcaattggatcgggtctaggggttggaataggggacctaggagtcatgctaccggcagatgaagtagccatgccttgatcagacttgggaccaaaacgagttctgcatgacattgaaggtaagcatcccatatcatccatgaaaactgaattatcagtctccggaaaacagtcaagcatgtcctccgaccctcttcgcgaccaatcacttagctttggggagagaacatcaagttcttcggtcaaactcgcgttagatattttcataccttctgggctttctaccgctgctaggctatccttttgtatgacattgtctgttatcttttcaagagttactgcaactgccatcagccgctcgtcaacacccacacccttttggtcatatttatcagccaatgcacagattctagagtgatcttccacatgggtggtgggaatttcctcctcgcatatacggcaaataattgaactttcctcagaaatacatgactgatgcccccaataaccccacgaaatattatgccgattcttggacatatgttcctgggacgcttttgcggaagaaacttctggcaacttagcaacagccatatcatcacttatagctactagctttttaacgacctgtggaggttcaactttgcgatcattctgctctttcgatactgcagcttcttgtacacccttcgatgctggagatggaagtcttttccaagaagacattttatcgatgtttgcaggcgattcagaatcctttgacgtttcattgtacggagaagagagaggagctggacgaacaaaaaagccctcgatccaattcaaaccacgctgctcctgactataagctttcttggtggatggtacctttaaggcattggcagtacttgaacccttcccgtccctaacttctccagtggggtctcttttatcggcagaatgcaagactcctgactgacgtagttgtacagcatcttcctcctgcccccaactttccttatgaaattgaagtaatctggtacatctggtaaggataaaaagcatccgagtgtgaagctgcttgagcacgcccggaggaagctcttgacgtctatcatctaagtcttgcactatgccctcacactgaagccagaactcttttgaagtagtcttagcacaagtttttgccaaaaccaacaagtcttcaattgtaaccagcaactcaggatgactttctttgtttttatcataaatatccaacaggtccccaccaaatgcaaaaaggtccgaatttacttcttcctttgctttatcaaacttggttcgaattagattcaagatatcctgcataagagagatgattagagaatgcattgaacagatttaagatgaaactaatacagaaaaagtagcctcaaagactacctccaagttatttaacctacgaggcttccataatggaaaaggccgaacacctttcgagttcagctcatgagaaaagctcttgatatcaccaggaaacctctttcttggagcactggtcatacgaagtaaagcttgataacgaggcgagtctgactcttttggatcatccaaatcgtatgaattctaaaacgatagacgtcaagtcacaaaggtcacatagagctgatgtatatagatagcacatactctctttttatcggtaagcagactagaaatacctctggtgtgcaaacttctgcgcttccttcagggccagatatggtaggtgataccttgaattgacctgctttgtaacatcaaaatcaaacttgagaagcaagaactgaaataccaacggtgccaccataaaatgcaagaagtcttaggatgagatggacacaagtcacacaacatatcattcaacaacatgatcaagagaattttgagcatctgaagtcataccagttcccgaagccagcaacgcgggattgctgcttcttagcggtccaatatctaccttgctgcttccagcttccttcttgccagtatccaacttcgacaacttgtaacacggtaagaccggaattgcataatcattctcaaaactgaaaaaactttcctgcggcaacgggccagacctcgtcttgattctattcaaacccaaagatgaagccatgataggcgaaaccgacgccggcgattcctccttcacgtcagaagtcgccggcgtttcagtaattggtttcttcgcctcggaaccagaagatgacgagtttgatttgcctggactagaagagtgaacttctaacgaagcttctttacccttcgctgagacatgcttcttcgtattagggctccgagtttcctctttagaatttgatttcggtttcttcttatcggatcgaatcggagaatcggagccaacagatcgtggactgttgctgctactgggactagaagatctcgatttcttcgaggagaagaagagtttgctcttgaacaccatatttgacttctctcgagagatttccaaacctcaaaccttaccacaacaaacacgttacggcaaaattccaaaacgccatatccaattcaaaagcaaaatctcttctcgctatgtctcttaccttcaatctccgttacgatttcaaaaacttaagaaaattcaaaaccaagctttcgatgaatggacgaagaagacgacggacgtaactgttaagtgggacactaatcttttattaaagcctaaaacgaagaagattagggaaacaaatagtcaaacctgttaaagacgaaacttgactatgattaaacgttaatgactttcaaactgaagattaagtactaaggactgcattttcttattttatatgcataaatgagtaaagtagataagactatgaatgaagaaaacaaaaaagataagactatgaatataatttcttgaagattttatcataaatgaatttattgtgacttgaagagttttaaatttttggagaaaaatagaaagaaattacatagttttgaattttttgatattatatagaagctttcgcctttcgcgcgtaattttaaatatttaaattaataaatctaactaattttaattatcgttgtgattttatatgttcatactaaatcgtgtaataatttattatgtatgtacaaaagttatagttttgaatttttgattaataaaagatatttcggtcgtatttttgtttataattgagttaatcaatccaactaatttttaatttttcattatcgttgcagtcaaataacatttttttttctttcgaaaatttagctttaattaatattagaaacttttgggcatattattatttatatatgaataaagaaatctaacaaattttcaacactgctggaatttgatatatttgcacccactaaagtaataattgttagatacaaatttgaatagttatagttatatttaatgttagaagataatatctatataaattatttgatatggacctaatagataatttttgtaattatttacttctaattaaactaattcagatttttcgaataacaagtatttttatttatttcttactaaattaattcagatttttataataaaaatatgttaaaactttttctttttgaatttaatgttaaattatattaaaaagaaaaataaacttgttacatatgaaatgctaattgttttgagagtttttttaaagaaaaggaacttctaattgtctattatctattgccttgattcaaagttttaaaccaaacttggatgccatctttgaacttcaatcctccactaccttgaattgtgctcaaacggtttctaagattcttgtctataatcttcacaagtatttccgtcggtgatgattgctccccatgcctgatgcctcctcctattttgttcattccaaattgagtgtatagagttctgtctgtagtgcatacctaagtatgtagctcttcgttttgtatagaaggtttttagataaagttttcataacctctgtccaactcgccgaatatctgtccgagagaattccccttgttaagtcttcccatatcttttttgagtaggcgcagtggaaaaataagtgttccttcgtctctctacctgttcattgcaaaaaatgcaactcgaatctacattacataccactttctcattgtctctctactcaaattctgtttttcacaaccaaccaagtaaaaagggatactttggagtaacgtatgggaaccatatctcattgtgtccctctatcgacaactttgctaaaacttgtgttcaacgttctctttttgttatgttttttctttttaaaatctggaacctatataaaatcagcttattagaatatatttataaactttaatttttaattttaaaaatattatatggtaatgacttatataatctcaagaagaattgttttttccataattcgtatggagccttatatttttttggtctggctctggttctatgtggcaagttttgcagcttgctcataaattcataatgccaagggtaagctccatacactcgaacttggtatgaacatgggagctcagcagtgtacatgtacttgtaatttaacctcatgactattaactcttacagttccgaaaataacctctttcttaggaactcttagggtttatccaaaaacaaaaatactttgatatattaacaaacgaaatctaacaacagtaaaagaggaagttctccgtatgggagaaccaatacgaagcataaatgctagattttaacaaatgaaatctagcctttttaacaaggacatgagcataccaaaaaaaactttaaacgagaaaaaccatcaatctctataaaaaagaaggccattcatccgggatggctacgatctataggttaattcttatctaaaaaaaacattaatcaaagataaatcaataatgaggcactgcatgacccaaagcaagaattcaaactttgtatgaagagggatcgagacgacggtgaaagctcttctcaaccacattattaccatgttttgttgtgtagaatgaatgagtcaatgactcaatgcactacaaataattgctctcttttaacttgagaataagggttcttattataatgcttatcagctttaaatataaaaataaataatgtaaaacattattttaagtttgatattaacgacatatttatatatttatatatttatatccaagttgttcaaaataaaaataaatatatatatttatatccgatgattgaatttctaatattggaagtttattccggaacaggaaagcagacgtgggatatacacataccgcatcggatgatttatattaaaaaaatatatgtatacatcattagaggaatcataaatcggcggtgtgtgtaacttcaactcacgtttttcatttctctccaaagtccttcaattgttactaattctctctgatctctcatttcttctcttctccggtgacattttttttctcccccgcgaaagctaaaccgtttttgtattctcaacgattgataagcctgatggagagagattttctcgggctgggatcaaagttatctccgataactgtgaaggaggaaactaacgaagattcaggtaattcatcttcaacatcttccattatgatctgatgattgtgtttttcatctcacttttttttgtttctatttttgtaatctctttttttgtttattgttcaagtacatatatattgtttttctagcttgattgggagtcctactgtctggttttttcttgaacaagaaattttttcttcgttttctcgggaagagaaaaaataaattagggtttcttttttcttgatatatatttaagaaattaggttttagtactatagacagaaatttagctactcgaatttgtttgacgtagccgatgaaaaaacacgttttgggactcgatagttagaaaattcatacgttcacgatctacttttgaagtttttttcattaaatattttttgcaaactacaaatgtacaagtatacaactatacaagcaaacaccaaacttgttgacgttagtaatttaacaagtgttagtattatctttgaaaaataatattcagagaacaaacttgattttctaggtgactaggtgatgcatgtttctaaagctgttggtaatgttgagtgttttcaaaataatttcgtttttttcttcaaacagccgacaccgacagaacaaaaatgctatattttttttgttgcttacaaaattgatcaattggtttcaatacaatagtatcttctttagaaaagattgtttttttcaaagccggattgaatattgagaattagaacattggctggttattctttttgaaaagtttatgccattttttaaggtttattaagcaacttgaattctatcagtattatttaaaaacgaagacgtgaaatgttgggaaaagaatgcgttatatagcgaccggctgacgattagagatttaacaacaaatgcaagttgaattatataaaagcaagattgattgtgacttgattaagttttatttctatccaagtagactcattgattaagttaggatcatgttgggtattaaatttagatcaagttacaatttggatgaataatttacttacccacgaggaatttaatagttagttcttgtctttttatattccgaaacgtgccatttcttgaaagtatttgtatgatcactattttccccagtgtgtttggctttatgcagatttgttcattgttgatgaatctaatgttaagagtcgtccactttagcatagctagatctgagtgtttcctagtttgataaaatctaaagacatttgctcatgtttcagccccaagtagaggtatgatggattggtcattctcaagcaaagtcggttctggtcctcagtttctttcttttgggacatcccaacaagaaacgcgtgtaaacacagtcaatgatcatttgctttcttctgctgcaatggatcaaaaccagagaacttacttcagctcactacaggttaggctatttcttgaaaagaaaaaaagtagtgataaagtgtgatttagtgaccttgtaagaaagcttggcaattggtttagtttcttctggtctcaaaattgatacaaaatgatctcaggaagacagagtgttcccaggttccagtcagcaagaccaaacaaccatcacagtctccatgtccgaaccaaactacatcaacagtttcataaaccaccaacatttaggaggatctcctatcatggcacctccagtttcagtatttcctgctccaaccactattaggcatgcactgcattctatcttcttctgtttaacatcagatacagaacctctttacttctatagttgactcgagctcctttatgttcatctccagatcttcttcaaaaccacttccccctcagttgacaatcttttatgccggttcagtattagtttaccaagacatagctcctgaaaaggtaaccaaatttccttcaatatgtgttacattacagtccaagctatccactgactaagtattcaatcaaagaaataagtttcacgtatagacatgctgaagttatagaaagttactaacctggtttcaacatacagtatgttaatgattcatagatatgataaatctttgtccttacttcttcatttattttgtattcataggcccaagctatcatgttgctagccggaaatggacctcatgctaaaccggtttcacaacctaaacctcaaaaactggttcatcactctcttccaaccactgatcctccaactatgcctcctagtttcctgccttccatctcttacattgtctctgaaaccagaagtagtggatccaacggggttactggacttggaccaacaaaaacaaaggcgagtttagcatccacgcgcaacaaccaaactgctgccttctctatggctccaacaggttataaatgaagtcttaactcctattaatgttttgtcatcaaacttctatcttaggtttagtttgttataaccaaaaaatcttgctatgatttaatacagtgggtttaccacaaacacgcaaagcatccttggctcggttcttagagaaacgcaaagaaaggtactgagctacaagattattcacttattcacaatatcaaaacacaggtttgctgtatattggcttcgttttcttgcagggtcattaacgtatcaccttattacgtagacaacaagtcatcaatagactgtagaacactgatgtctgaatgtgtaagctgtcctccagctcatcatctgcactaaaaccaatttagacccctcattgttctaaaggctttttcttttttctctggctctgtatcctatagactatagtatagttgttatagcttttgtttattcagattttagtacactgggcttgtaaaagcaagttatttatatatatcctataaatttaatttggatactgtatgttttgtctttactcttgcatgtgtataaaaaacataaaagtaagactattcaagctcttctagattttgttgaagtcaactttatgtttatacttttttttcgataattgatataaaatatttccaccagcagatgaaagtcatttaattagttggtgccatgtgctatatcagaaaataaaacattagtttatatacttaatcagtcctcgtcgtcgtcgccatatatagtagatcaagaatcttggatgagacaaagagaagatcctggaggagaaaaagatgacaaaactcgtttccaagatatttaagaggttgatttctcaaagtcagtacatgtcttcttctactactagcaatctccctgctgcttcacaaacttccaatcttgagagccaattgctttcttcagctccaccacccgcaagtatcttgcacatgctctctctcgtctaatttgtgattaagttctgaatcttggttctgaatctttgtgtaaaaatgttttgcagagaagaaaagagggtcagcgttgttatggtacttagttggattcactacttatggtctcggtgagacgtataagttcctacaaacacaagtggtctgtgattttcattatatacattttaattatacgtgttgttctttgatctgctaaagaatttgttcaaactcttttgtttcaagtacaaggaacatcttgattctagaaaacaatgcttggaaatgaaaccaatgaagctgaatacaacgaaagatttggatgggttaggatttcgacgggtggtatgcaaaggcattttcgatgagcaaagatcgatctatgtgggtccaaagcctagatccatgtctaaaagttctgaaattggcttttatgtcattacacctcttttgccaatccctaatgaacctaataggtcagggatttactctctatatgcgcaaaccaaactaaagtctttttgatctccatatataccatcttgatgcaaatatcttttttcttgtatatttaagtgtttggatgcaacatctagactagatgcaaatacttgcaaattttgtgtctcttacaaataaggttgcatacaaatgcaccaaaacaaacaaacaaacaaacatggtctaactatctttttcttcttccttttgtcactagtatgaagtcccctattctagtaaatcgcggatgggttccttcggattggaaagaaaattctctagaatctctaggtactggtggtcttgttgctgctgcaaaagagtcaagaaaagctaataaacttctctcctctcaacaaagtctcttgtcgaagttctggtacaagttgaacaacccaatgattgttgaggttggtcttcatttcataaacttaatgagtactcaatcattcattgcatgatttgatatcatagttaagtgttattggaatattttttagcaggaccaagtctctagggctatgcatgtggaagtggtgggtgtagttaggaaaagtgaaactccaggcatatatactctagtaaattatccaagttcgcttgcgtggttctaccttgacgttcctaaactagctctagccatggggtttggtgaggacacaatgtatatagagagtacgtacacagatatggatgaaagtagaacttatccagttccaagagacgttgagaacttgactcgtagtaaggatataccactggactatcacttgtacacagttttgtggtaattaacaaacataacatcgaacttattgcactagtaactggttgtttttgtttgtttgtttatggtagtgtgcctgattgtttctatatgcaggcactggagttccctgacttgctttattaaggcgtcttcgattttaatgcgaagattaacaaaatctgatcctattggtgtagagccaatattgattccaatttccattctcgtttttatatgtaccaagatatacagtcttcgtaacttattttgtaaaatagacactattggtgttgggtgtgtcactaaactcgacacaggaaaagtcaaatgacatgcccaatgaagtccataatgaagggtgaataagttcgaaatcgcggttcggattgactaagatcggtggccaccagaagatcgcagagaggatatggattgtgagcttgattataagcaaaggagaagagagataaatgggataattttattacgaaccagaactttttgtattcaatcaattttcccgtatgtattcatctcttagaaacatctcgcatcttaaacatcatcatttgtactcttcatttgtattatcagtaaaacaatgggaaaaatgtcatttaatcctccaattttcaaaaaatggtcattttatacatcaacttcgtatgtggccgtttaaaacatgaactaaacgttgactaatttttaaaacatgatctttcgttgatcaggccagaatagacatgccgttgtcagtcattaacggaacttttaacgtcctttatcatccgttaactttattagtcaagtttcaaattgtggtcattttaaacatcaacttcttatttggccatttaaaacatgaactaaacgttgactaccatttaagacatgaaacattcgttgaccaggccaaaatagacatttctttatcagtagaacctagaaataataactgttaatctgtccaaaacaacgtcgtttgagaataatcgaaagaacacaaagattttttccatatgaaatctccatatcaaaagttttaagcagaacccaagaacatagtttgataaagagataatcgcagtgccagtaattggaagcaaataaaggtgttttcgtttatatatttgttttaaattttaaagggaatcatgaaagcaaattgaagactcattataagattgttcgtcttgtttgagcggttgtagaaatagatttggggaactggggtttcatttagaatcttttgattattctcaaaacaaagtcgttttagggatactaatagagtcgttaacaagtgataatgaattttataagttcttctaatgaatgatgacaacatgtttattttggcttggtcaacgaatttctcatgttttaaatggtagtcaacgcttagttcatgtttaaaatagtcacatataaagtcggtgtttaaaatggccacaatttaaaacttgactaataaagtcgttaacggatgataacggatgttagaagttccgttaatgactgataacggcatgtctattttggcatggtcaacgaataatcatgttttaaaagttagtcaacgtttagttcatgttttaaacggccgcatacgaagttgatgtataaaatagccattgtttgaaagttgggggattaattgacatttttcccgtaaaacaacattcagctattacaatgacagattatttgttgtaagttttcttggaaccagcagctcatgactttgccaaaaaatgtgtacttattcgttaagtgtaattaaaacacgtttcttgagcttgtttggtgttttcttttgttttcttgcagggtcattaacgaatcaccctattacgtggacaacaagtcatcaacagactattgaacacggttgtccgattgcgttattaagctctcctccagctcatcatctgcactaagacaaatttagaccccgaccattttgagtatatatatgaacgtatcgtaactatagtatagtgtatagcttttgtttcttcagattttgataggaaggtttagttttggaaattgtatctatttgtcttaactcttgtatatgtgtaacaaaagctttaaataagactacatgcatcctggcattctcacatcggaaaaacgttttgagctaagaatccgacaataaactttgcaccatcttcgttggagttttcaagggacttatcgatgagcagctctctttatagaatatttggcaatttctattatagcctctctaagctttgttggacccactggtataaacaaacttgtgacacactgacacaagatctagaagaccagttcttggcttagaagagaagaaggttttggcttaccaaagctcttatttataaacgttttaaatgtttatagtattaagacttttattaaatttcaaatattataatatttgaattttatatatatatatatttttttttgatgacttttgggaaatcaataaagggtttactacactatttatttatggaagaatgaatgctattgaatttaattcttaagatttagcatatttgatgaaaaataaaaaatatctcgactcattgtttttaaaatctcaagctaatcgatggaaccgtacggaaccgtctcagcacaatcacagccactagcaaccatcgttacaaggatggcctgcagctttggttctccacacgctcgtcctcttagcccgagtgttctgtttttctatgtcaaactctgtttctacttctcttctaaatttcagcatgaagtagcatttattgtataaacgttttttgtttgaatataattttacattctttcaaaaaaaataaaatctcaattattttgtgtgatcttaacaaattactccagtataaaatctatgatttatttctccacaatgttcattaaatcaattttatataaactatttattactcttcaatatcagattggtaccatattccttaaaaaaccactacatatatttattccaatttagttatggtatcaaatattttatgtttggctaccaagagatttgagacataactcaattgcctataaatactcttcacctttaacgtctcatcgcatcatctaatcaaaggttagtcttatggtttttcattagatatttgatgttttttcagtgtccaattattttttttaatacatggacataattcttttcccaaaattttatggttaaaaataattttctttttgagagttctttttttcctcatcatataatgttttttttttataaagtttcatgtttaatgttttctatgtatgcttttccttctgattttgtttttaacaaatataatttataagatcgttaataatttttgtttgatttcttgcaggaaaataaaatatgtaggatcctcctttttctatttgatctcatcttccaaatttttataaacatttgagcaattgatgtcaaagtgaatacaaaaacaggaaatatagtagtcttatataagacaattgtttactatataacaactatatgcaaacaagaattaatctacggatttaaacctaaactaaaaatgatcactaacttgatgaacaagttaaaagcccaaacctatctctggatcagaaagaaagagaagctaatcagagtctcagagagagatttgggcttaaaaagacataacaggcccaataactcaattaagcccaattcggataacacccctgcgcacaagatgatgcgtgaaaagataagtcgacggctcttctccgataagattccggtgagaaacgagcaggtcctgtcttcttatgaactcaatttcttcatttctgattctataaaacatccttaaaaacatgtctaccacattgttgagaacaattcagctaaaccagttctcacttctcggaactagcttgttaagaaggagaaggagtaacaacttctccgtgaggtcttgtggaagccaaacaacgacgacccatgaagctaaacagtcttctccaacaagggttgctccaaaaaaccacaaaagcaaccaacttgatgagattctgagagattacgaagctgtaattgggatagagactcatgttcagctctctacattgacaaaagccttttgtagttgctctaacaattacggttcttatccaaacacaagtatttgtcctgtttgtatgggtttgcctggtgctttgcctgttttgaattccaaagttgttgaatttggtgttagattgggtttagctttgaattgtgatttgtctcttaagtctaaattcgataggaagcagtatttttatccagatcttcctaaaggttatcagatttctcagtttgatattcctattgcatctggtggttatgtggatgtggatattcctcttgagtttggtggtggacataggagatttggtattactagggttcatatggaagaagatgctggcaagttacttcattcagacacaggagattactctcaggttcatatggaatttatgacacgtttcagtttggttttatcagattcttgtaagggttttaggtttcagatgcaagatgtttgtgtttcttatgtgttagttggttactctaatggtgcaggtagatttgaatagagcaggtgttcctttacttgagattgtttctgaacctgatatgagaagtggtatagaagctgctgaatacgcttgtgaaatgcaacggattgcgaggtatttgggagtcagtaatgggaatatgcaagaaggctctcttcgctgcgatgtcaatatctcaatccgtcctattgggcaagctgagtttggcaccaaggtcaacaagtttctttctctctatatttctttgtcatttatgtgaagggatgatccactcattaatctcgttgctgattcgagttacaggtagaaataaagaatttgaacgcgttttcagcaattagcagagcaatagactttgagatatcaagacaagcacttctctataatcaggggaaagcagaccagattgtaacggagactcggctatgggaagaaggcgctcaggttctaagctaaaactctttcatcaggtgcttcctttttccatcagcaactaacttgagtagatgttcagaaaacagtaacaatgaggaaaaaggaagggcttgctgattaccgctactttccagaaccagatcttccagaagttatccttacccaagaatatgttgatagcattcgtgcttctttaccggaactccctgaagcaaagcgcaggagatatgaggcgatgggtctaggcatgcaagatgtgcttttcctcgcgaatgacgtcagtgtaagtcctatttgctcaatgtagatgatattttagatacataatgaacctacttatgttatcttcacaagaagacaatggtgagagctaaagagtaaactttctgatcaatttggtgagaatatagatttttttttgtataacagcaagacgagtaaactgttgtttgaatgaatggcataggttgcagaatatttcgatgcagtcattggtaagggtgctgaagtgaagttggcagcaaattggataatgagtgatattgctgcttacttgaaaaatgagaaactttctatcaatgatattaaactcactccccaagagttggctgaactgatagctgcaatcaaagatggaaccattagcggaaagatcggaaaagaggtcggttcaattcaatctacaaattcatcatctttcgcttagatcaatgcgatgaattccgtttttgcagatactgtttgagctattagccaaaggtggaaccgtcaaaggaatgataaaggcaaaagatttagttcaggcaagtccatgaagagttgaaaccagagaattacatctttcactttccaacatgccatttttaattgagaaatgacttttgcttctctgtagataactgatcctgcagagattgagaaaatggttattcaagtggtctctgagaacccaaagcagcttgagcagtaccgcagtgggaaaaccaagcttcaaggctattttgctggccaggtatggcagatacgatcctcattttcttgaaaacttgtacttggtgaagcagtttaaactcgtatatgctttgttcaggttatgaaaatgtcgaaaggcaaggcaaacccagggttactgaacaagatcctcctggagaagctcaatgccaaagactgattgaagcttcagcattgacagagttattgctcttgaaatagacattgaaatggtacaaagtgatttttgctcgttggttattgctcttgaactagaatgttcttgtacaaatcttttcctttgcaaatgtgttgttggttaaaacataatctgttcttttcaaatacctatcaattacatcttgacgctgcattgtcgaaactagattccgggtccatgcccttcgtactctcggctttttaatgtattccagaagattcatttgtgaagactagttaaaccatgagacttacctcttattgagcagttttcctcatggtatccttagcttgtaaattagcacttctcaggtttattctcaaaaacaatccaaattcagtatgagcattacttcctataccaagtttctgataaatgattgacactttgacagagttataggataggcaaaactcaaactttacttctgggaacaatacttttacgtaaaccaatgtttttactctctcatattaccagaattcttctaacttcaaaggtcaagactcaagtgcaaaatgcatactttaaaacattcatgtagcattgaacgagagattccagactacaccatagatgactcgttatcacatcatttgtcttacatattacattactctatcaattctacttctgaactattgaactgaacaatacaactagtaagcatacagtaattgtataaaaatgtacaaggtaaaagatttagttactgttgttatatcgtttggaagcgaaagctaaacaaagactcaacgataaatcttaacattgaacatttttcctttattcgaagaattcaaagtcctgttataagagattcacttatactccttaacacaattcatccaccaggtcgactggaacacgaaaacactatatgttctaggaagaccatgtagttattccaacataatgtctaggctcttcatttagtctcagagctggacttggttgtagtggaaacagtatttagcttacacaaaatctcactcttcaactcagtcactaacttgtcaaaattcttgaattgtgtatcgtaatcgccttcctcgccggattcatcaatataattcccaactctaatataaaaaaagaaaagagatagaaagcttcagtaccttgagattcaagcaaaagtaaagagataaagagaaaccatgacatactcaatttggagatggccaaattcttttccatcttcagctattgcatcaacaagaagtttatcattcattgccaagcacttaaccagatatctcttcaccggacatttataaacaaacgcatactcctcgtcgaattcgttccacccttcaatcccaaccaaacctaaaaataaaaaaatcgatcaaatccgaaccctaattaaaccctagaaaaacttgtaaaaaataaaaaataaaccctaaaacgaagccaatactaacactgagtggtcgatgaggacagagcgtcgtgggcgaaggcaggacgtccggttgaagtgagaatgaaacccgaaacggctaaagaagcgtgaactacgaaagcgattttgtcgtttttattgcgaaaagcaggcataactgacctgatcacacccatcactgcatgagtagtcgccattgattctgtttgaggagttctcgtcaagttcatatgttatccctttagagtaaagagtaatatcgaagttgtaatcctctcaccataaaggtcgggtatttttttttttcgtcgttttcttttcgggtatttgttatgtaaacaaaaacgaattgataaggagattgtgtatacatgaaaagaaataaaataattggcataattatacccataacacgataaaaggaaatatttttatgataaaaggaaaatgcctttttcaaaaccttctgtacttttgtattgaacttgtgtcattgctgcaacatacggttaaacgacttgttattacttcattattgagatgtggtcgcaatgtagtgacactgataagtctaccgagaaccggaaaccacttaatccgggatcaagttctctcctataatgattagtccgttgtgctctatatagatgaaaaaaagaaaactaaattacttattgttgaagtccgggatcccttgaaagttggacgtttggacgtctttttatcatgatgtatgggattgggaattttctagccctaggatttcggtggaaaccgttaaatcgacccgatcaaacaaatttttttggttatcggcataaaccgaagatattccttctatccgatcgatgaaattaatttgggaaatttgatttcggttcgggtcggttcgataatcggaaccgattggttttgcctaaaccaagaatttgcagccatatctccctgccatgactttatgaaggcctcatcgattgtggtgctaaaattcacaaaacaatctggccagatatctagaccggcaatcctttgaaaccagtatacggaattcaagtgtaaatcttgcatccacattaacatcgtaagatggatataagtttttgtttggatatgtttaatatgtagcattggaatgtgatttgtagagatatgcatttttgacggtcaatcattcacggaaagatatttacaaacagcaatactcctataaaaacgtcgcacaaacaaacaaagaaagacatcagggttgattcttgaaaggaggcatgtcagccaggtgtgtttttattgaaatctcgcgcatgtgacaaaaagacaaatataccctttaaaccattttatttttttaatcattttgttttctttctccaatcattcgtattcctctccttgttgctgctgctctctctcgcatcagccatggcggtttctatgtttatccctccaaaacctcctttcttctaccctctctagaccttcctctctcttgattcctttcttcgtatctctttcagtcgaagccaaaccccttgaatttccccgatttcaaatggcaattgtgacaggagatcgctatgttgagaagctacaaaagtttttagaagacgaagctgagtctcttctagaagaaaccatgattctcaagcttaatcctgctggtcttcactatcttcatctccgtcttgactctctccgtgaactcgaacgcatgctctccaatgctcctgttgattaccttcgcgcctacgtttccgacctcggcgattaccgcgcactcgaacagctccgtcgtattctccgaatcctcacttctcttaaggtcgtttccactcttccttctccggctcgtgatcccacgcctctctctctttttccctttggtagccttaaggttttggaactccgtcgctgtgatttgtctacttctccggctaaaggcttgatcgagctccgtcacactttggaaaagatcatctgccataattccactgtcagttttgcttcctttagcttgtatagagaaattcaacgctagtatataatgtagtgattcaaggttttgcatgttgtggatttcgattttgatataggatgctctgaggcatgtcttcgctagtaggattgctgagataacgaattcgcccgagtggaataagttggcggtcatatcttgtgcttgtaaccgtcttgtgctcatggatgagtccttgcagcttcttccagctgctgagtctcttgatctcagtcgaaacaagtttgtcaaagtggataatcttcggagatgcaccaaattgaagcaccttgatctgggattcaatcatcttagaacggtgtcttacttgagccaggtgggagacttcagagttcagacttcaccatatccatgcatagcttacatttgatattgtagtaaccgcttttggccttgaagttggtattcttatagtcatttgaattgtctagcttccctccctagtttgaataagatgatagttttattttgaaaaacatgtatctgtgctgaagcttttattctggtttcatccttgggaccaatatatggatgtttttggacagtgcaggtatcctgtcatcttgtaaaacttgttttgaggaacaacgctcttactacgttgcgtgggattgagaacttgaagtcactccaaggccttgatgtttcctacaatattatttccaacttttcagaattggagttcctttggagtctttcacaactgaaagaattgtggctggaaggaaacccagtgtgttgtgctcgatggtacagggcacatgtcttcagctacgttgctctcccagatgaagtaagcttttattattcttgatttggagaccctgggatcttgtcgtgaagacagatatttcaccatgtcggtttgagcttgatttgtaatgctttgtattatatgagttttcagctgaagctagatggcaaacagataggaactagagaattttggaagaggcaaatcattgtagcccataggcaaagtgaacctgcaagttacggattctattctccagctagagaggaagataatgaagaaggaagctgcaatagaaaaaaggtaaacagccgcaagtccatttacaatatactgtacttatacactcatatattatgtagcgatcctttttttcctgtgtgataaatggtaatgtggtatgactttatggagaactgtgtgagccctgcacaatgctgcgttcagcttctctatttgtgcttttcagtatcatggttgttttgtttgataaaaataattattgaaagcttattatcttaagtgttttgacctttaacagaaaaagatctgccgtctcgcttcaatccatagcgaagcagagagcacctatgtgaattctgaccatgagtcagctacatgtgatcacgagaacaaagagaatatgaagtttaatcaagaagccgatatatttggtcttataagtaaagttgaacacctgaagaaagaacgttctgttttgtggttgcgagagttcaaggagtggatggatcgctcaacagaggattttgcagatgtctgtaaagacagccagggtataaatttggagaaaaagtactatacaaagataagagaaatctcaaggcaccatggtggaggaacaccgagatatacttccgggtctttacgtgcttcaagagctaagagctataggaaaaatttggaatgcaatggctcatgtgtggatcataaagctggtatggattatatgaagtacgttgaaggtaatgagacacaaaagataaccgatgacatctcttcaataagccttcaaagtacagatcgaaatcagaagcatcaggaatgtgtacacgatgagatggaatctttgtcagttgaaccaaacgacctgttacctacaacacttgccaaggagaagctagctgaaaatggaaacatgtcaacattggatataacccagcatatgacaggatcaacatatcctgggtcaccccctcattatcagaaagatgtcttatatcgacgtcataatttggtggaagaaatcttgcagttgtctgcagattcttattcagtggcgtcatctgatagcacaagcagctgcagtgaagatgataattatgattctgaatctgagtattcaaatcataaagaggggcggttgactgatcttcttaatgtgaatagacttgggaaggagatcctggaatgtacaccgaaaggaacaagatttcttggttctcaaccggagaatggtagcacaataaaaactttgagaacagatgaatcaatgaaggaaactaccactaactttccttctggattgcataatggtaaacatggtgttaaccagacagaccgtttggttgagaaaaggaaacctataaaaagatttgtttccttccagaaagaggaaagttgcattaccaatggagagatatctctcaggagtgatgcagatatcagtgattctggtgaagatgtgtgtatttctgataatttttgggagaataccctgtcaagggtttgtagtagtagtagtaataggagtatcaaatttttggggactgatagaacacttggagtagaggaatatttttcagcaaaactgtcagtttccagctctcaagaaacttgtaggacgtacatgaattgtgatcttatactacagaaaggttccacatacaagcaacggtgagttattgttccacttgcatggtcgtagtttataggtaaaggatagtaatgcgagtccctacaaaaagttttgtacattacctatgatatctgattctgagtagctgagggaaaagagatttcatcgttttctagtatggctaggctttgataatagtatacaattaaattgcagaactacacgataccattagataagatgctttgggcttccttaaagtgggtgatgtgtggaaaatcctatgtgcattttggttatatatatacaactgcatagctaggttgggaagccacttcatatcaagatgctatctattcttttcacttcgaacaatattctgaatacagggaagcagtgttgctgctgagtagccaggacaagttgtacgtgctactcgtgggtgtgactactgattatgaaggttagactaatcagctgtcttccttgctagcacgtcataaattttgctgatgctgagttcttaatggcgatgtgtgactgcagggagtaccttaagtgtactgtgttcccatgaaatcaaggatttacaagacgtatcagttggtctaggacttcaatttgtgaggttagtctttttctggttcggctttgtatatattttttgtatccactgcccatgttcctgaaccttctcttattttgtggttaggctacgctttttggaggatgtagaatacatttttgtaaccaagtgtattaaaaagacaacagaattactcaatatcacacaagttttcgattcccaggctacagagtataaatgttctttgcaaaggtgagccattcacattcaaccaagagtcggctctgtatatttttgctgtcataatttttgtcttctatgttaatggcagtctggagaatattcaggtggacttgtttgagaaagaaatatgtggaggtttgaagctaagtatattccagtacaatgttctccattttcagagcaccactcgtggaggtatattctctctttgcctatgttatcctagattaatgaaaaatgggttccctcaaattgtcagcaatccagagttataggtttcaatgtttcatatccacattaagtcatgtccccttcatttttatctccggattttattacatgatcgagagataatcttttgggttcacgttccaaataaagttctctctgcatcatgagccatgaaccatcactgtttcgttactacagtgactgtcttattttttgcgtccaaaacctccaatacaagctttgatcgctgctaagatttttgtccaatttaaactgaacagaagtgtcatggcttttgcggtcgctatttgtggctggtaggcgtctctttatatgcagtgaggacttcacacaactaagttctcgaacagcatactcttcttcagctccatatttcttgctcgactcgtgctgctccatttctgaaatatctgaaatggtaataagtttcttcattgcgcttccccttttgctcgcactttagtgagatgagatatcaacttccttgttcagatcattgaaacgcaaggaattgttgtgtcattaaagatcaaagagaagagaacagtggatttagttacatggaagctcaagtggtgcagcatagagaatgctatcaagtttgcggccttgctcaaagctcttcatcccaattcgccacaatggccgttggctgtaagatacaggagataagtcttcgtttaccttttcttttgttttttgaccgatcacctctgttttgttgttatgtatatacaacacaatgcacattgttcatattcatttgatccagtttgtttttttgggttaaaatcatctctttaatccgtgtgttttgagccttctttccctttttaaaacatagtagatttgatttggatctttggtgcgtctaggaacatcttggagtctgcatagtaacaaacattgggcagggtaataaaatcgggatttgtacacgcagacacgttttaaaccgcttatattagccagacagagcaagctaggaagcatacgactacaaagccaagtgtatgcgtatgagaaacatgtgttgaccatatatgttagcttgttctttagcagctgaactgatctcgctttgtccggacaagttccagcggtaatctctccagcgccatctgaaaatatataacatgagtcgtcaatcctatgattcaaatcataggcgtagaaacaaagaaagaaagtctttctcacccatagtcttggagctgttggatcagacttgggttgtgctttggctagcttcgatttgaaacttatggtgatgcataccttgaattccactgagaagggactgttccacaaagacataggatcaaaatcatcatcatttcagcagttttatagaataaactaactagagagtcatttgtttcaatcaactgcctaggtttatagaaaatgaagcaaagaaacttaccctgcgaaaacggaaggacacattaaaagccgaggtagtaaaacgtaaatgggtagagtcatgttacggcacacatctccatccgcaatctgaacatggtctaaattagcaaagcattttgatattacaattactacattaacaaaccagaatggtcattttaacacctgtgtagactgaatcaaagaggtctcagtgacaatcctttcccctacaattatcgactcaactcggagtaggtgaatgtcaatagaagtaataggaactgaagatgcttccactgttaactcaccactgagtggatcctgcaaagagcattgggtggctaattttccagtaactcggaaaccaccttgtgagatcaattgtcctattagttttcacattaagagatgatatctccgaaactggagtgaaaatgttggaagaacaaacctgtcttaatatcaggcagcaacggatgtctctgtgtgtcttgagtgatgtagaagatgacaatttccggaggaataggccgctcgggaaggtcaacttcaaccaaaaaccaaggaaaaacatcacaaaacaatccatgtttattctataaacaccaacgaagcaagacaaagtacctctaccgctctcaataataaactccattgttgcagacaaaggtttgtgcaagtatcctcgcggtatatctgcagttagtagatactgtcacagatttttgcatcaatgttttcccaattcacagacaaaaatcctaaaatccttattaaaaaaagctgatcaaactactgacttggatgttgatatttgttccatgaaatgtctcatagaacttctctacaatgccttccccaggctccctcagattcaaagagaatggtatctacagcaaaaaaaatatccaaaagcttagcttactcaatgttgcagctatatgtgatatttctcaatgggactatgttctttacctctgtagttcccggagggattttgccagaagacttaacttcgatcgtcttcttgctgtggccaaaattcgaattatttgcttaagctcgagtaatttcaacatcaaggaatcaattcaagaaccagagaagaaataaatgcttacacgatttgaataggcttgatgacaccatagaaggactcaataactccagctgatcctccacgaacctgtaggagtgaggaagaaatttaactaacttggtggaaccaaattgaagaaaagcttcaatagagagagaatctgaaacctgcaagttgactgatccattgacggataaacgtattgcttgatgcgaaatcgaagttgcagattttatcacaatttttccttccactggttcctgattaaattcaaaaactagagatttcaaattcgtcttcaacgtaatcataattcataattaagagattcgatacatacggaagagcgatagatacgatttgatcgagaaagtttgacattcaccgtcgtcgccgtcgccattttactcaccgagcttagctacagcggattttgtggcaacggcggagtaaatgaaacggcagaagttttctctataagtaggacaacagcaggatgtctttactgaagacaaaacgttgattaaatggcaggtagttagtatctgagagttgaaaacagcatgaagtgtaattcaattaaagtagaaaaagttctagaggagacgttacaggcaacgctacactttcttctctcttgtcttgtcacagagatgatatcagagagaaagcttaaaccctaatattcaaagatgtggaagaaaggggagctagtttgggtaagcgtgagcttttcgaatacatggattccgggtcggattatcgatccatccgaatcgttaggagttctcgtctcgttcttcggcctaatggatccgcgatacgttccaaaaccatttctacgaagctttgatcgcgatttcaaaaccttgatttcagattcaaggtggattcgccgctttgtgaatcgagctctgcgagcttacttttggaacatctcgtttgggttatggtgttcttgccagccgcgtattgattcgccttacttggatagagaaaactctctcccacggtttcatgccacttcggattcggctctggggtttgttagagatatggctatttcgatacgaatgcccctctggagattagctgagaccaatagttccagtgctcagatccttagttttcggcgttacattgtcgattttaagcgctccgaatctgtctatgaggagactagagcaagtaagtttgaaaattcttatttttgggttttgctgagtacgattaggaaagaaaccccatttggtgttttagaactgctccatagagatgattgctactgtttcgctctattaggtttataggaacttcaaaatttgagtgtgaatctatatgctctgtttacaatagaacaaggcgaagtatggattgacagatattgctatgatttgtattctcaaataattctatgaatatgtgtacaggtgcagagctaaatgatcgatctgaagaatcaggttggtgtcttgaatactcaaagaagatggacctgtgttctatgtttcctgagactgcggatgcggatatcgacaacagtagagatttgagtctaagagatccattgccgaaggatctcccttgttgttcttctgagcagcatgttgataaagtagttcagatttgcacatggaatacgaggagccctcgaaccagttctaattctagtaccatgaaagcttgtgaaaccatggttagaagagctgttcatgaggatgatggtcacctgtccaagagtaaagaatgctgtcaagttgagcagaatatctgcttattgaattcagaaccttctattgaagatatgatagaggaagacaccacttccgttgctgcctcaagagttgatgtatcagaagcacttcctgatgttatgattgaaactcatgatgacatcattggtttggttgatggacctgtgacatcgacaaatgaactgtcacccttgcttgattcgagcaacgacaaagcttatttggcaaagcctgtttcttttgttgttccaggagcctgtcacactctagcttgttcagtgagaaaaaaatatgctagcccaagaaacaagcttgatagctctatcatcagtgccaagaccttgaatgagcagtcgttaggtaggaatagtcttaatggaacacgagaaaactgctctgaatatacgttggagtcacatattgtggaggtgggacaggtttcgctacctagtacaggcacttcaaacaaagaatttagttctgatgatgcaggagcacctgcagaacaattacaagatttggaagctggaacaactgttgaaaaccagacgagatcagttgataatgtcagatccattggtgtcaaaaggaaggcaagtcgagacaaagcatctgcacgttactccaagagaaagaagaaagcaggccaacaatctatttctactgataaatcgctgaatctacacctgatgaaagatatgcggcttgctaatccaaaatgtttgcggatgaagtttttgtgtagacatggggatctcccgtccaaagcagaactgttgaagagattcagtgtgtttgggaaaatagatgcttcaagaactgatgtaaacccaggggaaagctctgcgaaagtagtattcatgcagagcatcgatgcagtgacggcttatcaatttgctaggagcaaaaagtttagactaggaaagtctaaggttacgtaccgcctcgaaccctttgaggaagacaatgaagtaaaaaaagttcctttgcctcagaagccgcaaaagtctgctccatcaccaaaatcatgtctcaaggaacatggtttggtagataaagaagagggaagaaggaatatgaaggtgaaatttcaaatggagaccaactcatgaatccgatgacatcatcatctcaatagttttagcttatgtagctctcacgggaagcttttgtaatgtagctacggtctgttcctaacgaagaacttgcacctttttttggccttgaagcttttgtataatcatggcttgttttgtattagagatgacatagtttgtacttgactacataaaatatagctttaacgatgaatcatgaatgtgactacaaactaggtttccattttctgcttcaaaattgttatctgtttagaaatttgggaactcaacaagagaagaagaaacaacaagttgaaaggaaatagcaagcagtgaatcttgcaagtacaaaagcataagtttacactaaggcgggtcgtttccatgtatggtcttcttgatcgttattggcttggctaggtcgtttgcactcgcatttcttgcaagcatcgtttctcctaaagttcacgaagtcgcatctgcaaaattaaaatgagccacgggaacaaaatggtctggtttaggatatgaagataacaaattactaaataagagacagagaggaagagagacgcacgaggggcattcccaatctccaggctcagctagcgtcttgtgacgttgttctcggcactctcgacactgtttgttgctagcaaagttcatatatccacacctgaaaatatacatacaaagcattctgatcagtacagacagagcaatcgagcaaagatacaatcatacaagatacaacaactttacaaactttcaatctttagcagccagaaaaaatgaacgtaaagactaaaggcagatacagctgataatcataaacaaacgcggagacatagaagcaaaaaaagaagatatagtagaggctttgagaggtaagggaaacttacccagtgcagttccagtctcctttcttcatttcaacaatattcaccattgaagttttctttggtccctttgctttgcatttcagacagctctggtttcttgtgaagtttaagaaactacacctgtggagccagcaagaaaataaccaatgagggtatggcataaaagacttaatacttttgatttcgagagaaacgggtaattgtcagatttagacttactcaggacatagccagtcaccttccttgacaacagcagcaacaggtcgtctgtcagcgacttcattgcactctcggcatctttcatttctggcaaagtttacaaagtcgcatctgaagaggaacacagtaacagaaaacacaaaacctaaagtcagaaatttacagaaacaaacactcatttctcaaaccagtaatttaacatcttcatccaaagatgctgacaacattatcgcagcatcagatacgatatgatctaaaaggtaagagcctaggaaactaaaattggattcactgtgtataaactataaaggaccagaccaatttctagagacatggcatacgagctaattgttcttagaaattacttacttaggacaagcccaatctgcactgtaaagaggtcgatcacgttgagaagactcatcgttccgcgatttaaaagccacacggtgagaaggctcatcattcctcgatttaaaagccacacgttgagaaggatcatcattcctcgatttaaaagccacacgctgagaaggctcatcattcctcgacttaaaagctctctctttcgaaggcaaagaagattcctttgaagaaggttttggtaaagcagggattaaaggcttctcactaaactcaaccaactctaaaagaagtcttcttgcagactcatgaacaagttctttaccaggtggaacttcacctcgagagataactatagaatcaagcgcattgaacaatagtaaacgcataacatcaacagttcgagcatcagcttctgtatccttaagtatcacataagctctatcacacgagctacgaagatcacaagaaccacaaacctaggattcaaaaacaaaacatttcttatgagttaaagatctctctattatcaaggtttaaacaattccatagctaatgcaacaacatacatctccttcgtttaacttaacatgagctcgaatccttttggaagaattcacagtttttctgaagagattagggcatccacgctccacaagagcttgtacatctcctgatgataaggatctgcatcaagaggcacaaaatcatcagtttcaacactgaagattgatgaatttgagaaaattgtatacctgagaacgtcgtaacgatcacgagcgaagctgagacaagcatctttaacgagaatcatttcctgataaacagtatcatcttcggtgtctttggtgaaatatcctttcgtctttaagcgatcgacgaaagttatccactctggccatggatgaggagtgagagacggcgaatccgaatccacggtggttgctactgcggcggcggcgtcactggagaagcatcggaagcggagagatacagatggaaaacgattgaaagagagaggaaaggatggtttgtgaggtcggaatatggaattaccgactaggaatattctggaagatgacattttattgagatctctccggcaagatttcaccagagacgactataagtgaggttttagtaaggtttttggcaggcgaacgagtggataaaggagaaggcttttcaagttttgactatttgcaatatgaccttttatttatataagcattttcttttttgtccctttagttttaaaattacaattttgcaactcactagaaattcttttattaagcttgaatcaagactcaagagatgtggactaagaagctcatcatccaagtttaagggacagaggtggcaaggtttggcaatgttgtagctattaaggggttgcaaagtcacgattctgaaaagcctcaaaagtccgagcccaaaatcatgtcccaagaaacatggttcagtagttgaagagagaacagtgggaacccgaaggtgaaatgtcatcatcatctcaataactagtaaccattgttctgactaatgctgttaattaatggttgtatgcatagcttatgtctctcacactagtaaactaaacaaatggttggtagcttaaggtctacctaacaaataacttcaaataggagagtcgcttccatacttccacgtatggtcgtgatgggtatttgattcccttggtggttgaaaatttctgtcagtagtttcagcatctctgtcacggctttacattctatttcattgctctctatctagaaaagtggattccttcctatatcaaaagaaagccaaactgtctatttcagtcaaaagcaaagagttcttcaagttgctcgtccgtccattgtggcaacgagattgttgacgccatcgattgagatttgtggattgtagttcgagttgtgacttcatcagggttccccattacactctcttgctcatcaatctgcgattgagaacttcttctgatctgtttcgcgggtctaatgcaatcagctatatcagtctcagtagctacatcttcgtacagttgctgctctgtttggctgattgaatcatgttttcccaagagagtctgctccattctaacttcacagtgattctttgtcacaccctttttaggagaggatttgcttccctctgcaggattaatatctaccatttctatgtcatgcagtgcttcactgcttcctttagcattttgtctgagattgttcatgatgccttgagtagtgctttgctcaacactaaacacattgggttgcagtcgcaaatattcctcgttttctgttagaccaagtcaaaggttcgagtctctatcaaactgtgaaaaaaaaatcgaaagaaaatttgatcacttaccattcaccggaacaagattcttgccactcatttcagaatcgttctgctttggtaaaccattcacagaaacatgattcttggcactcatctcagaatcgttctggtttggtaaaacaggagtatcctttgtgataacctgttaatggaaactctctagccttaagaaattttcatatattccaatgaatataagaaggtggaacttgatatcctaagaaaaactgccagagaaatactaccttggagatgttcttcagtgttatgttaagataggttgatgaacgtgagggtgcgcagactgcaacctgaaaaacactatatcttagtccatgatttaccaaaagtgactgagaaacaaagtggtaatgtcaaaaccatgcgatttgttttgtctccttaatgaaaaacagcaaacctgcttaagtatcaccactgcgccaactcgtatatctctaccaaactcactctcggagataacttttctgtgcacactggcatcaattgttccagtgggatcctaccagcaatacacagatttgagactcatgacaattggtgcgtgacaaaaacaaaaaagtggaaaccattcacattgttaagagttcttgactgttcatttttttaccttaagagtcaccatgacatcacctagaccattcggagtgcaagttttgacaattgccacgacctacaaatgaccagccacatttcaagtatgtcactacatttcacttattagctgcaaagataagatgtggagcattatgagatcatcagcacgtggcttggcaaaaaaatccagcatttggctttccactaccccaattattctacaacatatacaaataacttgtggccaaatagcaaaaaattgggtgaagacattctttcagaatattccacctttctcctcacaaacacaaagcgaaagccaataccagcagactattatagggtgtagatttccattaatactctaactggatggtcactagatatcttggtgtaatgggaatggactagaggatacagctaaactgagtaggttaatcatacctgatcaactttaccccaactgtcacatcttctcttaatctcgctcactggtgtccctatagcatttccaccattgctcaacaaacctgccaaacaaaaattgaaaatggtaaaccacaacccctagagatttgacaatgtaaaattctaagagaaaaggtctaccttcacttcgaatgtaatcaacagtagagacccaggggtcctcagagaaatccttgtcttcccaatcaggctcttctgctgccttacgtaagaactcttgagttggaattggttctccatgctcattaaacgatttaggatccttattcatctttctacggattgcaacttgaacaactccagcaggtcctggaatcaaggagcgagaataactctcctcaagaaacttatccggcgaggagcagcgccgaagagtgggacggtgattagtgttactattaaaacccgcctttggattctgttgttgcgcatgcggttgcagagacctcgtcggagatttgcgtttacaagggcggagaaaagacgggagttcagaatcgccgagatcaagagcttcccattggtctacttcagcttgggagttcatatctctcatcacacgaatatgacgaaaaaagattcatccgcacatacccagattctgtagcaattgcattagcgataagccgataagtgaacttcaatgtgtgagactaaaattatgaatctcactaccattacacttataatttcattttcatgaaggtacgaaattaccaagattgagaactaaccggcggtgggggcaaatagggacgacgacgacgacgacgacggcggtgaagcgaggaggcgatgagagagagagaggtctcggtgacgtgaaaacggtttgattcttggaagagattctttacgagtcatgggaagagtatttatgtcattagttattgggcctttttatttggtatgatatgggccgcctcactctctactagtttacttcttttcgttactaactttttttttttttcccgctaactctattattttcaaaccaaactaatgtttcccgctaactctattattttcacagttgactaaaagaacggccgaaaaaaaaaactttctctctcgcatctttcagagagaaaaagttttttcttccgattaaaatcggattttcttcgattttcttcgattttaatctggttttttgttgtaaatgttttccagcctagtctggatcgcctaagtgcgagttctctttagccaatttggctattatcttttgttttgtttgatccttttcttttgcagtaactaaatctctttcatgaaacaaacgccgagtgtgggaaacagaagttccagagatcatcaactgctcaatcccttgcatgaaaggataaatccttcaactcctattaaggccgtaatcggctttgtgtgaaggtccctcttctttgtttgtggatcgtgatgtttggaaacttgatggctggtgaagacggattcagaagagcgtgttttgcgactggatctaatctcttcccttttcatcttttctggcgcttcaattttgttggtttatggatctagtgttctacacatcgggagatttctgcaaaagaaattatggtggtgatttagagaaaatagctgataggtgaacatccatgtcagaaaacagaatttgatcggcggtcagctatggcggtgatggcggtgaagactggtcggtggcgagtttcttcgcatcttccacctccaacttgagcaaaacatgtggccttacacatgttcattttaggccaactgatttactttataatttatgttgttgggcctttagatatgttttgtgctgttggattcctctttcaccattgtaacttcagccctgtttgggtttaagaatgtcgacaaaaaaaaaatgtttcaaaaatcaaaaaccttttttccaaataataaaacaaatctcatacagattttgttttttagttgtattctctttctcatgagtggctaacttttattcatgaaaaagtagattacaactaaaaattgtaatttagtaggtttagacattctcaaacttatataactcaaaatattaaatttagtaggagtaaatattaattgtcaatctttctctggtgaaactacagtaagaaaacatcctaagaaaaacaaatttgagcaagagttctcaaaagtgttttgtatgtttataaacaaacataaagtttaaaataggaatgattcatatttttcacaaaccatatttgcttaatatataagaattaattgattaggggaaaatattgtggagctaattaaaagaataaaatttgcatggaagctacaaaaatgaaaaatcagaacaaaactagctttttctataattactagaatagattttcttattttccagctcctacaaatgaaaaaaaaaaaaaaacaaattttaatcctaaatttaatatcctgtcatctcccaccaataccggaatgtcatgacttgcttatttgattttcgtttctcccactaacaaagtctcacctccctttccggtaaaacaaaaataagatctcttgtttctttttggaatgaaaatgtaaacaaacaaaaaaaaaaaccaaaaaaaaaaacaaatttgacgaagacaacgtaaaacgttagaggaagacaaattatttgctatggtgggtctcttctacaagattgtttgtttgcaatgatatgtttctgataaaagttttttttttgcaattatatgttcacaccttttttaccgagagaattttcatcatttggtttcaacgtagaataatcttggattggtcgaatttaaatttaagtttatgcagaatcatgtatgatcgtttcatttctctatttttcttcactttttcctactagcttgagaaaaattaatcttgttgcaggggagaagcataaagatcggaggatgaaaccttctttaatggatagtctactaggtctcctccgtattcgcatcaaacgcggcgtcaacctcgcagtccgtgatctcaacagtagtgatccttacgttgtcgtcaaaatggcaaaacaggtaaaccatccttaaccatactttgttaaaatggccctacttcttgagatagtatgtcgggtttcttaatcctctcaatatcaaagacactatttgatgatgttagatactttttcaactttatgatggagaatataatttgttacttttagtggatggaactatagcaacgtaataatagtgaccttttaaacatcttggtcattaaagcgtttcggcttcttgtatgatcattgttaaatttactaataagacgccagtttgaaagatcacgagtgttgaagactttagatgtgcattaaacaaaatatacatatggctaggttgattcggtcagttttcgtaaagaatatacatgttgaatttgtgaattttaggtatattgaagcggctctcagaatattttaggaatgtaatagtttagtagttaagaatctagctatttgtaattaatttggttgttcgagtgttttggaagtactttaattaaggtatctgaatattatttatacttgctaattgatctgaagcctcgaggtccggtggctggagaccgtaatctatctttacgcatcgtagaatttatctaacaacaaattcttagtattttatatatttcgagaatcattatttaacgcaaagatagtagttatgataaacgaatgagaaaattgaatgtgcagaaattgaagactcgagttatttacaaaaatgtaaatcctgagtggaatgaagacttgactctctcagtttcagaccccaatcttaccgtcctcttggtaaggaactaccaattctacgatcatatttttcattttttattttcaaatcgccataatgttacgtaaaaaaaaaacatgattacggtgtcaatttgcctagacggtgtatgattatgacacgttcaccaaagacgacaagatgggagatgcagaattcgggattaagccgttcgttaatgcgttgaagatgcacttacatgatctcccatctgggaccatcgtaaccacggtccagcctagccgcgacaactgcctagccgaggagtctcgggttatatggtctgatggtaagctcgttcaagatatagttcttaggctgagacatgtcgaatgtggtgaggttgaggctcaacttcaatggattgatcttcccggaaagggtctatgatttgttttctgtgtattggttatgggactttaaacctgaatttaatttaaaagtccaaattaatgtaagcaaacaaactagaaagaaaaaacgatagtaggaatgtctttgtacaaaaaaaattattatttgtttagtaaatgacgtgtttctagaatcattgggttaagcataaagttgaagaaaattacggatgttataagaagttccaatttttgtttcacacattagcgatcgtggaggtcatcaaaaccaagcccttatattgtataatgggaatcattactttaactcgtttgaaatgttaccacacttcaaccatggaatggaattatgtagtattggtaaatttaattaatcactagctgccaaaaatttcattaagtaacgtagtgtatacgtcaaaatttacttaggtagtgataatatctcgaaccaaggcacatgagcagatctctttcatatatgacacaagtatgagtacatgcatgagcagcacaaaccctatttgttgccttttctaacgtatacgcatcagggacccaaaagttatcaattacctttactctttttatttgtgaattttgtttgttgaattaatataagataaagtacaaaggaaacatatgagaacgctacaaccataaaagaagatagagacctgcagcaacaagataaagagaaggaaccaacctaccacaaccccttcagcacaatcaacaagagaagagaagagaataaggtgttctctcactcccacaaaaataacctaagtagatctcagtttttaaccttttgttaaatgataagttattaatcaattaactttaaagtttattaagtgcattgtatttataagatagctgcagaatttacatcaatgtagattttagaaaacagtttggacttttcgttttatcttataataaccttttatgttagaagattgtgcgttatctaaacaaatatctgaagtatgaaatgactaatgagaaaactatagtataattctaagctcacttctataattctaagtttatgagttaatgagttatataattcttacatcaatttttcacccaaaaccttatatacttcctacatagcttagatgaaaaatgtttttttcttcttctaaaacttcgttgatttcacaaatgaaagttgtatatatacaagtctaaaactttgtttatattcaaagttattcatttaagttcctcaaaaggttagagagattaccatagttacaaatatttcataattattattttttctgtataaaactcacaaaattacaattttaaaattaagttaagtttttcataatttcgttttcaatttcatattttatctactcactattttttttcttgcaatagttattgtttgatactttgatcagttatgcaaaagagttcttgatagttaatttatggtaatttactgtgttcaatatacactgccgaatataacaaggcccaaagggccagtaacaccatttgggcccaaacccaccatcactctctctctctctctctctctctctctctcgaaaagcgctcaacggtctccttgtgaaccacaaaaccatcacttcccggagaaatctgagggaattgagtctcgaggagttcaaatttgtgaaattgatcgacatgaatcaaagaggaagatccaccaatcgtagatcaaggagcttctctagatccagactcgccgttgaaggccattgaaatctcccatcacatttctctatcgtcttcttccttttgagttttccgacgacctctccaaaaatggcgacaccatacagtaatattctccttataatatatattcatcctcgtctgaatcgcacaaaaatcgaatcttttttgcttttgttctttgtctttttctcctccattactttatcaaaatcatgatcatgaaaatttctaaattttaaaacttttttgttggccctctttcagaaatcaatttattattgatgtagactaatcacgttttgaatgctagaaaaaaaaaaattctcgaataaattatattgtggtgtagaaaaagtaggtgtctcttcattgtttccaaagtgtatgagagtgtctcattcttgttttggttatatacaattggaacagaggaagagagagatatccagaaaagctactggatggagcattctagtgatttgactgttgaagctatgatgcttgactctaaagcttctgatcttgacaaagaagaacgtcctgaggtttgtgaaacagtggttgcttctttagtttctaatgaattgagattaggaatatgtgagctgatgtgttgctttgctatataggtactctctttaatcccaccatatgaagggaaatctgtgcttgaacttggagctggtattggtcgtttcactggtgaattggctcaaaaggctggtgaagttatcgctcttgacttcatcgaaagcgcgattcagaaggtaaaactacttaggtagctagctgttgttgtgttaaaagtttctattttaccattgcttcttttgatttctttgatgatttttttctttgcagaatgaaagtgttaatgggcattacaagaacatcaagtttatgtgtgctgatgtaacatctccagacttgaaaatcaaagatggatctatcgacttgattttctcaaactggttgctcatgtatctctctgataaagaggtaaaaactgtttttcattacttgattcttgtagtttctcgaatgtttagagatgaaagtcttaatctagtcgatggtgatggtaggtggaactaatggcagagagaatgattggatgggtcaagccagggggatacattttcttcagagaatcttgcttccatcaatctggggacagcaagcgaaagtcaaaccccactcactaccgtgaacccagattctacacaaaggttcaatcttttgacttgactttcatatttctgaaatgatctacttgcaaaacatgggttatgcctgaactttcgagtatatatatcgtttgaaggatatctaaaactatgaggatattctcttgttttgtgctatagcatgggagtaatttataagaatttaagaggacttctagaaaagactgctccagttggattaatttcattttgaatgtggtttagatccaagttcgataaggcttaaaaagtgtgtatatcatcaatttatagatttgaagtcactttgatccactctaagctaatgtattgggattagttgagtgcattctcttcaatatgggtgggtgaaatccagataacctaaatcttctgaagttagaaatgtatggtgtaaatgtaatgcaggttttccaggaatgtcagacacgtgatgcttctggcaattcatttgagctctctatggttggctgcaaatgcattggggcttatgtgaagaacaagaagaatcagaatcaggtaccaaaaaatttctttatcagattgtttacttttcatattcatttgatttcactgactgacaaggggtaaactttattctctatgatggcagatttgctggatatggcaaaaagtcagcgtggagaatgacaaggatttccagcgtttcttggacaatgttcaatacaagtctagtgggatcttgcgctatgagcgtgtctttggggaaggatatgtgagcactggtggatttggtaattccattcttactcttttatcttcatatggacatacgtacttgtattgtctgagtgttatctttatgttcttgttttccttaacagagacaactaaagaatttgtggcgaagatggaccttaaaccgggacagaaagtcctagatgttggttgtggtatcggtggaggtgacttctacatggctgagaatttcgatgttcatgttgttggaatcgatctgtcggtcaacatgatctctttcgcactggagcgggccattggactcaaatgctcagtcgagtttgaagtcgctgattgcaccaccaaaacatatcccgataattcctttgatgtcatttacagccgtgacactattctgcacatccaagtataagcaaagctactcaatatattatatatatatttgttctttcactcttgaagatggtttttggtaatcatcctctgcaccctttatctctgttcaggacaagccagctctattcaggacattcttcaagtggcttaaaccagggggtaaagttctcatcactgactattgcagaagtgctgaaactccgtctcctgaattcgcagagtacataaaacaaagaggatatgatctacatgatgttcaagcttacggacaggtttgtgttttttgtttctcacaaaacctttaatcattttacaaattgagggacatttcacatttatcatgattcatgaaaccttcttcttgtagatgctgaaagacgcaggctttgacgacgttatcgctgaggaccgtactgatcaggtgactcccacatacattttattcacatttctttaaatgctgattctaacatcaccatatttcgcagtttgtacaagtcctcaggcgtgaattagaaaaagtggagaaagaaaaggaagaattcatcagcgacttctcagaagtaaaaacatttctcacaactaattcatttgagcaaaacacctgtttgttgtgttctcatattgatcacaaaatcttattattacaggaggattacaatgacattgttggaggatggtcggcaaagcttgaaaggactgcatctggtgaacagaaatggggattattcatagccgacaagaagtaaaatccatgtttttatcccaaaactctggtgattcatttcccttcaataaaaccgttcctttggaggacaatatctgcttgtttactatcatggaactgcaaatcaaaagataaactcatgtgttgtttcgattcttactcgagtcgttgtgccacataaaacctgcattgctttgattttccattaaatatctgcataacattcaagggtaatcgatgttttttgttcttagtgtattcaagaacaaagttacatttatgacatgggctaattgataatgactggagcaaacagagcagtaaatggctaagtaaaactcaactggttccatctctttgtttacgagcttgtgactcccagaacagtctaacagtggaataaatcagagaaggctcagccattgcgccattaccgtagtctccacaggccagtttcttcttgatgggaggaattagggtgattccaagttcatcaagcaagacaaggtgccgttctgtgaaaggattgttccacatcaaagtgttcatcgccggtgcaacaaacaacggtttgctataatcccatgctcttactatacatgtcaatagattatcacataacccaccagcaatctgcaacaacaaaaaaacaaatatgaagccaaatagctaaaatccagatctaaagctacgtttcctatgattattagtaccttggctaatgtgttagcagacaaaggagcaatgatcataacatcagcccagcgtctgagctcgatatgaagaacgggatcaccaatcttgttccagctagaccattcatcttcatctgtatagagagtcacattctgaggtagagaaggtttatcaacgaaattgagagatgattttgaagcgacggctttgacttcagcccattctgagaaacaatggcagagattactgaacttaattgaagccacacttccacttgcagctagtaagatacgaggcttccttgttactgtatccacttccatattcatcttcttctctatctgaatccagaagcaggatcaaattttatacaaacaatctatgagattctcatttctcagagaggaattcagaatccgaacatggattttaacgatcatcttttgtcaaatcagaaaggaagcgagagatcaatggattcaaaagtttgtgttagagacattaccttgttacagccgaggaaggaggatctgcgaggaaccctaatcggaaatcgaaatcaaatgccgcgagggtctttaagtttgaaaacaaaacagagaagtcgacgtcatcgctggtcaatctggtcgttgactaatcaaaaatgggccttcccaacaagaaactgaaacaatccaaaaaccttattctggttttgtgttcagtaagactatgacccagtcacacaaatacgaatgttaatgtttctcaagtccccctaaattgttttattaacaatcaactatgtttcccttgcaccataacgattatagattctaatatatagaaaactatcaattatgtttattagactagtgtcagttttcagaataagattttcaaattagtgaagatatttgacagtttcagagatatttaggtttctactaagcttcttataactccaaattcataaacctcaaaggaaaagaatgttacaattcttgataacaaagacgtagcaaatcaaattcagaaggaagagtgaaagtttcccccatctccgagctacacatagaccattttaacactactgtttaaacctcttctggtagcaaaatcctagaaacgtacaaacaaacaaccctaaagtgaaaatcaaacattaacaaccaatcagtcttcctccaaatgaatgttttctcctaattaaattccctaaaacacatacgaagatttctttctcgatcatcattatcccttgtaggattcagtcatatcagtagctttcttttacattccatccgctaacttctggacctcgtcaattgctgttactgcttgtttcaacttagctgcagcttccttcactttcttttgctgcaacatttttcatttcagtaacttatcatcagattctttctttttagttgaaatgaatccattttaattaactaatcaaatgaccattcaattccatcttctaggctatacgacataatctaacaattctgttgacttgctagtatcctttgtgctccacacaacataatgtctaaatcaaattgatgcagggatacagtaatgtttacgaaaaaccattatagaagctaagtggggatagttcacttactaagagtgcggttcttttcttgagatctccgacgtttgcagctaccggtgccactgaagtgctcttttgttcatgcatagaaaacccgactttgacataagtatacacacagttgtataagcatggttatgtcttacatgaactcttgtagatattgactcaaatgaaatgataatgactaaccaaatagatttcaagaaatacaccaaatccagatactatacacatcttttcaaaatattacgaatcatttcaaattctgcagaacctaaaattaaccagatttgagaccaccagagacaaataacatacaactctaaactttttccactatatatgcagaacaaacagtcaagaacaaccgtataattggtatataccttttgttaaaattatacattaagcattgttatgtctaacatgaactaaacacttgtgaaatttatttggactcaaattacatgataacttcttaccaaatagaccaatcactttcacttccacattatacaaaaaaagatttaatgaaatacaccaaaatccagataagatgcacatcttttcaaagaaattacgaataatatcagatacttcacactcacaatagaccacatttgagacaaataaagacattactctgaactttatctactatatgcagaagaaacagtcaagaagaacaatattaaataagacattttcccaaaatacaccaaaatccagataagatacacatttttctaaaaatacggggaatttcagatactgcaatcctaaaagtagaccacatttgagaccagagtcaaataagacattaccctgaattatttccacactatacagaacaaacagtcaagaacaatcatataattggtatcagaccatttctaaatttcttttgacattttgtgaataaagataatgaaattaaagagaaacataccttcctagtcctgcgcacaggctgtgcagctacttcgacagtaggtttccttccacgtctcttagctggagccaccacagtttctgctggaacagttgcagccgccacgtcatctttctttggcctccctcgttttctagaaccctctccagtagcagtagtaaccacagccgccgttacagtcgacctctttgccctaccacgtttcttcacagccgccgccacagacgtagaaggaacagcctgagctacgtttcttttcggacgaccacttggtttagtactcgccttcgcagaaacggcaccgatttgggaagagtcagatttagcctttggcggtcgaccacgaccgcgtttctgagaagcagtatcagtagctgagacgccggtggcatccgtttgaggtttgttgccagacgcatctccaggtgtaccggatcttggaacttcggaaccagacgcgggaggagtaagagctgttttcgccatgagatctgtagatgcgaatcagaaaaaaaaaaaaaaaagagaaagcaaaatgtgagaaaacggcggttaatcggaatcaaaaccctagcaaaaacggacatcaacggagactagacttaaactaaacaaccagaaactcgatttcgctaaaaccttaacgaaatttcaaatgtcacaaacctagaatctagaaacgaagactgtaaaacacagattcaggctctcacgcgtagagatttcgttttgagaaaaactagggttcgcaaatcgcaatgtacgtaccttgttcaacttaatagaaggattcgcgagatggtaaaggaagcttgaagaatctggaggaagaagaaagaaattacaaagagaaacttggcggagaagaaagataagagagatagagatggttttcgcggttagaagaagaaggtcaccaccatgggctagagcttggaaagagtagaaacgaacgaccgagaggttcagaatcagttgcgtcaaccgatatgggtccacctttactccttgtttttatttttatttatcaacatttcatttttctttttaattcacagatttttaaaataaatcacgaatattaattttttggtattatagtataacatgcaaatgtggtggtgatttctttttaactttttcaaaaaaaaaagttgatttataaaaccaaaatcgaaaaatacactactttatttcaaattcaaaatttttttggagaaaagtattgaaaacttgttaaaaaagtgtttatcgagtaataaatttagaaatttggttaaatggtgtgtgagtgaagagtaaaaccgttctataccttctacctaatttctgcaataagtacacttaaaattaaaaccggatttcaaattaaaacagagcaactgacataagcaacttttatttaatggttttctaactacataacgtaagagacttgaagaaaccatcataaaaagtagaagtggtcataaaaattacataagcgtttttgataaacatcaacaacaactcctaaaaagcctaaggagacaaaatagaataagagacacaacagtctaaaaaaaacacgagggaacaaagaacaaagctgcctacacagatatggacgatggagagagatgggaagcatgaacaatggtaacatcctaattcactttacagacattaccctacctctccttgttgtttggttagagacacaatcatcatcatcagttcatcacattgttctttttgtttttctcctgcaaacacccttataagattaaaaatttcatgtaacacacaacaagtaaacccaccacttgctagctttttatgtcaaggctttatctttagaacagagcttcttgcattgcctctgcttctgtctgtccttgaccctctgcttctggttcggtttcaaggtgttcctcgtctggcagctgcacttcttccatgtgctttggctcgtttgttgtctctgctatcccttccaggtcctgtatggcttgaaccactgcttgatttccacttcctcctatctcggatttcaacacaattacaatatccttagctctcgcttgctgcataaatgagatatcaaaaccaagcataagcaattaagtatcaaaaccaaggacggaccatattgtgtttctgttcattagattacttacaaacaactcaaacttcttcttcagttctccatagtcaccatcttgtcgtccagaagctcccactgacaccgcattctatgtttataaatggcaataatataaatgtaattagataactaactcatcaatataatagacaaagaaattctagtggacttggaaatacacaaactcttgaactttgactgaattaactaaatttctgcttaaaacagacaaaacttgataagatgtctgtctcaaaagataagttcatatgtaattctcacacttcaactgaacaattattggttgctaaagcgagccacctaccaagttgctcttgattaccaaacaaagagatatcttagattaatagtacaccacaaaaccagattaagtataggccaaaagcagagacacgaatataaattaaactctagaatttatttagttagatactctctagtctccacacacacgctcgaaagagacaatgttgagaatggaaagtgacatttattcacaagacaaaagttccaacttttattctcttatctatttgactagaaatattcaagttctctataatcactgtgtaatcgcagagacaaaaaggaatgatattttacctttctgggtcttcctacgggttttccagtacgagcaaagcttctcatcggcttcataggcttcctgataacacctccaatcttaggaggccgtcctcttcctcgtttcttgactgcaacctcctctcctccactctctacgttagttggtggtggtggtggtggagcaacagaggaagcaccaccagcgtcaactctctttggtctccctcggcgtctaacaccaccattagcaacatacgggaacactgaagctggagctgagactactataggctttctctccctcccagcagctcttccactcggaggtctacctcttcgtttcacagtctccacaccaccggaaacagaagcagctggcttcaccgtcggcgaagttccatcttttctaggacgacccggcggtctcttaaccggctgctgtggctgtaacggtaactgtggcggctgtatctgtatctcctctggtcgagagacaggtaattcactctgttcccaggtgagttttccattagtcagaggttgaggttgaacaacatctggtttagcttttggaggtcgaccacgaccacgtttaatagtctgaggagtagaagaagccaaaaccggatcaggtaaaggttggttctcgttgactatgaaatcagatctgggaggttcaagactaggagctacactagtaggaggaggaggaggaggagtagaagcaagcttgtaagatttcttaaccatgacaagaatcccactggtcttcaaagtcttgagatggtgtgtcaacaaagctccatgagcagtaggaatcccagtgtaaattctctctatgtacctcgaaatagcttgcttgcttgacccatctggttcgtttaacgctgcaatcgccgtgcaaatcatctaatcaacgaaaaaaaaaagtgagtggaaattaaaaaccctaactttaaagtcaaaatgtaagaatgagctaagaagagcttacgtcagagtaaggagggtgggaaatagatggatgaggaggaactggagatgtttgtggctgctgcggaggagctgcttgatagagatggatgttgtttggcggcgcgacggcggtgggtccggtgaagaaggggtggtttggagaggcgaaggggttggtgttggtgaaaggagggaaagatgtgaactgaggaggaggaggatgatgaggatcattggttgcagagagagaaggatccatggaggatttagtgagagagaaaaaatacagagcaaggaaggtgatgagatttttgatttttagttttttttttttgtttcggttgttttaatttttcagataaaattaaaaaagttttgtggaaggagaagataaaaaataaaaaatagttaggttggaggagagagagtgtgtgtagtagtgtaagagagagatcgaaaatgacgacagatgagatagttaaaatctgaccgttgaaagtgtattttggtgctgatttacgacacggatcgatgacgtggcgttttttgcttttgttattaaaattgagttttgtgtttctttcaattttttttatatgtttttctgcttctctattcaagtaccatattaaactatatgtaaacattttttttctaattctgaaagtttttaaacatgctttcatttctttatactaataaatttctagaacaagattttttatactaaattctctacttaatatcggtttacaaaaaaaaatgtatatttctaaccaatcagtttttcatattctttatgttttaacatttacttggattatatgatgtgcactaacaccttcttcattttcttgatcactatctcactctaattcaaaaaaaagaaaaagaaaatctccaacagttaaaaagtgctattataaacacgttaatactgttttaggtaaaataaaactcaaattttaattcactttttgttttaaatttttaatagctaattttattgactttttgaaataagacacttcgttaagttgcttaacgaaataaatttacaacgctaaattttcatcgagattctttgttaaactacgcaaaatgacactaatatgatttaaaaaaattaagctcagaaaatatatttgaactccttattcatttttcaatccatatatacataaccaataaaggtaagttgaattttttcacaccacaaacattcaaatttatattctttaatataaactttctaaaataaaaagtttagatttaaatcaccatagtctaattgggttactctctcgtcatggctgatttaaattctcttgtatagccttttcattttgtgtttctttcaactttttgttttgttattctaattctctattcatgtaccataataaattatatataaacaattttcttatctaattttgaaagttttcaaaaaagttttcattttttatatttaaaatttttctagaataagatttataatttcattatctacatttataacaaatcattttttcatattcttaatgttttaacatttatttggattatgatgaacattaacaccatctcatactatgtcctcgtaaatggcacttcctatgaaaattggaagctttcatggagaattcgacaaaagcgatgatttgtcttcatatatttttattctatgtgcagagattttaagtcaactgatcatcaaagttgaaacaaatggtggcatcgagagcatacgcatcgctcagtctgttcctacggttaatcatttcttattcgccgatgattatttgtgtttttgcaaagttgcaaaacaaaaactactggttacagtatatatatatatatatatatatatatatgtgtgtgccaattattataagtgttcaactcaaaaggttaactatgagacattcttaataatatttgaataaaacgcatattcatagaatcctagagataacaaaaattggaggaggaaacaaatatttgagtttactagagcaatttggaagaaaacaaacgaattatttgagtttgtgcagaataagcatgacatctaaagggccaagtctctattcttcacttgagattacgctaattggagatgttcagggattctatggactgctctattcagcctaacgaatgatcttaagtccaaatctcaataactccaaatcattctgttacatatatccgacttctaccttttgggatggtttggcgcatctggaaattgaaaaacgatataataatgtttaaccataaatattatcaatctcataggtctacaatgtaacaatgatgtccacaaatggataaatgcccaagctgactaaagtcaacaaatgcaaccaggtccaccacaacacaaaaatttgggccgaatgtatcattgatagcaagttgagaaacctctaaacaatgaatataagcaagacactacttggtgaacaagtatattaccttttaataagtaactaaacaatattagccttaaattcctcaaactcaataaccatcattatatgtatcagaactcctataagtattcccaatccgggtcatcttcaaatggaactctttggccgttatctttccatcaccgtcaatatcacaaagagcaacgatctcttcactacataaaatagtctaaacccgatgatttttatctttggacattcatcagaaaaaattcattatcactagaacatatgtatatataactatcaaatataaattcttaccaaaaaataactttagtttttaaaatattttgaagaaaaaaagaaatatatattattattttaatgaatttgttatccaaaattagtttggatcaattttaagggcacctccatcaaaagtatctagaagagatacttattattaaaataatacaaagtggtgaaaaagaagagagagaattgagaatcgtctctgttttcagaaactttgagagacgtttctggccaactcgtttttcaggaatggttgattttattttttaattaaaattaatttaactgaattcaattaaaataaacaatattttattcatgagaaacttttttttatttagaatctaccgatgtagatgcctaacacatgttaagcttataatttaactttattaaatatcaaatcttgataaaataaaaaattacaagaatctatagaaaaacaaaaaaagataaagtttgtgaattttatctagaaaagttgaaaaatcttaataaatatataaaaaaaatatttttataaagtatatcttataatttgggtatgtaactatttatattgattgtctttacattaaataatctaaaatgttgatagattttaaggaacaattttttttgttggctgcacgagaataagctgaagccaacgattggtctaccttcagttaatgattaaggtttctgtgtcttactatatatatcccttaacaggatgaaatgagaagaaacaaaaaaaaaaaaaagcaagaaaagaaacaatggcgacgatgatctctaatcttccaagggatttgatggaagagattttgtctagggttcccttgaaatctatgcgagcagtgcgattaacttgcaaaaattggcacactttatccataaccataagtgagagtttagcgaagatgtacattagtaaaacaacaagagaatcaagagaaggggagtctacgataatcacgttgatgaattacaaactttgtttaacgagtctcgtcgtcgacgttgacccatatatagagcacaaaggtaaactaacttgctttaatcttgagcatcaagtcaagatatctcaagtcttttactatgagggtttaatttttatgcgtattgaaagacgatacaattactactaggcttgtggtttggaatccgtattgggggcaaacaaggcagatcaaaacccgatattctcaccacgcattctccggaagggatagtacgtacatgttcaattactctctcggatacgagaataagaattcatgtcgcagccacaaattattgaggtttatagattatcattggaattatcgcggcctacaccaatttttttggtatgaaatctacgattttgactcggatttatggacaactcttgatgtcactccacactggtttatagttatttctcaaagtggtgtttccctcaagggaaacacatactggtgtgctaggaagaggagcggcggttatagcgatcacattatttgttttgattttactagagagagatttggaccgcttttgcctttgccgtttagctttattgatcgtcatcattcatgtgtgattttatcttgtgttagtgaagagaagctt

SEQ ID NO: 1193 - DNA, 11606 bp, Arabidopsis thaliana
tacatctttttgtatgttcaaaatttgcaaagatttgatgaaaactaaaaataatatatatcttcttacttctgtgaacaaaacttaacaaataaatgcaaaagcaaacaagttaaaagataatgtgttgaaaacaatcaaaattgtgtaccatccgagttgggccatgaagaaagggagaccaaggacgccagctccaaccatggcagtcacgttgtgaaacgtggagtaccaccatttcgcgtttctcgatgaagttatcggaagccaatcatcgatctctttctgtctctcaagctcgtcaatctatgtgtaatcaaaaatggaaaaccaagactagtcttcgtaagtaaagccgatgagattaatacaaatgggtaatgaatgaaagggtgatctgaccaacccggtggtctaacgaactttgctctggtggcggaggaactccatctgtcatctgaatatacattttatccgacaacctgcgataactcttacacttttgttctccggtaatctcattaattacggatgtgtataaaatcttgcgcttgtagcagctatagattggaaaagtcaacctttgttccgttgacttgtgtgcaaggcacgaacgcagtggagggatcgtggacactttaaatgcaagttgctttacttattttctaatcaaagttccaagtgtcctattaaacaaatgctcttcttttctaatcaaaacaaataaatgaaatcaactttggttctacaagctcaaaacacgaaaattcctgcatttctttcaagctaaaagacccccctacaaagaaagcaaatagcaaaacactttggggaatttctaagagaacaaacaaaagttgctattgcggcatattagcgtataaaagagtaaaaaagagtttaacttcaggcagatctctgatgatttgtaagaaccggttcttgcttggttcagctgtaatcacattcattgtcttctcaatctgtggtaagacctttgccaatggtttccctgtagccaaaccgcctgcttcagtctgcgtttccatttcctctaccaacacatccgtgaagcacttgagcgaaatttcgactatatttgtgaattcagtgctgcaacaagaaagacaccaagagataagtttattccccacaatcatccaagagtgtaagaaagaggaaaaattgtgtgtttatcttagcagatagacattacttacctgatgagtacttctcgagtctcaaccatgagttgatgaaacttggacacagcttcatcagaagagtcacttgtggttcttgaaagctttgtgtcttgaggcatcattaaataatcaacccagtgatgtgggcttccagtgctcataaacacatctacaatctgcatcacggtttcttgaagaactcttgtggtaattacatcctttaactgctttctgcaattaaacacacaaaaacatattagagtttttccaacaatagtcaaattataaacgatctagatacgaatttttgcaatgtaccctttaaggacttcctcggctgaaccctgcatatctgaaatcaaacttggcattgcattggtgacaagaaaatcagcactcgacaaaaacttctgttcatcatctctatcaatgagatctacctcttcctgcaaacaaaaagaaacaaatttaatagatacactgttgaaagctcacagggcaagcagatcacaggacaagcggccgtggctttaaaaggtaatctggaactatatcaaagaaagataggtgattccagagtattagtccacagataggtcaaatgcataatcgttatcgcaattaaacacagctactagagacataattatacaagttcttaacagaacaaccagtgagtttccccgagaaatagcttgttggggatgagataagcaaagtacactgaatcatacttgcgagcaaatgagagcagtaaagaacatgtgcagtatcgtttaataaacagcaaattctccaatacagagaagaggggaagcatattatcttacaagtaaatgagagctgccaagagctcgagcggtgtcaacatacaaatgtctgcctaaaatgttgacttgaaccctaatgtataagctaagcattgtcacagaccacagagacaaaaccatcctcgtgaaacctggcaaataacatgaatatacaggtaagaaacagaatttgatagagtaagagtaggtgactgcagtgcatactcaaaatcttgagctcatcccagagctgaagtttctcaggtggactcagcattcctttcccttggttcagtctgtccataacatgagagacatcgatctcctcgctgatacggatactcaaaaactgcattgcgtgaggcagtgtggtcgaatccacaatcatctgaatactctcgaaatgtgctttcattctaaacaagagtacaaacaagacaggtccgttagagaatccataagaactgaagtctaaaggatcagtttttatgagcacagaacttaactgggttttgatgatttcgtcattttcacgctcgtgagcgagttctcgttccaaatcagcaagcctacgagtatgggaattgtatagtttgtagagtaaatacccacttcccaaacaaccagccgtcaccaagaccttccttctatgcttcctccaaaaacccctaatttattccacaaggtattgaatcaattaaaaaccctaactttattcaccaaaaacccttcctaaggaattggaattagtgtgctagagagagagagatagagaacgcaaaacactaaatttcgaattttcacgaaaacagtaagcaattacaaagaaagatgaagcgaacaagaacctaacgaaatccatggctggtgaagcttttactgaagtcgaacccagagatacatagctgagaaaacacgtagaaagatgaagattcccgaattgattcgttcggtttgaaaaggagataactttgcaggcgagagaaagagatggttgatgtgatcgatttcaatttaatcaatcacttcatctttttcttctccggaattcggacatgtaaaattatatcttccacagggacagtcgaagttgtgttcttagttcttacaataaaagttgaaatggccaaactcggtttgtttactttaattgaaccgacttttgagtctatttcaatttttgacaataacttctcggtagagttctcatggggtttgcccaaaagagagaaaaaaaagttgtcatgtcatgtactcatgtggttatcaaattgacttgtaacaagctataccaattctggttaagcgttccaaacagaaagatataaatctcggttccataattgtcccaacatgaaaccaagttgggtagaataccgggccttaatgctggcccaaatgaagagacccaaactattgacaaatgaaaacaaagaaccctaattatctctaactataaatactctcggtttctcgttacctccattttgccctctcccatttttgtcgccgaaaccctaaatctcgacctcaaaccctgaaccatggctgaaggactcgtgttgaaaggcacaatgtgtgcccacactgatatggtcaccgccattgctacaccggtcgataactccgacgtgattgtaacttcgtcgcgtgacaaatcaatcatcctctggaaactcacaaaggaagacaagtcatacggtgttgctcagcggaggatgactggtcactctcacttcgttcaagacgttgttctctcctccgatggacaattcgctctctccggatcttgggacggtgagcttcgtctctgggatctcgctaccggagaatctactcgtcgtttcgttggtcacacgaaagatgttctctctgttgctttctctaccgataaccgtcagatcgtctctgcttctcgtgatcgtacgattaagctttggaacacgcttggtgagtgtaagtataccatctctgaagctgatggtcacaaggaatgggttagttgtgttaggtttagtcctaatactcttgtgccaactattgtatctgcttcttgggataaaactgtgaaggtctggaatcttcagaattgtaagcttaggaacactcttgctggtcactctggttacttgaacactgtggctgtgtcacctgatggttcgttgtgtgccagtggtggcaaagatggtgtgatcttgctttgggatttggctgaagggaagaagttgtattctcttgaagctggctctattattcattcactttgcttcagtcccaataggtactggttgtgtgcagcaacagagaatagcattaggatttgggatctcgagagtaagtctgttgttgaggatttgaaggttgatcttaaggctgaggctgaaaagactgatggttctactggaatcggaaacaagaccaaggtatctatttctcctcactctatcttatggttaattgtctagttctaagttctgtgaattagttagccgttgccttaaaagatgagattttcataaaggaaggtctgaatactctcatgtgaagttagttcacaagatttgattggtacgtaagagagtagctaacattagattgagaaacctggttttaagttagctctagtctctgatttcttagattgtagtgtctgaagtgattccatattgatttgttggttactctttggtctgaggtggtttatatatgttctaatgtggaatgtaaaatgcaggtgatctactgcacaagcttgaactggagtgcagatggaaacactttgttcagtggatacactgatggagttatcagggtttggggtattggtcgttactagagagacaagaagtttctttattctctccaaatttttccatcgactctaaagtcttctcttctgaattagtgttttgaggatttattttttgttcttttctattttcagaatccacaaatgtgatattttgatacattgattttgtttcatatttgttttcttacactgagtctgagtacacggcgtagaatctgatttgaagttgttacttgtatcctctagaaagtagaaatggctttaggttgatgactaactgtataacagcaagaattttttcttaggaatctgaaaacttcaaggagttattagcctttacttttccagtggttacatcttaactacaacacgaaccctttcaaaagaatctctaaacaccaatgcaccaaccagtttatctttttgtacttaatgatatttggttttccatctcttactctaccaaaactaagagtagtctaaagtgtaggcgacaaggccatatgttatacgaattctcagttaacatgaaccgaatatagcccatatagaatagttcttgacccagacgcttacctccatacggcacagagtctctgataaatgggtcttattagcattaattttgtgtgtagccaaaggttgaaacttgagaacttcttcatgctcaaaaacaccaaatgaggtaaaccatgcacgagtcaatagtcaataatcaaaagtgcaatcaagattgttttcactgcttttccgaagaaaccaagaccccctatgacatgtttcagcatcataagccgctcaacaaagcaatgcttaattgctctgtaaaatttttcatatttcttatcttttagatattctacacccaatacccaagtccacgtatataacaagatcttaattaggctccgtaggcttcgacaacatgtccattttatatcatgcttttttttgtagtccaaataagctaaggttgatcaagaatggaacatcaaactactaaaactatagatcgtttagctctgcatgatttagagaaaccgcagcaaaactatttctatcgtcattagatgatataatacaaccttttgcactaatttaggctttgcaaatttgagaaaaagaaatatagactttattatattctgttttgttaacaaattaggctaatctacctcatattggttactcggatactttcttctcaaatgcgacaagtctcaacatgtttcgatcaaatagacgtgtttctatactgctttgatgtttttttatgttccctggtgcagtttccttgatttggaccgaacttggaacataagagaaaacatgtcgcctacgatatggttctgcatgttctccaagatccaattctctaaagtaccccgcctcgccaatgatgttgattgttttgcgattgtcattaaacccgatggcgactttcttttcctcgttaatgaagaaactcgtgtgtataattggccccgtatttattctcaagaacttgctccacgacaccatttcggcctcaagcttagctgtaatccatatttcaactacatttttatagtagtggtccttgtactgaaataaaactgcaagcttctcttcactaacacaagataaaatcacacatgaatgatgacgatcaataaagctaaacggcaaaggcaaaagcggtccaaatctctctctagtaaaatcaaaacaaataatgtgatcgctataaccgccgctcctcttcctagcacaccagtatgtgtttcccttgagggaaacaccactttgagaaataactataaaccagtgtggagtgacatcaagagttgtccataaatccgagtcaaaatcgtagatttcataccaaaaaaattggtgtaggccgcgataattccaatgataatctataaacctcaataatttgtggctgcgacatgaattcttattctcgtatccgagagagtaattgaacatgtacgtactatcccttccggagaatgcgtggtgagaatatcgggttttgatctgccttgtttgcccccaatacggattccaaaccacaagcctagtagtaattgtatcgtctttcaatacgcataaaaattaaaccctcatagtaaaagacttgagatatcttgacttgatgctcaagattaaagcaagttagtttacctttgtgctctatatatgggtcaacgtcgacgacgagactcgttaaacaaagtttgtaattcatcaacgtgattatcgtagactccccttctcttgattctcttgttgttttactaatgtacatcttcgctaaactctcacttatggttatggataaagtgtgccaatttttgcaagttaatcgcactgctcgcatagatttcaagggaaccctagacaaaatctcttccatcaaatcccttggaagattagagatcatcgtcgccattgtttcttttcttgcttttttttttttttgtttcttctcatttcatcctgttaagggatatatatagtaagacacagaaaccttaatcattaactgaaggtagaccaatcgttggcttcagcttattctcgtgcagccaacaaaaaaaattgttccttaaaatctatcaacattttagattatttaatgtaaagacaatcaatataaatagttacatacccaaattataagatatactttataaaaatattttttttatatatttattaagatttttcaacttttctagataaaattcacaaactttatctttttttgtttttctatagattcttgtaattttttattttatcaagatttgatatttaataaagttaaattataagcttaacatgtgttaggcatctacatcggtagattctaaataaaaaaaagtttctcatgaataaaatattgtttattttaattgaattcagttaaattaattttaattaaaaaataaaatcaaccattcctgaaaaacgagttggccagaaacgtctctcaaagtttctgaaaacagagacgattctcaattctctctcttctttttcaccactttgtattattttaataataagtatctcttctagatacttttgatggaggtgcccttaaaattgatccaaactaattttggataacaaattcattaaaataataatatatatttctttttttcttcaaaatattttaaaaactaaagttattttttggtaagaatttatatttgatagttatatatacatatgttctagtgataatgaattttttctgatgaatgtccaaagataaaaatcatcgggtttagactattttatgtagtgaagagatcgttgctctttgtgatattgacggtgatggaaagataacggccaaagagttccatttgaagatgacccggattgggaatacttataggagttctgatacatataatgatggttattgagtttgaggaatttaaggctaatattgtttagttacttattaaaaggtaatatacttgttcaccaagtagtgtcttgcttatattcattgtttagaggtttctcaacttgctatcaatgatacattcggcccaaatttttgtgttgtggtggacctggttgcatttgttgactttagtcagcttgggcatttatccatttgtggacatcattgttacattgtagacctatgagattgataatatttatggttaaacattattatatcgtttttcaatttccagatgcgccaaaccatcccaaaaggtagaagtcggatatatgtaacagaatgatttggagttattgagatttggacttaagatcattcgttaggctgaatagagcagtccatagaatccctgaacatctccaattagcgtaatctcaagtgaagaatagagacttggccctttagatgtcatgcttattctgcacaaactcaaataattcgtttgttttcttccaaattgctctagtaaactcaaatatttgtttcctcctccaatttttgttatctctaggattctatgaatatgcgttttattcaaatattattaagaatgtctcatagttaaccttttgagttgaacacttataataattggcacacacatatatatatatatatatatatatatactgtaaccagtagtttttgttttgcaactttgcaaaaacacaaataatcatcggcgaataagaaatgattaaccgtaggaacagactgagcgatgcgtatgctctcgatgccaccatttgtttcaactttgatgatcagttgacttaaaatctctgcacatagaataaaaatatatgaagacaaatcatcgcttttgtcgaattctccatgaaagcttccaattttcataggaagtgccatttacgaggacatagtatgagatggtgttaatgttcatcataatccaaataaatgttaaaacattaagaatatgaaaaaatgatttgttataaatgtagataatgaaattataaatcttattctagaaaaattttaaatataaaaaatgaaaacttttttgaaaactttcaaaattagataagaaaattgtttatatataatttattatggtacatgaatagagaattagaataacaaaacaaaaagttgaaagaaacacaaaatgaaaaggctatacaagagaatttaaatcagccatgacgagagagtaacccaattagactatggtgatttaaatctaaactttttattttagaaagtttatattaaagaatataaatttgaatgtttgtggtgtgaaaaaattcaacttacctttattggttatgtatatatggattgaaaaatgaataaggagttcaaatatattttctgagcttaatttttttaaatcatattagtgtcattttgcgtagtttaacaaagaatctcgatgaaaatttagcgttgtaaatttatttcgttaagcaacttaacgaagtgtcttatttcaaaaagtcaataaaattagctattaaaaatttaaaacaaaaagtgaattaaaatttgagttttattttacctaaaacagtattaacgtgtttataatagcactttttaactgttggagattttctttttcttttttttgaattagagtgagatagtgatcaagaaaatgaagaaggtgttagtgcacatcatataatccaagtaaatgttaaaacataaagaatatgaaaaactgattggttagaaatatacatttttttttgtaaaccgatattaagtagagaatttagtataaaaaatcttgttctagaaatttattagtataaagaaatgaaagcatgtttaaaaactttcagaattagaaaaaaaatgtttacatatagtttaatatggtacttgaatagagaagcagaaaaacatataaaaaaaattgaaagaaacacaaaactcaattttaataacaaaagcaaaaaacgccacgtcatcgatccgtgtcgtaaatcagcaccaaaatacactttcaacggtcagattttaactatctcatctgtcgtcattttcgatctctctcttacactactacacacactctctctcctccaacctaactattttttattttttatcttctccttccacaaaacttttttaattttatctgaaaaattaaaacaaccgaaacaaaaaaaaaaaactaaaaatcaaaaatctcatcaccttccttgctctgtattttttctctctcactaaatcctccatggatccttctctctctgcaaccaatgatcctcatcatcctcctcctcctcagttcacatctttccctcctttcaccaacaccaaccccttcgcctctccaaaccaccccttcttcaccggacccaccgccgtcgcgccgccaaacaacatccatctctatcaagcagctcctccgcagcagccacaaacatctccagttcctcctcatccatctatttcccaccctccttactctgacgtaagctcttcttagctcattcttacattttgactttaaagttagggtttttaatttccactcacttttttttttcgttgattagatgatttgcacggcgattgcagcgttaaacgaaccagatgggtcaagcaagcaagctatttcgaggtacatagagagaatttacactgggattcctactgctcatggagctttgttgacacaccatctcaagactttgaagaccagtgggattcttgtcatggttaagaaatcttacaagcttgcttctactcctcctcctcctcctcctactagtgtagctcctagtcttgaacctcccagatctgatttcatagtcaacgagaaccaacctttacctgatccggttttggcttcttctactcctcagactattaaacgtggtcgtggtcgacctccaaaagctaaaccagatgttgttcaacctcaacctctgactaatggaaaactcacctgggaacagagtgaattacctgtctctcgaccagaggagatacagatacagccgccacagttaccgttacagccacagcagccggttaagagaccgccgggtcgtcctagaaaagatggaacttcgccgacggtgaagccagctgcttctgtttccggtggtgtggagactgtgaaacgaagaggtagacctccgagtggaagagctgctgggagggagagaaagcctatagtagtctcagctccagcttcagtgttcccgtatgttgctaatggtggtgttagacgccgagggagaccaaagagagttgacgctggtggtgcttcctctgttgctccaccaccaccaccaccaactaacgta

SEQ ID NO: 1194 - DNA, 54313 bp, Arabidopsis thaliana
gcattcactaaggaaagaaacagtacagaacgggcggaggaagtcgtgatggtcgatatgaggaggtatgcaatcaccttcatcataaatattgactacacaacaatcaggaacacaagttggaggcagaacatgccatttaaccaaccttcttatgatcaccttgaaaagatgaggcaatggatcaacagtttcatgtttaagaatccccgccaggtttccagttttgctctacaagtttactcattcagttgttgtggcactcactagaactcataaatcgagaagaagattgatcaagaactagttttacttactgtacggtagttgaaacaacagccgaattgaatagttgaacgtcctttgccttgagcagtaaaagcacgctctacatagagagatatacaaattaggatttcagatcaaaactatatagaagaaagaacaaggaatcttagctgctacttacttagttctcctttttgaaccttttcttgcaattcacacactttatcaactatccttctctgttccgctgcattaaaaacttcggtatgcaattcgagtccctctagtatgttaacaagctctccattaactttctccaagcaaacaaagtctctttttctcttcacgtttatcgcccgaatatgcgttctttgcttcctcgacagtttatgattctcaagactcgaaccaaaagcctctctacttgaatctttatgatcctcttcctcactgagctcatcctccaatgtcatatgagaaaaatctacagcaacttctgttaaagatcctaatattaatatcagcgtctttcgaattacttggcgaatgaccatcatagacaatgcacatatataatcatcaaatcattttgttactggttttattttgagtctataataaccaccattgaatatgaatcaatttacttaatcctttataccagcttgattagtgctactactagctactatgccatgattcgtcataagaaactcaaatcaaacgatggataatctaaatcccaatacaaaaagcagatagttgaatcccacaatattataactggtccttttagagttctatttttccatgaagaaaatagtgtgataagagaaattataaagaaaatctctctttacactacaaattccaagttaccattaaaaaaaatattctgctgaaccaacggttaaatccttaccttgttcttgagagcggattcgtttggagagaaggttgacttttgaagcgatctcgagttccgactgccggataaaagaatagttgtccattgcacaatatatcaaacctcatgtacgatacattaatccgtcttctaccgtttgttttggcgcttatgatcaacgaatgtaatcttgacttttgttaggtcgttgaagtcatcatatatttcgtgtcttacaagcaaattgaagttttctacatagactatagttttgtgtgaataaatttatcacttatcatttgaccgagtaattcatccaagactgagttttgcaggaatttataattgatagagagactctgtttcatcctgttttaactcaagtaattgcctttttctaaaaaaaatggttgtaaagttaacaaaaatccacgtctcagattaaaataacgttttataaaccacatgtaccttgcataatatgttgtctgcttgaatttgtctttgccagtagttgaacataatgaataacaaaaagttgaaacagtcgatgttagtatgttacatatactggaattagaattcaaaacagctgattattgcaaaatgagtagataaatataggtgcttcaaaattaatagaaaacaacgagttcgaaagtaaattcttggcatgatatgtaaatgattgtgaagtgatcctttttgtgattgtgctgatgtattgtagtgtgaattgtgtctttgaatttgcgtttagatgtgtgtttgtgtgtgtgttatttttttttttatgtatgaattacgtttgagcgtgcttagtttgtcttgtgttttgtacttttacgaccttctgttccctattttgtttttgaaaatattgttgtgacaagtgtattttgtgtatttgaattggcatttagatgtgtgtgtgtttgagtatgttgtgtttttcttgcgttttatgaaacctttttttttttttttcaaaatcgcttttaatagtactaaagaaaatttgttcagacattaatattcttattttttttataataaagtttacataaaacttaaatgatcgatttgcatttctttgggttaaatactttttgtcacgttataaaaatcttattttatctcataataatgattacttgaaaacaaggtttaggccatttagcaaatctccccaccgttttggtcaatcctttgaatctctcctaataaaaccctaaaagatcatcatcatcatcgtcgtcgtcgtcccgctcaatggatactcgtcgcggagctcttgcggttcctaaagtccgtcgagtaggtttcttcacatcaatcgagccgcctccagaatcatcattacaacgaccaaatcgaagccaatccggtccagtagatgcaaccacctcttcttctcctctctccgattcaccttccggtaacttaatttctccggtcttaattccaccgtcgcgtcaccattccgacaatttaacctctcgcgttgctgctgctgctgctgctcctgtgcccgtccctggacctgccgctttccgccgatacttaactcctgaacggactcttcttcacgttggtagttacaatcctccggattcgcttctcgggacatcatcaccctcgagtaacggagggctttctgaggattcggcttctctgtttgggttccaacggagtgattcgacgaaattatcagcaagcttacctaatggaggctttgatttgactctagctgttagagctcctcaggaatctgaaaccaaaattgcgaccacgtctgcttctcaagggaaaaagaagatcgccgaagtttctggtatgtatacgaatctatcaatctatttaagtgtctcttgaataagctctttgtatggttgagttttgtattatccaaaagagacctttgtggtgaattgtgatccccaagtaacatcggatgaggcagcctgtagtgccgtagggactgggtaggcccggatattaatatcttctttggaatactctgttacttgatctcatggagagttttagggagaccttatagcggtatttggagaatgtttaaagttgagtttggtttagaagtctggtgagcaatttctgccaatgttgatagttcgactcttgactttgaaacaaagaggcgtgttttgaagataaagcagtcagctgttgtggacctgtggtctgtgtgaaatgcatacgtttgcggaggtggtacaacatactcccaaatcaagcacgtcaaggaagctgcatctctataatgggtaggagcagttagccagttactgtttcagaggtgtttaaatgtgaaggatgaaattgactagagcttcccacccaacaacgtgtcatcattgacacttcaatctctctgagcattatgtttcttagtttcatagtacatcaaccttcgtattcttcatgttaactcatttctacaaaaggacaattcgcagacagaccgacaacaggacatcgttatcttcaaagcataactctgttctttgcttcgtcacaagctatacctttttctcaaagttagtttttaggcaagtcttcaacattgaacgaaatgcatcatcaagttttgcttccgtactggactgcctacaaaatcctcctaaactgttgttgccatcatcgtcgaggctgggaattggtcatctatctctgttttaaactggattgcctgccttggtcttctctaacaacgaaattgccttcactgcattgccggagattggttgttagactcctgaagtaccctccttgatcagaggctttgggcttctctggaggggttattaagctccctttcaaagtggactatcctttagaattagaatttaaatagctactttgtgtttagtatcaactttgaccttatgaattgctatgggtttgagtcattcaattattgccatgcacagatgtttccttctagttttgcatttcgttacttacaggaagaataaatcctgcaggaaagagtgagtctgcgaccacaaaaccccagaaggaaaaggaaccaaaagcattgaaagataaaaccactaaagcagaaagacgtgccatccaagaggcacaacgggcagcaaaagctgctgcaaaaggttcttgttttgttcattatttttgctttgttttccatattcattaaagtggaacgtaaaatcatctaagtgcttccctcttgctaatttttaggcgaaggaagcaggcgtgcagatgagtctggtagagctaatcctggcaaggctgccataaagccccaaccaaagaaagaaagacttcccgtcacgtcctctgtttctgaaaaaacagctgtagcagtagaaaaagagaagaggatggatgtccctcagacacaaatgcagtatgatgataaaagccgagtggataaagctaagaggcgagctgtggttgaacagaccgagagcaagaacaaagttgaattatttctccatcttcctcaatacgaacgcagcaatcagcttcccaatttaagctccaattttttcacactcgattccatacaccatgcagtctataaggtacacctacttgtttatatgtgactgtgaaatgttcgttacacttttgaactggaatccttaagggtttgaaaccctgtggtttatctctgtgccatagatcctcaagtgacgtatatacatgtttttgttaatcttaggtgggtttgcaacatttggctggagatatatctggggacaatgcacgatgtattgccatgctccaagcatttcaagaagctatagaagattacagtacacctcctatgaaagacctgaccatggacttgacagccaagataaacggttatgtttcattcttgatagaatgtcgtcccctctccatgagcatgggaaacgcaatcaggttcctgaagaaccaaatcagaaaactacctgtaaacctgtcagaatcagaggcaaaaagttccctctgttctgacattggccggttcatagacgagaagacaattattgcagataaggcaatcgtgcaacacgccgtaacaaaaatcagagacggagaagttcttcttacatatggattctcttgtgtggttgaaatgattctcctatacgcccatgagattgggaaaaagttccgcgtagtgattgtagactcacgccctaaccttgaagggcaaaagctactccgtagacttgtgactcgtggcctcgactgtacctacactcatataaatgccatttcctacatcatgcgtgaggctacacgtgtttttctcggtgcttcatcaatatactcgaatggaactctttacgcaagagttggcacatcctgcattgcaatggttgcaaacgcatttagtgttcctgtaattgtttgttgtgaagcttacaagttccatgaaagagtcctacttgattcaatctgctccaacgaacttggtaaatgtttcactcgctcttcttcttgtcgattattcatttacttgaatcagagtttttttgcctgtgtgaaaaatttacaggcgatcctgacgccgtagccaacataccatcatttagaaccaatgcaaagcattcaaagacaatggacaacaacaaaaaccttcagtttctgaatctaatgtaaagcgcttcataagtggttttgagaatcatcacaaagctttattcttatttctcttaagtttgttcttatttttgtgtgttccaggtatgattctactccttcagaatatatatctatgattgtttcggattatggaatggtacgtatctctcacacattttgttatgttatgagtttggtatgcagagcaatttccatttagtgtctgatacatttgtgatttgtgtatgtgtgaatagattcctccgacgagtataccagtgattgtacgtgaatacaggagagaaaacttgttgctataaaaaggtaatgtgtttagaatattagcatacaaaatacaacagatacagtttacggaggagagaaaagcaagtatttaacataaacaatcattctttatatattttctaatgatgaattttgcattttgacactcatggaaaaattgttttcatttataccttgatcgctcgaaccaaatttttggacgagggtttgaaaaactgttcattgtttaagaataatgtgattggaatgactttctttttagtatcgagtaaaatttgtttatttgaaggtaaagttttggtgggtttgtctcaaaagcaaatatcgtagactatgaaccgacaccgtattggtctttggatctcctccggggccttgttctccatagtatggcatgaggactcggacataatctgtatggcactttagttggtgtcggaatctcaggaaccctgtttcaatcaaagtttcattttttttaatcagcactatgaaatgtttctatccaaaatatcaaactaaaaaaaaaaaactatttcaccaaatcacgtagttttaattaaaaatagacttgataacaaaagaggttaggaatcttactgtaatccagaaatttcaatttgtgaaaagtcaaaattagttaaacaatctgaagtcgctgtcgccgtcgccttagaggtcttgtgtcccttaaccttcaccggaggcgaaagttccggtgaaggctgctttatagccatcactttgcaattgaaatttctcgctacatcgatcccacttattgcccatctacacatcacaaagacacacaaagtcacaaacattactcattcgtctatgtagggttcaaaatctttaataatgaccccgtatcgatcaaaatagttcctacctgtaaagaaagctgttctgatggagaccaacgagaagcatcgaagcaccaatctctttgacaacttgagcaatcattcttccatcatcatctccttctctcacaatgatctcagtattcgtctgtcaaaattacgatcacaaaggaaaaacaaacctaaccatcaataaaatctagtaatctttccgatcaagattcatttccactcacgttgaagaaagagtcgcagatttcacggaaagagagagcaagattgtatccgtgacggcggaggagacgcgccgccgtggatttcttcttacgcggtggaggagagtacacgtggaggagtactatgacgtcaccttgacggaggaggttgtgaagtgcccattgtaacgccgtcctcgccgcttgtttatcttctacgaccaccacaatcctccgtacatcttccatttatttattctctctttctctttctttttctcgagaattgggtttaggtttagtgtcgtaattcttgtgactcactctctctctctctctcaatatgtgttgtatttgtaaataatagtataaaatggaatttctttgtagttggaaataaattaaaagtgggtcaaatgtgaagttgagtatgaaatcatggaccgtgtttttttgttattaggataaagtggtgaatatgtatgtattgcattgcatcttacactgttaggcaataacttgattttagtcttttaccatttatatttgaacatgggtttcttactatcaccttaggaatcattgttctgattaataatttgctttatgaaatagtacttgaaaaggtcattatgacggttttttaagaaaaatattgtcattgcaattgcaagtttttttagttcatgttagtattacactattaataatggaaaccataatcagtagatagagatacattaaatgcaatttgaaaaaccgaacatgaatattattggtcgtgttggtgctaaacccgcgtctattaaagtatgattcattacaatcacatctagtcatctagaaaacaatcaaaatcgttaataaattgacactttttattattagataggtgtaattggtacggtagatgaagaaaaaatcttaataacaattaagcactgtgtgagaacagtttctacttgcgcgagcaattaccatgtttggtaggacacaaattttcaacacgaattagaatgtgtcaatttaggaaaagaaaaaaaaacgaatgtaagatgtaaactattattaacaaagatttcatggagatataaagaatttaaacaaaatcaaggggtcaaaacctaaacatacagaagttttaaaagtctaataatatgacaacgcgctaagatccgaacacgtgtcaagtgaaagacttggtaaactcgaaaaggtaacgcacgaaagagggcctacaaaagtccgagtcatcagctgacagaagcatatgacttccacatatatttgacacagaatgtagtaataaagtacgaatctcacttcttgtcgtaattttcgtgtttaaggttattttacgtgagattcacgctcttcatgaacttgataagctataaaaaaagttaccaaatcctaaatcatgaaaaattttaagaaccacgaatatgttaacacaatccataaacttgacttgagccatgaatcttgtgggatacgggctttgccctccatgcccaattcggcccaaacacaaatagaacaagtcaagaaagctcctaacaaggaagaacggccatcagaacaacggcccatcagaatgactgctcggcccatcacggcttggtccaacccgataaattcagaagggcaaaacagagaaatcgcaagagagactaagagaaccctagatcagctccttgcctataaataagaggagacactactaagaagagagatccagaacctatcaccactcagagaatttaagagagaattgctgtctagctctttatctcttactttctggttttccattctgtattttctggttttccgaccattaatatcggttttccgacctgtactttcggttttccgttctgtacttacggttttccgttctgttaattactgtctttccgttcgtcattaataaagaagttactccattctccccaaaccccttaatcattattgttacaacctcggtataaacaaatccggagatggtccacataattatttttatataaatactaaatagtaaagtattcatgcaattgcgattttttttttttaataaaaagtatttttaaggaaataaaatgaagatagtgggacatgacgagaggaattggttgtatctatgagatctacttgtgcttgtcttcttcatccgtattcaggaaaaatccgcacacttgagtttctagttggaagaataaaaactatacattatctttttgcaaatatacaagtaacaaatattcataaagatatataatgccaaaaaaaaacgaaagtgattgaataaacgtcaatcatcctacattatgagatggatggatttgttttaggcaatgtaatgtgttcctgccaccaaattttgtttacgagaccgatctgatcaccaagcaaagtcgagtattgttaatgtttcaaagactttgatatagttcggtacaaactcatgtgtaaacatatgattttaatctctagccatgtcaaataggtgaatgattttaagctctagcaatgtcaaatacgtcaacaacaacatagattacttttctgagggatcaacaaataacgcataacacatgattatcacagtttttcaagttccaaaatttcgatacagtgtagaccaagagggttcaagtttttttcagggacaaaatcgtctggtgtctcagcttgaagatcctccgttcagctttcgttttttcggggatggcgacttaaataggtttcgaacagatgttaacggatcatctacctgacaacatcacgtaaagaaccatcaaagacatcagaaattggacatttatgacataagaactcatataaatgtatgtggttcttgttcgttaggatttgatcatttatctcatgctcagagagtatccaaagatatcaaatcaaggaaacgtcatgcataattttaacagggacaagggcataagttgcactctcagccaaaaaaagtttaaatactattagtcatagatcctgctattactggctacaaaaggaagttactatgatcttcttgtcgagaatacatgacaatagtcgcagttgagttatatctacccatctgtaattagctttaattccattctaatactaaaagcgagtgtaaggatgcatgaaaaagagtgtagtgggatgtttaccttgaagagggaagaggatgatggtggagtctgacaagatcctttatgccgttgtaatgcagacagagtctgtcgccatccagggcctcttctacccgttgaccagatccaaggacagaaatgcctatgttgcttgattggatcaaattccatctgtttgtttgatgtcgctgatttttctttataatcacaaagaaagatatgttaagcatagttagtgcttgtaaaaatcagagaaatttgtatttgcatttatactcttagcaatttacctgcagttgaatccctaggtttgttgttttcaggaagatttgatcttactaccatcatttgtttgtctttgttttgtagtgcaatatcactctctacatcagttgagtttcttccaccatcagccttctctcctatatcattcatcacttgattgctattttgtgtaacatcaccgttgttctctgcagttctactctgttgatcctgaatagaactgacatccccgtgatcatgatctctagagtacgaagcaaatcttgacctcaggttcctcccgataataggcagcgatattgttgctttgaagttttgctttgttgctgggggtcctcctgctatggtaaacttcaagcttgaaggttgatgttgaagggtaccacccttgggatgtttctctatattgatttcggtatcaccagtgactctacacaattctagtggtctcggaacagttgagaaaacccatagaccaacacaggccccacagagcttgcagtccagtacaacagaactaggatcagagtttaatgtgtcaggaagtgttgggttctcattattccctgatatgccatttggaattggggttgattcagagatgcttagaagctcgcgggtagcagtttctggcagtaaatcaatagtctctgtacccctagccgtctcactcaatttatctttgcagtccacaatataaggaagtgcccgcggttcccagccacataaactgataagtttttgtgcctggaaataccaatgcatcagcattacaatcagatatgactcaatattataccaaaaacctctcagaaaagatgccatagtcactaaagtgatcactagttaactgtacgctagtattttatcatatggacaacatcgaatgaataaagacgaataatttggacggaccaaattaaagtctgtagatagaggaacaataaaagaaggatcatccaattctaccaaaatctacgttagttaggaataattcatatctctagttgcaggtcaaacctggtagaaaagttgagccgggctcgctccaacatgattggtaagggattcagtttgagaactttctgctgctgtgtcactacatgcaggtgcaataggtcgtttgagaaattcctccagatctgagctcctcatgtactcaatggctgatggtgaaataacaggaagggccaaaagttgaagtaaagcttctgaccgttcttcgtgtctatcgactaaatcctgcggtgccattaacggaaactcagaaagcgtttcttcacatgaattctctatccatggacaaagtaatttgtgtccactctctaactttaagctgaagactgatgccgctttttccactgtcagatatcaaagagaagatatccaattttagtgaggacacaccatataactgtttatcagagtatcagttacatagagatgattctacgaaaaataaaattttaaccataccttgttgcttagaccaagaagatggggctgaaaagtaaagatgagctccacaagattcacaagctatagaatctgcgtcatcattcacccaccctctcctcgcacaatttacagcactaataacctaccagcacacacacaaaaaatagaatgagctaagaattttatagctaggaacatacaacaacgagatagaaatgacttaaattctaacggaaggaaaattgtggtttaaaggtcacaagaagcaaacctgtggcttggcaaaccaagtcatggacttgaaagtagcaagcctcctcataagatctcctctatcccacggcctgcaaagaccagaaggcgatgttccagcaggaaccttcaaagctgaagacctatcaatggtagctaatacaatctttggctcaaccaatgctaacgcagatgaaggattttgacgcttcttgcctcttgattgttgctctacagaagaactacacaaaccaaaggatatatacataagctgacgcagaatcataacatgaacacaagctctgatgcaaatatcacaaaatcaactaacatctgaaatcaatccaaagagcaatgtatatgaacacaaatacaaaatcatctctgagattaagcaatttatccacacttcaatcagcgaaacaatggaactcagataatggagatgaatcgatgcacagtgtaaaacagtaaccagcaagaagagactgacctggtggaggaagaaggaagctgagatttcgatggggtaaagagtttatccatgatttggtggaatctcttctctgaatcttgtgccattgtttatcttccagaaaaatcgcagcttcctctagctcgtctttctgatttcgtcctcctataatcgtataaaccctaatctaatagattcgcttccaccttcttcgccgcggctcaggtgaaggagtggtgtttagatggcggtgacggaacaacacgaaaacgacgggatctgctgtcgtttagtcctcttcatatttattccgcaaatcggaagtctcgaatattttatctattttacgaatagatccctttattctcacttcatcccatgtatcacccaaacatttcaaatatgtaaaaagaatccaaaaacacaaaaaaaaatcatcaaattatttaacgctttatgatattagtcaaaattaatacgaaaaatactcacaaaaacagattttcctcaactagtcgtatttctttgaaaacaaaaattcaaatttcaaagtagcaaataataagtcaaaacaatatctattagatatccctcaagttgtggacaagcaaagccaaactagtaacaaacctagctgcactctcacactacttaaattcaaaccttaagcaccacaaagcagaaaaactaaacattttcttcgagaacaatccctcgatatcagaaattaaacaaaagaggattcaaatgggtggacaaaagattgttctgctttcgatcttcgtatgtttttacgtgttttcacttgtgtcatgtactgaatttgaagctggaggagaaaatggttggatcattccacaatctagtaaccaaagtgacatctttaaccaatgggcttccaagaaccggtttaaagttggcgacactatccgtaagtttttcttttgcttctattatgaatttatgatcatcgtaatgcatatattgagttttgttttgatttggtggaaaggtttcaagtacaagaaagactctgttttggtggtaacagaagacgaatacaagaaatgtcagacgaccaaaccggaactttactccaaccacgatgatacggttttcaaattggaccgtcccggtttgttttatttcattagtggtgtctcaggccactgtgaacaaggtcagaaaatgattattaaagtcatggaggtggaatctacgccgcaatctcctccaccttcctcgtctctacccgcttcagctcacaagaaaaaccacgccgtgaggaaaacgagtcggttcttaggtgccggtttagttacaatttcgattctggttattacggtttttagtcttgtgtagtatggaaaacaataccactcggttatggcggttcagccgtcgagttttattccggtttaggttttgttgcttagtttatttaaggtttttttattcatttgataggttgatttgattttggtttttggtcacttcagagctttaaaataattgaactcatgtcttattttataagtttagtatccattttaattctattaaattctaggtttattgaaatacaatgttttttacctttatctaattataaacaaacaactttcaattttctataacaaaacaaaatcaaatattttgacaaattttctaaatatacactttttagaaacatctaatattttttttagaaattcaataaccctactcaaagaatcaaatccaataatggaacacgaaattattttgttatataaatttttataacaaattatgaaatttataactcattcaaccgagattgggtcaaccctataaccttataaaatttccaattagcattttgctctagctataaaaacattgtcaaaacatgatcaagtgatgcatcaaaatacatagtttgtagtccggtctaatcgcccgaacctagtttacctatacatggactttctgttaaaataaaccgacaaaagaaaactataagttatggtcttatggacatatcagaacacaaatcaatcgagcgacaaatgaattttttttgcaagaagtggataccacgaatggattacttgtccgttcacaccttatcaaaaatcaaccaaatattattctttgtaccatttttaaaattttaaaacaagatacattcatctgtttctatcaaatgcattagtcaataacgcttccatccaacggcgaataagaggtatacacgtggtgaggcatagttgattcagcttttatacacaaaagtctcgaggaacaacgtgagaagctctaacaaaacgtgaaggccacaactattatcaaaggcacataaaacacacgaacacaaaaaaagacaaagacaatgattattcagacaagtttcgtacctatttgattctctacattcctctctctcacacaccaaactcacatacacaatctctctctctttctcaacatgtctatataaatacacccacgtctatactaactcacatcatagattcacaattttgaacaaagaaaatttctttggagagaaaacttagaacttagattgacatagagaaatgaggaagtttggtggatcattgttcggcgtaagcctattgctgtccgttcttctagcggcagcaaccgcggcagcggagtactataactacggaagtgctcttgataagaccttcttgttctttgaggctcaacgatcagggaagttgccagctgctcaacgtgtcaaatggcgtggcccttctggtctcaaggatggtcttgctcaaggagtaagtccatatacacacaatgcttgcagtatagttggttaatacaatggatctcttaatacattccaaaattgatacttcctgataaataccatcgtatgaattgcaaaactagtaccaaaattaccacttcttcaactagaacatgttggctagtgtggtttgtattggttctgttcttgtatcaccatctataggttcaaacagaaaacttgttgtttggaaaaaataacacttactggcatacaatatttttttaaaaccttaaatctacaaggtattgttgtcacttgtcatcagtacaaagatttaatttgtatgaaaccttgacgtactaattccaataaagaaaatatatgaagtaataaaatgatattgaggtttgtgtatgtatgaatgaataggtgagcctggagggaggatattatgatgctggagaccatgtgaaattcggtttaccaatggctttcgcagtgacgatgctatcgtgggcagcggttgataaccggaaagagctatccagttcgaaccagatgcaacagacattatggtcaatcagatggggtactgattacttcatcaaggctcatcctcaaccaaatgttctatggggtcaagttggagatggagaatcagaccattactgttgggaacgtcccgaggacatgaccacttcaagaacagcttataagcttgacccgtaccaccctggctcggacctagccggtgaaaccgctgctgctttagccgctgcttccttggctttcaagccatttaactcctcttactctgctcttctcttatctcatgccaaagaggttcgtttgttttttgttcaactcctcttactttggtttatgaatccggttcggtttagattctcaacatttttgaaactttgtttttgtatattttagctcttctcatttgctgacaagtacagaggactatacacaaattctatcccaaatgcaaaagctttctacatgtcatctggttactcggtatatatattctctcaacactttcattctctaatccttccattgaatcttgttccactactaaaatgtctctcttgtgtatttctttgaaggatgagcttctttgggctgcagcttggctacaccgcgccaccggggatcagtattacttgaagtatgctatggacaattccggttacatgggaggaactggctggggggtgaaagagttctcttgggataacaaatacgccggtgttcaaatccttctctccaaggtaaactatagttttgttaaagaatgttcttcacggtttcaaaaatactactaatcatggtacttgtttgatttgtgtgtgtatagatcttgttagaagggaaaggcggtatatatacttcgacattgaagcaatatcaaaccaaagctgactacttcgcttgtgcttgcctcaagaagaatggtggctacaacattcaaacaactcctggtggtttaatgtatgttagagagtggaacaatctgcaatatgcatccgcggctgcgtatcttctcgcggtttattcagattatctctctgcagcaaatgctaaactcaactgccctgatggtttggtgcaacctcaggggcttcttgactttgctagatctcaggtaatgatcaaatcctcccaagaaaccgaaaatttttctcgttcttttcaatccggtaaccgaggttttcctttgcaggctgattacattcttggaaagaaccgtcaaggaatgagttatgtagttggatatggaccgaaatatccaatccgtgttcatcatagaggctcttcaatcccttcaatatttgctcaacgttcttctgtgagttgtgtacaaggatttgactcttggtatagaaggtctcagggtgatcctaatgttatttatggagctcttgttggtggacctgacgagaatgataactattccgatgaccgctcaaattacgagcaatcagaaccaacattgtcaggaacagctccacttgttggcctattcgctaaactctatggaggaagtttaggtaactaaacaataaaccttgagctcaaagtctttagctttacccttatggaatcataaagtaatgtaatgaacattttgtaggatcttatggaggaggatcatataaaccttatgaaactacaaaaccagcaggtttgatcttttttacttgcagcttccaatgcaactttttctacagtgtctgattctcatttcctctaaaactgtcacagcttcatcttacaaagcaacaccaacaacatacagtccaaagcaatcaggtgcacaaatcgagtttcttcattccataactagcaactggatagccgggaacacaagatactataggcacaaagtgatcatcaaaaacaattctcaaaaaccaatatcagatctcaagcttaagattgaagatctctcaggacctatctggggtttaaacccaacgggacagaagtatacttaccagcttcctcaatggcaaaagactttgagagcaggacaagcttatgattttgtctatgtacaaggtggccctcaagctaaagtctcagttttgagttacaactagtgagaaaacaacactttcttcaatctttttgtttatgcttattatgagtgaaagatgtgaacatagccaaccaagttgagcctaaatatgagaaatgtaaatttgtgacccttggtagagaatgcttttttgtctacctattcatatggcccatacttaggtaaaataagtaatgatagacgaagataacaatgattgaacacccaaagcactcaaaattgagcttaacttaacattcagacaaaaatttaaggttctgacagaaacttaactagaacaaaaaagaaacgaaacaataaaaggatgcgaagtatcataagttaacaacataagaagagacttttcttctacagacgcttctactcgtcaccgaaggtagtcttcttacctgcaacatatattgcaaagccaacataaacccaagaattagtgacatgttaacttgttataaagaagctagaaaacatgaatcaagaacaatttatctaaccttggggagtaaaactaggtcttccacgaccacgatcacttcccctgccaccaccactaccaaaacgaccacgacctccatctcttcctctgccaccaccactaccaaaacgaccacgacctccatctcttcctctgccaccaccactaccgaaacgaccattgccccttccaaatccaccaccaccactgctatctcctctcggtctaggctcatcgactacaagatagaatcctcctcccatatcacttccatttagttccaacgccttctctttgccttctgaaaactcaaggtaagcaattctgaggagaaaaaaaacattaatttagttagcacttaactttcaatagagaaaattcacaaactaatgacaactaagagagagtaataatcactaaccctttggagttaccagtgtcacggtcaattggaacagatacatttttgatctctccacatgaactgaaatgttccctcaaagtgttcttgatatcatcctcagaaagtgaagcgtcaaatcccttaacgaaaattttcttttcatcaccaccatcaccaccacttctgaagttgctgcaataatttaaataagagaatattatcaacatatggaactattttacaagaaacaaaaactccaaatcatggaagactaacatacccgctttgtggagtgaatgcgggtctctcgcctctctcacctctctcctgagcaatatcaagacgaatctcacgaccgagcaatggcctaccatggaattcaagcgcctaaaagtataaagaatttaatcagcaactgtaaatcaaatgatgacaactgaaaaatattatcattcatatgtaagaactactcaccttctgtgcttcttcagaagatgcgaactcaacatggccaaatcccctgaaagaaccatcgtctctgttggtagagaatctaacatcaacaacttcaccagcttctttgaagaaattctcactgcacatttgagtataagatgtcaggtcatgataaactttcaccaagacaagagagggaatcaaaggtttgggtacttacacatctgctctttcaatgttaaaagagagattggcagcaaagagtgtctttgatcctccagcagcaggagtggatggtgtctttggctgaacgtgtacacaaacttaactacaacataacaaaacacaaatagaaagaggggaaaagatgctaccataaggaattcatacctgtttagcacttgatttctcagcatcaaccatttctacatcagagctctgtttatatatattacagtaaagtagagattctataagcaaacagaaagaaaccattgtagctattcaccatttgcgaaatagatatcaaagagtatgaaaacattgctcgcacctttttcttaggggtttcctcctcgtcttcactctcatcttcctcagactcgcttgactcatcactactcgattttttagaggccttagtgtcagcctttttctgggcaggtttctcatcttcactttcctgcaaatatcaacagacacatggattatgtcaacgactgcaatacagaaaacccaaagctgcttgaaaagaatcataagcaaatcaaatcaagtatgtttaagcacacctcatcagaatcttcatctgatgaatctgagctgcttgcagccttggcagcagcaggagctgccttcttggtagcaggtttctattttcattaaagaagtagttagagatccatatgaagacataaaattctattaagcaaataaaaaaagtttgagtactagtaaaacacacaacataagcaaaactgaagatatcaaaagtacctcatcctcggaatcctcatctgagtcatcatcagaggatgaagaatccttagcagctggcttggcaatcttagcagcaggtttcttcgcaggttcctagttattttccaatcaatagacattaaaattaattgttgtcccaaaaataattcaaaagtaaagagtgtgcgaaatacttatgagaagcttacgtcttcagaagatgaatcatcttcagacgaactctctttcttggcctttacagagccatttttagcagcagctgcgggcttcttggtgacagcaacttcctgaaattaaaggtaataggaaagagcaaaggtatgttagcacaactctaatgaaaaagggaataaactgcataaggataagatataaacctcgtctgaagaatcatcatcagatgatgatgagtcatccttagacttctttgcaacagttccgttagtagcagcaacggccttcttgggtgcaggttcatcatctgaagaagagtcatcagatgactcatcactgcttgaagcagccttcttggctgggactttcttagcctgatatattttaaagaatatgattagaaaaaacactcaaattaaatactcaaaccaacaaatgaataaagacggacaaagttgtaccttctcctcttcctcagattcagaatctgaatcatcagagctctcaaccttcttaggaaccttcttcacagctttttccttctggacagcagcaatcacgtctttcttctgcttcttaagactcactttggtgtcaatatcatcttcaggctctctcttgcctaacaatcaaattcaataaaacgttcaatcacaacactaaaggttccaaattcaatattaacaagtcaatatactaaagagaacagactattattgaattctatgaccacatattcccaaacaaatgaatacagagaccttacacgttcatgggttaaacaaattaaacaacttataccatcagccatagcagaacgagcaacatagaaataaaaatccaaactttcataaccaaacagagagcaaagcatctaaggcaataggaaaccaaagttcatacctttcttcaaaggcttagtggccttaatctctgcaacaacctgaaaatataaaaaaacacaaatcaaagctcgttaaaatcgtaagaccagaaagaaacagagagaatcaaaacagagtaagaagagcagagaagagagccataaaggggagaagaagattactttggtggcggatttagactttcccatggagaactgagaaagagacgactgctaggttttcgagaagagagttgagaaagaggcgaaaaaccctagacagctgcgtgaagatatttttcagcttagggttttagaacatgtatttataatcgttttgattcttgttaggggtataactgtctttgcagcatttacatccaacggttctgtcttcgcgcggattatttgatctgtaccgtccacgtggagaacgtctgattatggaaatagattttttgttttggtacttgtgtcaagtggcaacggtttgaaataggtcaaagcggagaagtagcgcctccctctctataatgggcagaaagttttagtgggctttttagttggttgggttttagtgaaacatattgttcgcttcttattaagtccaccttataacaatccatttaacaaaatagaaagaaagaaaaacatatgacctattttcttttctcaagtaaaccatttttctgactctcttcgatcgaaatcaatgagaaacttaacgaggctacaaaaaaattgatacgctatggctttataagtaactttaaactaatctgtaatagttattgacacgaaagtttctgtttcaagatacacaattgacaattttgtctagaaaactaaaacagagaaaatacatgaggaagctagtaattgagtttgtaacatgtttagcaaataatctatgaatgagttttgtaattttattttattttttaattatgaaagtcgattggaaggactatataattttagtcaaaaatcataagaaactattgaaactttacttatgcaacatatcaaatttttattgttttgtgtgaacttcctagtcctttagactacggattgtaccaaactcttcggtccaatatggtgttactctttgacttataatcattttctaagatcgatacatatatatgaacttttaggtcaaagagtgagtgagagagtagattcaaagaatactgttttgttcttatagaagctgcgtataattatggaacaaatgagcatttttgcagaaatattaataaatctgaaatccaaattaaatatatagtgtacctagaattttatcaacttatatatattccacgtttcaaacatatattcaaggattgacttggttatgatttttttttccttttttcaaaaaaatatatgaaaatataattaggtgaaggcggtgctactgcacatcataattaattcgagaatttatttataaattaaaattttatattattgcattctaaaaaattagaaaattctacatatttttaaccttaacatatttcaccttgaatagtattatatatgatacatgtggataaaattatatatttttttaaaaaaatctcaaatttacttgcatattacaaaatatgttaacaaatattttaacttgtgctagtaaaaagattttgtcattctacaaagcagcgagcagtgcctaatgcattattcatagaaccatctttaggaccttttacagtgattagattgtcaaacgtttaatggtaagaaactaagaatacatctagtaattatgaataaactaaacaatatttttataatatgtacttaccctcttgttaggtattctttagtttggaactttggattgactcatgattttgatggagaaaaaaaaatagtgttttaagaaataatatttttgatagaaaaaagtagtttggtaatatttttatgggtgaattaggtgtataaccaaaattcaaagtttaattaagaatatagcagcatatatataaattaagaaagtagcatataagggttgagaaaagacaattttggtgtggagtagtttgtgagagatgatttagtaacacctcatttagtttttacccatttgtatgtttttgttatatatcttttccaaaaaatagattctaattctaaaatttattagataaaaatttatatttttttctacatacaacatagtttgaatttttaaaatcggatgtgaatttataaaatagtaaatagtgtttgtaagtaaaaacatattgtactattttggatgtatagaaataaaatgttgtactatactattttggatgtataaaaaaactataccctaagatacaatattgacaacccaagcaatcatataacattagtggtatctgaaaaatctactttatccttcttgtttgtttgttatgtgataacggatgcaacgcgaatctattaaaagaaagtgacaagagtttgcattttggaggtttgtaccctaacaattttacaaaaaaaaatcatttttactagttaggaaaaaaaaacaaaatgtgtgaggattctgagaaaaaaggaaagtgaggtgacatggagatacaaataaaatgctaaaaaaagagaaaaaagaaagagagatgagattgggagaagaaagaaaaaaagacgagagagagtggagagagggaaagacttacagtgaggtagaaagagagggatagaatatggtattattatatataatatagctgtttttttgtcttgtgttactttgttaatttataaatttttgttagttattcttgcaaatttccctatttttatttccttcttaccaaaaaaatatattttcctttccttttcctttattgttgctcacgagaaatagttttttttttttaaattcaacgattttgagcggttccaaatagttgaaaataatttctaaaactatttttaaacggtaagaaccgctattattcataaacactacatttacgagtagaataatcaaactatatatatatatatatatggcatattacatattcgtgaatgagaccccccaaaatggcaaaatacagtactagtctactagagtagatgaatacatattgattttcttacttcttactattttttttttctcactttcattattttattaagtcttagtattttcacggaatacagctttaattatgttttattattttacggatattagagacatgacgcactagagtagacatgaatacatatagatattcttacctcctactatttgtttctctctttcattttattattgagtcttaatatcttgcaggttaacgaatacagcttcaattattttttatggtagccaagatagatctgatgtcgtcggcgatggacatagcatcctcggcacctccgacgattccttttctttaaaatccggcacagtaaagattcttctctcctttccaatgatctggcatcggtgctttggggaatccattcttcttcaccacgtattcatagtcctgtataatatcacaaaaataggatggattcccaaagcaccgatgccaaagcattggaaataagagaagaatctttattgtgccggattttcaaaaaaagtaatcgctggaggtgccgatgatgctatgtccgtggccgacgacatcatcctatcttggctaccataaaaaataattaaagttgtattcgttaacctgcaaatattttacaaatattttaagtatagatttgatcttaacatatacttaataaatctatactacaaatattttaacttgtgctagtaaaaagattttgtcattctacaaagcagcgagcagtgcctaatgcattattcatagaaccatctataggaccttttacagtgattagattgtcaaacgtttaatggtaagaaactaagaatacatctagtaattatgaataaactaaacaatatttttacaatgtgtacttaccctcttgttaggtattctttagtttggaactttggattgactcatgattttgatgaagaaaaaaaaataatgttttaagaaataatatttttgatagaaaaaaatagtttggtaatatttttatttccttcttaccaaaaaaatatattttcctttctttttcctttattgttgctcacgagaaataattttttaaaaaaaaattaaacgattttgagcggttccaaacaaataatttctataattagttttaaacggtaagaaccgctattattcataagcactatatttacgagtagaataatcaaactatatatatatatatatatcataaaatggcatattacatattcgtgaatgagaccccccaaaatggcaaaatacagtactattctactagagtagatgaatacatattggttttcttacttcttactattattattttttttctctttccttattttattaagtcttaatattttcacggaatacagctttaattattttttactattttacggatattaaagacatggcgcactagagtagatatatagatattcttacctcttactatttttttctctctttcattttattattaagtcttaatatcttgcaggttaatgaatacagcttcaattattttttaaggtagccaagatagatctgatgtcgtcggctacagacatagcatcctcagcacctccggcgattccttttcttgaaaatccggcacagtaaagattcttctctcctttccaatgttttggcatcggtgctttggggaatccatccttcttcatcacgtattcatagtcctgtataatatcacaaaaacacatcattatacaagtatttatgcacaagagtatttcctagtctcgttactcgttaggatttcattttcacttgataagatcaaatctatacttaacatatatcgttgtccaatagggtactcatgttaaaatacctctaaccaattgcaaacggagcttttgtaaccagtagcaaacacaatcgcatcgaaatcttgtttatgtccgttttcgaacgtcaaggtcttcccgttgatgcttccaatcccaccattgataacctaacattgcattattagttagttaatagtgtttccatttaatcgaagttaccacttatcatttaactaagtcctcaagaagctttgaacaataaatgcttatgaggttatatcttcattaatttgtgtgaaatcagtaggatatatgaaaaaaaaattgaggtttgaaacatctaaaatcaagggttattttggagtcgtgcagaaattactaacgttatcctcctttacaactgtttatactttaattgcttatccttttcatataaaccaaaatttaaaagactgacactgtttgaccacaaaacagaaaaatagaccgacagttttatacattagtaagaaaccaataaaaatcctttaaaaaataaaataaagatgaagatgaaatttgatggacaagtgaaggtacctgaatctcgccatcgcgaatcttctcgacagttccaacatcaatgacaggagcttttccggtaaagagtttggtggcgaaaggaccttgttttggtcggaagagtccgtacttggagagatctccgtacaaaatttttgccatagtcgtcaccaatgtgtcgaccatcgccactggagcatacttcagaagtgtcatccccaagtgtatcacttctttagtcaccacgtgtctctgcacagatttagagaaagaacattatttgatgtgttattttctacaaaagaaaaccctaatgtatatacacacaccatctacatatggttatggaatgaaaattttagattacattagaactcaatgaaggatatgggtgccaattgatattttacaagccaagccatcatctatcttttggatctcataaatcacaatgagtttgtatccatgaattgaccaaagatcagttattgttaaggccttagggacgtcttagtaattgtgtacaacggagaaaaaaatcacacatgcaagacaagtgtgcatcttaagctttcatgcagacaaattataataattaaaagagacaaaacaacattaattacttactggagttctaattagaatggtcgtattagctccgaagttgcaaagatcaaaactaatctccataccggaatttccacctccgaccacaagaacatttttatctttaaaatcacgaccggacttgtactcactcgagtgcataatctctcccccaaaagtgtcaatcccctccaccatcggaatattcccatctccgttctccccggtcgcaaccaccagaaactccgaccaatacacctcggtttctccggttaccgtgttttcggccacgaccctccacttgttattggactcatcgaacgttgaggacttcacggtacggttgtacctagggttgatgtcgaaacgggcaacgtaagcgtcaaggtagttgacgaaaagctctttggacataaaggttggaacctcacgaccgtgtggcatgaaaggaagctggcaaaattctttggctaagtgaagtttgagacgatcgtacgctcgtttcttccaaagggatgcatagatgtcttctttctcgaggatcacgtttgggattgagtgttggtttagacaaaccgatgttgctaaaccggccggtccagctcccacaatcaccactacggtctccatttcttgtgtttagtttgatagattctctctggtgtgtgtttaattgtgatgttcttggtttcgatggtgatttgtatttatatactcatatccggaaatggagatgtgtatcagtgagaagtttttagcaatcttgaaaatgtgaacacgtatgtagatataccaaaaacgatcaaatatggaatcttcatatattttcaccatttgttagccgttggtaaatggtatttatttgtgctagattttgtttgctattttggatctatttaattaaagtgatgcacatcaagaagaatggggtttgaatacagatcatcataatattgaaacaaattagggtaaaaaacgtaaccatatataacgtctcctagattatgacccacgtgtcttcttcaaatggtaaattggcacttggcagagactatagagacgatgtacggtcatataattctgtctttactatgaattttaatatatggaattaattgatgagtcattttgaatatatttgactatgagagattacagtatttggtatatgataatactataattgcttagatattaaatttgatggtagaatttatcagattagatatgacatgtgtctaaaaatctcaaatatgttatcatattatgaaaagaattatattcagatatatatcaagtaatataaaactgaaactactaattacaaataatttggaaatagccatttcaatttcttagagagtacattataaacaccaatatttgtttttgtttttgattttttttcagtgaactatttattgtgtttgttgaactatacttttttaaaaaaatttagtgtcaaatttgtaatgaatttagtgcaatcgtctttttaaaaatctgacattataattgtattactaattaaacattgtgattctctatattttcgattttttttgatgaataaactatattctttgtatctgacaattttgaagacaactatataatttcacatacatattacgtaattaatatttccaaatttatagatatgtttttaatatctttcattttatcgtcgactattaactcttaagttaaatggaaaatgatccatagttgagtgacacatattattaactcactctattctcgataatgcttttaaataattaaatttatttgttttatttccgacaaaactttttttatgtaaaatttataatgatttttagttatcaattaacaaaacaatcaataacaaaaatttctcgacaatgtgttgtaaatattatttaagaactaataacataaattatatatataatatatttaaattctatcatccttctctatagatattgatcaatcattatgttatattgtataaaaatatgagcaagaaaaaagaataaataacaagaaaagacgaatgaaagataataactaaaaggaaaaactaatatatttagttgtaaaacttcgaacaaaacaacgattcctttaaaagttaaaattatcgcctaaatatccaaatgcgatttttgtggaaacgttatatacgatcgtagattccacgattatagttatcgcatgaatctttttgtcgcgttgaccaaaaatgtagataatattatcaacaaacgcattaatgtaagaacgacaataatacaataacacctgacataacgacaatgtataaatgttttctaatatattgtttcataaaaaaaataaaacggcaagggttcccttataagttaacattttcctctaaatatccaaatgcagttttacggaaagttactaattatcgtagatttaacgattttagttttcgcataaatctttttgttgcatgaccaaaaagttagaaagatattatcgatgaacgcattaatataaaaacaacaattaaaacacatgaaataatgataatataaaagcattttctaatcaatgacattataccatctctatggttacacaaaataaaacaaaactattattttcaaaaatagatcactttataatacacgatttgtatatttttaaatggaaaataaagaaaactctaaactctctcaaatattttgttttttttggtcaatgtcaagacatcgctccttcgtggtcgtgaggagccttatgacaagaaaattcaagggaagcctccctttccgctagtggatctctcagacatatctttcttattctactatttatttttagggtaattattctctattgatctagttttggaagccaacaaaaacacaactctgtttaggtaagtgaaagctctacctttgtcataatccctcaaaatattgtcgaggacctcaagaaaaacttcacataggattattactcgaaacaagtctacaaaatgtgggattttgggaagcgaaacttcaaaatcagtattcatgcgtcagtatagaacaactatgaaattcaaattaaattttttatccaatcacttgtaactgtctttagcgacatgccctagagaaccaatatacatatggactatatggtagtcaaaataataagaaaagtttatttcacatagatcctgtaaattctaagctactaataacatttgaaaagaagagatacacattgattgaagtaaaaattctgaatcaagcaagcacaactcagtggcggatctagagaaacatttagtatagggcactattcatttacttatacatatatatttatcaaaattattattatgtatatatatatttatattagggttaatttgcaaagtagtcacttttttaaacttaattggaaaattagtcactttactattcataatttgcaaaatagtcacttttcactgtttgattcgtacacttagattgtacaccacttttagtgtacaaatatatataaaaatacacagcgtacactttacatttgtacactaaaagtgatgtataatccaagtgtacgaatcaaacagtgaaaagtaactattttgcaaattatgaatagtaaagtgactactttcctaattaagtttaaaaagtgactattttgccaacacatcctttatattaattgttattaaaaaataaatttgtgataaaatatgtagtgttttaacccaaaaaatgtttagttcatcaatacctataatttatatctcacctgtaggtgtccaaatatatttatgaaggtgtatatatataattttggtattcattttcatatatatcaaacttattaaaaatatataagcagacgtattttaagtaattattaaagtaatttaaacaaaatttaaaaatgaatgttcaaaatttaaatgaagaaaaaattacattactgattgtggtggaagaaaaagaaggtaattagaaggagaatatgcctttgacaagtctcgaacctaggaaaggaagaagtaatagtagaaacaaaaaaacatttgtgctaaatcattgttatttgatgtttttacaaacaaacatctataaagtaaacctccctccaacctagatccgccctgagcacaagaaaaaccctagtacatgtataccctctataaggattcaagattactaagaacgagtctatttatccgctatataggattcatcaaataaatgttagttattattagtaatggaattttggatatatacgaaatggactattcctctacaatttgttcgttttgaaatcggaagtatacgcattgggcctgttgtgaacttcgtaaggcccattaatttagatttgcttcttttcctaaccggtaccggtttatggaaataggaagaattagcaattaagatcctcggatcaagttctcaatttctctccgttatctcaatcgcgaccaaagatctcttcgatcaaaaccctagctctaaattcccccaaatctgattcttctcctccgataagcttttgttgaattcacaaagcagcgtaaatggtgttggcggagctaggcgggcggattacccgcgcgatacagcagatgagcaatgtgacaattatcgatgagaaggctttgaatgaatgcttgaacgagatcactcgtgctttgcttcaatccgatgtttcatttccccttgtgaaagagatgcagagtaatattaagaaaatcgtcaatcttgaagatctagcagctggtcacaacaagcgccggatcattgaacaggtttcaattttttccacaaagtctgtttctttgatcgatttttgtaattcgatgtaattgggtttgtttatctcaggctatctttagtgaactctgtaagatgttggatccagggaagcctgcgtttgctcctaaaaaagctaaagctagtgtagttatgtttgttggattacaaggtgagctctttgtatgatgctatttatgttattggttcaaattgggtttgtttttgaatgtaatctcaacttttttgtgtgattatgtttataggtgctggaaagacgacaacttgtactaagtatgcttattatcatcagaagaaaggatacaaaccagctttggtttgtgcggatactttcagggctggtgcgttcgatcagctgaaacagaatgctaccaaggctaagatccccttttatggaaggtactcatcaacctctttgtggtgttccttttttatgaagatttatcttactatcagttttcttcttcggtgctctttagaactttggtggtatttccagaggatttttgttagcttacttataggagtgtatgtaaaaaaatgatttgaattttctttggaacggtagaggcaagttatgaaataggtttagtttagactcgaggtttggtttaggtcagtatcttcatatatctggactgaaaaggacttctgttacttatatgtttctttgtcctatcatccagtaggtttcgtcagatttctctagttctctgcgtgccacttacctttaggggttcttttaagcccttttccctcttttttcttgcgcttttatcggaactcatttcactgtgccactctaatttttttttacatctttgtcgaatagttcaacagtatgcataaatgaatcttttgaggtcttgtggtctcttctttttctatttgcaattagtgctactgtgctatttgtagagttggatttacttcaatgacagtaacacaaagaaatgaaaaaagaagaagacattctggattaaaaccatgctctagggcgtactgtggtagcagattgtgctaatactgagttgtgattcttgcagctacacggaatccgatcctgtgaaaattgctgttgagggagtagatacgtttaagaaagaaaactgtgatctcattattgttgataccagtggtcgccataaacaagaagcttctctctttgaagaaatgcgtcaagttgctgaagcaacggtatgctctgttgccttgaagtcttctgtttgttcctggttgatgttgcagactctgatcatggtcttttcactttacagaaaccagatcttgttatatttgttatggatagcagtattggtcaagctgcatttgatcaagctcaagcctttaagcagagtgttgctgttggagctgtaattattactaagatggacggccatgccaagggtggtggggctcttagcgcgtaagtatcttgtagctactgaatcgtcctatgtacttgaaatggtcaatatgaaattcttgtaggttttctccagttggaaaagtgaatttgatcctttttcattttgttagtgttgcagctacgaaaagtcctgtgatatttatcggaacaggagagcatatggatgagtttgaagtgtttgacgtcaaaccatttgtcagccgtctcttaggtaattatcatggcattgatttagcatttgtgagtattcaaaggcttttcatgggttgttgagtcagaatcttgataattttatctataataggaatgggtgattggtctggattcgtggataagctacaagaggtagtacctaaagatcaacagcctgaacttctggaaaagctctctcagggtaactttacgttgagaattatgtacgaccagttccagaacatactgaacatgggtccacttaaggaggtcagtatctttatttcaaatattattaggcttgaacagctcaagggactgatgataaaacgtgtgagatggttgtgtgggggtgtaggttttctcaatgctgcctggaattagtgctgaaatgatgccgaaaggacatgagaaagaaagccaggcgaagataaagcggtacatgacaatgatggattctatgacaaatgatggtaagaacaataataatatatcttatttggagaaagtgtatcagtagaaataatcagagttctgagcaaaaatgtgatgggtggtttgtgcagaactggacagctcaaacccaaaggtgtttaacgagtcacggatgatgcggatagcaagagggtcagggaggcaagtaagagaagtgatggagatgttggaagagtacaagaggctagcgaagatatggagcaagatgaaaggactcaagatcccaaagaatggagatatgagtgcactctcgagaaacatgaacgcacagcacatgagcaaggtcctcccacctcagatgctcaagcagattggcggcatgggcggtctgcagagtctaatgaagcagatgggttccggcaaggacatgatgggaatgttcggtggcggagacaagtagtatctttcttccttcctttgcacaccaaaaactagacattcttacgttgtcattattagagttttcccctttgtatttgtaaaatatttgcaaattttctccaattttacaaaaagagatttggtaacaaaataatgtctagggtccagtcgtggacattatatattgaaaaccaaaaaaaatttatatcaaaagagtttgggtgaacaaaactgtatcatcttttgaacagattgactctctttgaatcgaaattacatagaacaaacaaacaatagaagaataaattaagagtcatatttgtaatagtattttgatcaatatttgcttgagcattcatattagtgtttagtttagttcactcttatgagattttttttttttttttttgaatttttacttttatattttacttagattttccaattgattcttatgccttttaaaaaaaataaaaaaaaaatagaaagctaaataatatataaaaaggaaaaagggtaatttaaataaaaagaaaatatttaactaggaaaatatactcaatgcttccccttcatattggatggagtatgtaagttttgaatgcctaacttgagaaaaaaatgcatcaaatttctttcttcctaatgtaagtttttacattgtaaataaatatcttgtctaaattatgtttacaatttcatattttattcttctaataaatacttctatagaatttttatgtataatgtttaatgttataaatgtttaaaccgcctaaaatcgtctagaccccaatttaggcgttctaagcgttaagcattaggtcatcgcttgtttagccaagttaagaagacccttcatgtaagaacagagaatcaattggccgacattcttacaaagccattgtttccctctcaattcaagcagttactttgcaagatggacattctctttatatttatgctccattttgaagggggcaattagattattgttaaataatgattcggttgtatatggttaactggggtgttctggattcgtaggttaaatgagaaaagggtttatgaatccttgtacacctctttcaatgattaacagaaacatttttctaattttggctccatattcttcctttcatgaatctctcttgatcttcattttaggaaaagtttgagctatagtttttctgttgtcttccgcctccaataagccttcctccactgtgatatattagaaaaaacgtttatatgcatcaacctctcggatttgtggaccgcaccaaaccggatcatggttgagtactctttaaacgattactttacgtcctcaagcaagctccctgagcatggaatacacattttgccgcatatgcccaacatcttggtcttaagcaaagtacttctgatcactctttgttagtttgcttgcactttgtactaggacagatttgccgtacctccttctacacgttggtgacattctgctcaccacatcttcaatggaaaggagatccgcccctgagttcaaccatcctcttccaacgaattattactagtctcagctcggagtttgaaatggcggatcaaggtcctcttcatcattttctcgggattactgtcaacaaagacgcttcgggtttgtttcttcaccaacaactatgttgccgatatgaccaattgcaactcgtgtcttactccagttgacatgtaacaaaaacttgccacaaataatggtccctcggtctccgatgatcggagtccgatcccagagtctatcgaagtcttgcaggagctctacagtatttaactttcacttgcctgaatatctcatttgtcgttcaacaggtttgtttaaccttatatgatccccgagaatctcatttcactgctttgaagcgcattctccgatacataaacggaaccattacccatggtgttcacatgactcgctctaagaatctctgtcttgctgcctattcggatgctgattgggttgggtgccctaacgcttgacgctccacatatacaaaaagagtttggtaatcaaaaagagtgattagatcggcaagaaaatgtcttgaattcagttgcagataaatcaagccgtgacattacgtgttgaatagttatcaagccgtgacattacaaataaaaagaagaaggacgtagaagaaacaataaaagaatgaattaagtaagaatcatttttaactttcaccaaaaatttgtgacccctttatctgtctttagctctcagaagaaacatgaacaattagctccgagagattcagtcttcaagggtcgttaatctttttttctatgttgcaattatccacttcactgaacctgcaaattagtaaaattttcagacataagagaatgctgatgctgttttctaaaggggaagaagagcaagatcttactggttgtctaaagaggaagaagagcaagatctcattccagatatcaggtactccaggtagacaccaatgactacaatcaggtaccaaaggattatcgctccataaaccgacatgaccatcgcttctaaacgctgacatcgaagttacatccaatattgataccggaatcgtcatgttcttaactacttctttgatcatttcagagaatatgcttttgtctcttccttcagtgtctggggctggatactttgtcacattgcatgatctatgatcactaaacaacaacaacaacaacaacgaaaataacaagaacttagattaaggctgatctaagcaaacgtagaagacgaaatggtaaagctaacgaatttcggtttgtacctccaatgcgatggctcaaatgtacgaaacaaaacccgagttttgtttggatcaactgtactctctatccatgatgcccatgtctctaatgctactctatacgctgcaggaattgacattccgagcctcagtgaatttccaacctgaaagtaacatcccctgacgttccaaacacataatcagaaacaagcgaaaaatataagaatttcgatcacaaaacattctataatccataaagctttgaagacagcttacgtttcgaaaagcttcccaggcacccaccattgaccagtattgaatatgagaaaatcagctgagctccattcgtggttaataacatctaaaacatctaactttaacgttgacttaacacgtttcggtgcgtgccaacgcagcctcccaggctgaactaagaaaaccgatcggtaaaactcaactgtaaaattgtaggagctaaacctcacacccaaaaaccgtatccttttcgtaatattgttcccattgacttcataaacactccttttatcttccaaccctgtcatcaacatgcatatcaaagactcccactgcgtcctactcatcgaatctcccacaaaaactatccttttccctcttaatctcttcaatacatcacgtacttcaaatcttggaacagtacaatgcttaggcttccacctccacttcaaatactcatcgtgtccacgcccattccctaagcaattgaaccctttctctacaaatggacactccgaagcgttatataacgggtagttatcgtcaacaacccaattcccatcgaagatatcacattctgtatcacccacaacagagctgttaaactccaatgccccattgtaacctaagaacgtttgaccaaggctaggaacaacatacaaataacctccagcgatgataacaagaaacgacacaatagttccagcgatgataagcacctgaaacaaatatgagatctcttttaaccggttcgtagaagggcgtggacttcctccaaagttctgtgatctcgggctagcgaaagctgagccaatgggactagtgaagacactagaagatgagttcctagggctttctatagctaaggaactcaatgcccttctattgaatgatgaactcttggtgaaattactcatttcttttcttaatgatccaaccccaaccgcattttcggcattcaaaaccacaacgaaagattcagggcaatctaattagttaccatatacaatcaatctcttctagctccaatacgaattttaaacccatcatgcaaaagaagaatgcatccaacaacaacaatgtcgaacacagagatgatccaatctcttagctgcaacctaacagttgaaaagacatcattttgccgcgaacccagatacagacagatcgaatcaccaaatgggtatcgttcaaatccgtggaaaaaccaaccgaatccgggaagagaagaagaagaagcaatggaatccaaaatcaattccgtggaagattagaatttgagcagagagacttgggaggtgggttcttcagaaacgtagaagaaatcaagacgcggtttgattgattgagatcggagatcagaggaagagagagggatcggcgaggaaagaggacactgtccgattccgatgtctgctcactaatttaaaaattactttgttttattaaagtcagatgcttcaagatttggaattagagaaaaaggactatttggtaaatttagaattcttaacaaaaataaaaatattgtctttgaagttcttggagaatgttgagtctggtctttgatcccttgtctttgctgttgtatccaatttaaggaagattgtgattttgcttttctaatggtgaaacatcatcaaccaaaaagattagcttatcgttaaatcggataatgtactatgtttctctgttactaaacagaagttaggtaatacagttaaatgcgattattaataatgatgggacacagtatcataaactttgtcaactaggtcctactagtactactgattagatttcagtttttgttttacaaatcatataatataaccaagaagaagattgagcaaaatagttcagatttggaagatcgaatttggtaaaagaacaaaagcgttacaagacaaaaatcaacatctaacttgttctatcttttctatatctgacaacgcacgaaacctttgtcctctgctaaattattaaatccaacaaaaacaaatttcttttttctcctgacaatatctctgaagaccaagaagcaaacattagctttgcctgtttcttcacctacctcaaagagaagtagaagttcttaacatttcttagtagctccagcttttatggtggcttttttctttttgtatttagagaaacaatggagtttcatttaaattagctcttcttaactttgctaccatatatggctcaaagttaaagacaaaatcttggttaaagaaaactcaagtgactgtaaatttggctttaaacttgaaataagtgttgtatgaacaaacaaacatacctgaactagcttggtaagcattggttttgaagctgatagatatggccaatcttctcctgagtttgatgaggaatgtttctggtctgcattgctccccgtaagtttgtcaacgaccttcttgactatgtttttgtaagcattctttgttcatcatgattcatgaagagtgaattcagctatacataacaacaatatacaacaaaaatatggatggtggaaaaatatgtgattcaaaataaggcatgattgtttgattacttcttataacgctccacgttgggaacaactactatcacacttaattccccaaaaatgcaacatggcaaataagtggacttaaccgagaggcgagagttatcgttagacaaccaaactgcaacgtatggcaaagaaattgtttatctttgaaaagccttctatcttaaagaaattaatgggctttatagcgctgagaaatttgggctttgtaagattgacatctccctctctgatgattcatattatgcaatccaatatctaagatttaaccatttatttcctcaatatcgtgaatttgtatatgcatatactgtatatgcatgcatgtcttaaacattttacctacctaaagatcgttaaaatagagggatatcataagtaatatcgacctttccaagcataccgacatagacttagatgagtttcgtctgaactcttccaaaagtttgaatttgaacttactaacattgaagttatcgttttttgagaaggatccatggtctagtagtatttcttctgacagttgagtgtcagaggtctcgagttcgagtcactctgccaccacggtagtactagtctctccaaataaaaattctttcatacgtgtaggggtaagcggtgtatactaagtcgtaggtaggaattttctttggatatggggccgctttgcggtgggacttgtcaatataaaaattgtaccttaacagttttttcttaaaccaagtggtggtggtctagtggttttcatttgaagaggagttgccttgttggtccacgccagagatcgatttttctcaaacgcgaaattgctagttatttctacttcccattttcacctaattttccctagaccctagaaaaactaagggcttcagcctgaatctcctaattatcaagaaaaaaaaaagttatcgttttgggaattcaaatcatgtcaaacaataagaaaataattaggtatgaaatatactcttgacaaacataacaacccttaccgcaaaatattaaggaattaatttggccaagcccagggattgatcacatgcagaatcttatcataaaccctatttaatcacccaaatcttattaattaatcaatcaactaacaagatattgatatcagtatctccatcactaatcacgtactaatcattaaccacaaccaaatccaagagtaaacaatttggccaggaaggaaggatgttaacaccgatttttttcttttcttttttcccaataagagaagcatatagtatatccggtatttaatttgtacaaaatgtacagcgtgaaacctcgtcataaattcgatgctatgcatttatttggtgataatttactacgttttttggtaagttaaattcgtctaacgttacatgatttgtctaagttaaatcacatatattttttggatataataaataacatattttgctaactaattcgtataaatgagtaataattttagtctaaataattataatactcgattattcgtctataatatatttatatgtttgtgtaaattcaacaaaaaaaaaagaagtaaattcgtttttatgttttaaactgttagagataaacctatggacttatggtgtatatacagaattgaccggtccacggaaaagtcaacaaaacccagcaattgcatgggactcgagacagtagctaatagtttttttcctcctaaatactttagtttatcttatatggtacaattagtcttcttctttttttttgtcatctatggtacaattagtcgtagtgccttttttggcatcaagatagtattaatgagtaggagcctattttaggcttcgtggaaagatgaactcacattactacgtacatcgatgaaccactatttctaactagtttcgtatcactgaatataaaactagctagttatttccatgacaaatccgaatacaaccacgtatcattgaatatatatccatcacgaattcaaactcaaccacataaagacacgaagcaagaatacataagctctttgaaattggagacgatgcgtgtagagtactcaacttacgaatgaaatgtataacgttgtcaacactctcccatttatacactttttcgtagtttaaaataataattaagcaaaaagaaaaagttcaccaatttgaaacattccacgttcaggagttatccaccattagtctgtactaaactaataaatcagctttttatttttataactgaatatactcatttgcttcatggttcaattatttgcatgaatcacattatcatgacgaagatacgagttaggtttggtactgtataacaaaaacaagttgcagattttgtttttatcaattattaattggttaccaaattacgtgcgtactttgaccaatcaaatctcttgagattcgaacaatatcatccaatggttctcaaatcacaaaaataaaaaggtagcgagttgtcgcattatgttacttcataaactttttattaatttataatttgcatccaatgaatcatttggtagatttgtattatgcagataacattttgtgtattcttaatgtctgaacataaatagagaagattaaaaaaataaaaataaaaataaaaaaaatagagaagattatgcgtcctacaagctggggaagaaatagttgtcataatcagtttcaataattatatcattttctcttaaaccaaagtttcaataattttaaaatgcaatcgaataatctgtttggttattgtaaaatttttgtaattatatactataatgtatatccacgttatcatttatgaatatttttgagaaaaataaaataatatacactatagtaatatacaaataactatatatataagcacacatcgtcgaccactaatgctacattatattatatgagatctctctctctatatctctcaccttcaaaatttgaagattccgccatagttgcatatcaagctagttcgagtccaaaactgcagtcaagattactggttcgtgttcttacacatatattgtactatagtttgcatagttactcagattcttgtttttttcgtttcaatatacagatgattgtataaaatgatgctttatagttctaacttttatacgttctaaagaagcaggttaaacttaattaaattgctgttatcaaaatgtaactacgtaaataagtctgaatacgaaccttctttgttgtatacacttatgacacaagaaattaactactgccattttctcattgccattacatagcgaaatatataaatgaacttacaacaagtagttaacaaaaattaactggtgaatgtatggtaaaacttattggatgttgagatacaatacgaccgcatatttaatatcacctactatatatatatatatatataaaataccatttcttattattcttattcatcgtacttaatatgaaaactttataaatatagctttaatttatgtattttttcgttctaaatactctttcaaacgaaccacaaaatctgttttttaaacgttcaaaactaaaattttaaactttttttttggtcacatctaaaatttaaacctttccggtcttgttacattctggataaattctggccccaaatgtagcaattttaatggtctctggatatatgatgattcggtcataataaaatctccctaatctgtggaaggatttaaacaaatagtatttttggaattctattcaaacaagaaaatattggtagacaaaattaaaatttacctatatataaattatgaaaattcatttaattagaaattagaatacatagcttacaaaatggaaaaagtagaaaagcatatttactcatttgtttaaaataagacaaagcaatgtcaggagaaataaaggtaggaatcttccgtgaaaatgaaatgtctttttacactacggtaaattttcacaaccacaattaattcactgccttacccaaagatgatcatgaatggtaaaactttaggttaataatttgccaattatttttaaaaaaagtattttaagaaaatattaaagtgcattcaagaaaataacactattgtttgtgtgtaagcagctaagaaaaactattgtcagaaagaattttcgaaattcaagggtaatttacttaatctgggttttgtcgacaatcgtgtattttcgttagttctgcgtagcactaaacatgattctgatccaaactcttttttattttatattaaatcgccgttgttgcagagagacataagcccaaaaagcacgaaaacaaaagacaacagtaaaagagagtctgagagattggtcgggagtaagaaagttttaattgtctcctgtctcctgaatcgcggccacttcgccgtcaaaaagatctcagagattctcattgggccgccattgatgcacccaaccactctctctctgagacataacgtaaatgttttgtctggtttttatatcttccttaatcacacggagaagaaacttgaaataacaaatcttgctttggtttgaagaaaaatcaaatcaaacccgagacctaattcctcgtcggctatcagaatttgacttcttgttgtggatcattgcttcttaactagacaaaggtacgaacttttatccagacttttgattattctattcacttcctgagtttcaggaaccgtctttttttgtttaatcgattagtttaagagatgtgtgggtttttcatattttgtgattaatgtaagttcagagaattgagtcgggttagttttgttgttgtttactaatggaagatttggtttttcgcactctttgttaggttttaaacatttgagggatttacggtccgtgaaccgcgttgaggctacaagaagaaggtttatataagaaaaaggaggaagctttttagtttttggtggaagttgtgattgaaatgatgagtgtgggaagaagtgaagttgttgttgatgatttgttctttgattcatctgatgttttgtctattggtgaacaagtagtagtagaagaagaagaagtagaagaagcagagtttcaagtttggtctggtgagccaattagtgttgaggaacgtcgtgtacggtttctcaagaaaatgggtttattagaagagaggtgtctggagaggatggtaagcgattacagtgatgaggttactagttcttcttcagattcatctctctgtgatagtggattgcagtgttgtgttagagaggagaactatggatcaactacttcaatctctgatgaggaactagaaggagtggatgatgatgatgatgattcagaagaaatctcaagtaatgcttccaccagtccatcgcggagttccagcaagaaaagcgcgaaaaaatggttgttcaattgcttttcagcaggagtgaaggataaagatttcaaatacaaatcaagtgaagagacaatgagcaaagtgaaagtgaagactaacaagaagagtcatgtagagttatctgcagcttacatggtacaaaagattaatggacacaaagggaaaatttggacattaaagtttagtcctgatggtaaatacttagcaaccggaggcgaagatggagttgtaaagatatggcgaatcacgctatcggattctctactcgcctcttttcttcgacaacaagaaccaataaaccaacaagcagcattggttctgtttcctcagaaagcttttcatatcgaagaaacaccgtttcaagaactttatggtcataccggagatgtcttggacttagcatggtcagactcaaatgtgagtttattactttgtttttcttttcttgtttttgagatttgttgattcattacttataaaatctgttgtctttggtgatttggctttgcagttgcttctttcagcttctaaagacaagacagttcggttatggagaactggttgtgatcaatgtcttcatgtcttccatcataacaactacggtaagtattttttgcatctcaagttgtttgttctgaaatctttgcaaaaacgtttgttaactcactcatgttgcttttgtctttcaaatacagtgacttgcgttgaattcaatcctgtaaataagaacaacttcgcaagtgggtctatagatggaaaagctcgaatctggggtttgtcagaagaaagagttgtcgcttggaccgatgttcgtgattccatttctgcaatctcttaccaaccaaacggaaatgtaatttgacattctctgtctattctctactcaaaagatcatcctttctaaaaaaactcaactttgctctgtttttgcttcaggggtttgttgttggttgcatcactgggaactgtaggttctatcaaatcttagataacgatgtgataatggatgaacagattcttatccggggaaggaatagaatcaccgccgtggagttttgtcctggaagctccgagaaaattttagtatcttctgaagattcgaaagttcgaatatttgacaaaacacaaatgattcacaaattcaaaggtataaaaaaaaatctttgaatcttgattttacacttcttgaaatctgtgttttgattattttttttataaaaaaattcagctccatcgaattttgggagacaatcgtcggcgtcgtttgtttcttccaccggaaaacatattttatcagttagacgaggtgtcggagtttatctctggaacaacgatgcgtttccttcgaggaaaggcgcaaaatcgtcgcgttctttcgagtattttcattcgccgggggtttccgcggtggcggcttggactcaaccggaaacaaaagtgtcgaaagtagccggtgatgatgaagaatcacggcgcgttatgagaaaaatacagagctctgggagattgtctcgctcctgtcgtgttaccgccacgtggccggaggagaagctccttatgaatgtaggaagttacgatagtaaccttcccgtcggcgagtttgatcttgccgaggcgtggagactggtgatcgtgaccgtgagcttggatgggatgattaggacattccataactatggactgccacgtacattttagagatcgataatctatttttgttttaaataggagaaaacaaaaattgattttttgtttggtttttgttttggtgtctaaatatatgtagattttctagtttctagtccttcgcttccaagttcctcgatggctcaatgccaatttagtcagataagattatgctgcaactgctagagcgactctctcctacttcattttagtccatactagttcattttatctccaagaaaatgactccgttttgcttcaaagctcaaagatgattctttttttaatgggccctcttgaaaaatgggtaaaatcttggtctttttacagatagcaaacatatacaaattatggagaaaacaggattatattgatgcagcttcgttgtagacagacttgtagtcgttttcttcattttcccattcctctgctaaattattaaatccaacaaaaacaaattttcttctgttgcttgataaaatctatgtggaatatctatatctacacactactgaagaccaagaagtaaacattagtttgcctgatcttcacctacctcaaacgagaagtagaagtttttatggtgacttttgtatttagagaaacaatgggattccagtttaagttggctctttttaactttgctaacatatgcctgaaagtggaagacaagaacttggtttaagaaacctcaagcgattgcgattttgggtcttaagcttgaaaaaagtgttgtatggaacaaacaaactaacatatcggaacaagcttggctttggttttaaagctgatagataatggtcgaaccataaccggtatggcccaagatgttcatgttttttaaaactcaccaaagctatatcactaacccacacattcttgcagaaggttttagaatcacaaagcataactcacctacccctaaaccaactccaatttctctcctcctctattaaatctttctcaatcatctttctttgagtcttttgccttggaatcctgatcatggcgtcttctctcacttccaaatccattctcggatgcaccaaacccgcttcttcttcttttcttccgtcggagctccgtcgtctctcttctcccgccgttcagatatctctccattcacaaaccaggaagaacttccgtgagttctctgattcttttcaaaatttttagatttgaagcctgtatctagcttaaagaagaaagatgtgtgatttgaatctctagggcagtcgtggggattgaagaagagtgatctgatgctaaatggttctgagattcgtcctgtgaaggttagggcttctgtttccacggcggagaaagcttcggagattgtgcttcaacccattagagaaatctcgggtctcattaagcttcctggctccaagtctctctctaatcgaattctgcttctcgctgctctatctgaggtatatataaatgtatcacttcatttcttccttctctgtactccgaatttagattattaaagatataaactttaccattttgctgtgcttatatagggaactactgtagtggacaacttgttgaacagtgatgacatcaattacatgcttgatgcgttgaagatattgggacttaatgtggaaactcacagtgaaaacaatcgtgctgtagttgaaggatgtggcggggtatttccagcttccattgattccaagagtgatatcgaactttacctcggcaatgcaggaacagcaatgcgtccacttaccgccgcagttactgctgcaggtggcaacgcaaggtatattgaaggagtaaatgctgaatagttttgatttcttaagaatcgatcttgttttgatgcttttcaatcggtttatttcagttatgtccttgatggggtgcctcggatgagagagagacctataggggatttggttgttggtcttaagcagcttggtgctgatgttgaatgtactcttggcactaactgccctcctgttcgtgtcaacgctaatggtggccttcctggtggaaaggtgagatcttgcaaatggcatgtgaatttataactttataaacacttgcagcaatttgtgttcatcatagccttacttgacaagatttcattttttttgtttgttgtcaatgtattgttcctgaaaacgaattgtttttttttagtagggattagttttctctcttgattacccttttccttgtatggtttctttattgacgcatcgaacattttttgcatttgcaggtgaagctttctggatctattagtagtcagtacttgaccgctctgctcatggcagctcccttagctcttggagacgtcgaaattgaaattgtcgataaattgatttctgttccgtatgttgaaatgacattgaagttgatggaacgttttggggtaagtgctgagcatagtgaaagctgggatcgtttctttgttaagggtgggcaaaaatacaagtaagagttattattctcttccttttctgaaatcacataccttagattgacaaaataatgactaatatgggaaatgattcaggtcgccgggtaatgcttacgtagaaggtgatgcttctagtgctagttatttcctggctggtgctgccattaccggtgaaactgtcactgttgaaggttgtggaacgaccagtttgcaggtaatatttgtacactgaatcatcaaagaggctgttaagtttatagtgaaattcgtttaggtcaaagtttcatctttttaaggctttgacaagttgtatgtaacatattcgcaagaatctaagttcaatttttgtgatgaatctctagggagatgtgaaatttgccgaggttcttgagaaaatgggatgtaaagtgtcctggacagagaacagtgtgactgtgacagggccgtctagagatgcttttggaatgagacacttgcgggctattgatgtcaacatgaacaaaatgcctgatgtagcaatgactcttgccgtcgttgctctctttgccgatggtccaaccaccattagagatggtaagtaaaaagctctctcttataatataaggtttctcaagattcatggtcacttaattctatttggtcaatatagtggctagctggagagtaaaggagacggaaaggatgattgccatttgcacagagcttagaaaagtaaaattcttcttctctctctctctttctgtttacagtgctcattctaagaaattttgcggtatttgtgtccagctgggagctacagtggaagaaggttcagattattgtgtgattactccgccgaaaaaggtgaaaccggcagagattgatacatatgatgatcatagaatggcaatggcattctctcttgcagcttgtgctgatgttccaatcaccatcaatgaccccggttgcaccaggaaaaccttccccgactacttccaagtccttgaaagaatcacaaagcattaaacaaaaaaactctaaaatctccactgttttttcttctgatccaagcttatctgtttccatttttcttgtctctgtaacattattagaaagcaagagtagtgtttgtttgtgtgtacctgaactgagtgagatttgagatgcaatcattgaatcggctttggtatatcattttactctgtttttcagggtgtttgttcaggttctctctagttatcatccactccaaacaggtcccatgatgtctaacgttttggttctaagaatgaacagaacaaacaatacactgcgataaccggtgcttggaagttgtgttaattgaagaaacaatggcaatagctgcatacttatagttgcaggagtgaaaaatgagataagaggaatgcaaatatgcaattgcaggttctattttttttttgctgccaatgttattaccaaaagggctacaagtgagtattctccaagcttggatgaggttattcagggtaatagggtatcaagttagtaataagagtcagagataccatgaaaggattccaagttgtagtaagaacaactcaaattcaaagtgaagttttgtgagttgtgtaattgtgttggagttttgcacaaatgagaagactcttatagaaacagaggggttgaagaagaagcgatatttgcccatctcacttgaaaacactaaccggagataaaccaaattaattggaactattctcagttatggtttggtcctcgtcgttttgggttagtgttgttggtaggtggagaattttgcatttgcatttgcacaacgaagaagaagaccacaagagccatttgcaattaggcataatatatgtcctaactcaccaaccccctcaaaattgccaccaacttcaaatttctctcctttaaacctttctcaatcatctttcttctgccttggaatcctgatcatggcgtcgtcttctctcacttcgaaatccattctcggatccaccaaactcggttcttcttctcttccctcggagctccgtcgtctctcttctcccgccgttcagatctctctccgtacccaaaccaggaagaacttccgtgagttctctctctctgattattttcgataatttcttagattttctgtttctagcatatagaagaaagatgtgtaatttgaatctttagggcagttatggttgactgaatttgattcacatttccattagaacgaattggggagatggaaagttgaaagctttaggagtttttgaattctggtttttaaattggcagagatacaagctactggaagttcatatgggactcattttcgagtttcaacttttggagaatcacatggaggaggagttggttgtatcattgatggttgtcctcctcgtattccacttactgaatctgatttgcaattcgatctcgatagaaggtattttgaggaagaagaaagctcttactatataatatgatcgtttgatttacatgttggtttgctttattaggaggcctggtcagagcaggatcacaactcctagaaaagagactgatacttgccggatatcgtctggagtctctgaaggtctagttatacattctatttcatagtttgagtttgattttgtttctcagccgttgttctaattgttgatatccataaatttgcaggaatgacgacaggaacacctatccatgtgtttgtaccaaacacagatcagagaggacttgtaagttttttttacttctctatgcatataactgtactcgatattgttaactagacttttgctatttgcattagaaagacaacagttttgaagtatagaaagcctgtagattctaacctttgaggaactcactggattttcaggattacagtgaaatgtcggttgcctatagaccatcgcatgctgatgcaacttatgacatgaagtatggtgtcagatcagtgcaggtatctttttctgttaaattactcacatgctacttttcttggtaaggttttatgtgttcaaaggcattgttcagcttaacataccttaagcgttattcttttcaagggtggaggaagatcttcagctagagagaccattggaagagttgctcctggagctttggccaagaaaattttgaagcaatttgcaggaactgaggtgtgtttactttctgattttgcaaatgacactgctctcaaagaatcaatttacattgaactttttatatcccttctcatgtttggttcttctttcatctctctattttttctatcttagtatatccttgcaaataagatgccccttattaactcagtgacccaattctaatgattcacgcaactctttaaagtttgcttctggacttgcttatgtttgtctctgttgtttttttgtgtctccagattcttgcctatgtctcgcaagttcaccatgttgtacttccagaagaattggtagaccacgagaatttaacactcgaacaggtgcaaatcctttttcaaagtataatttacatgttgttttttgagtagttttcatactgtaacggaggtaaaacccattttggtgacctggttcttgctgtcaattttctgcaactttcatccaccgttataactattttcttaatagtatttcttcttattaaggttcttctggtgatattcttacctcattttgtttattttacagatagaaaataacattgtcagatgccctaatcccgagtatgcggaaaagatgatagctgcgattgatgctgtcaggacaaaagggaactctgttggtggtgttgtgacctgcattgttcggaatgctccacgtgtatgaactcactataccatgagcttaatctgtgcgtcctcatgtagtttgattaatgaacttcagtgaatgcttatttaaactactattcgcaggggcttggtacaccggttttcgataaacttgaagcagaactggcaaaagcttgtatgtcgctacctgcaactaagggatttgagtttggaagcggctttgcaggtatagaaagttatacttttctctcctttgtccaatctaaaatcaacctcctttggagctgtataaatcatacgcaaatgaacccgcaggtacctttttgactggtcttgaacacaatgatgagttctataccgatgaaaatggaagaatacgtaccagaaccaaccgatctggtggaattc
